United States Patent Application Publication US 2019/0348154 A1 - sequence listing, part 140

SEQ ID NO: 528354 - DNA, 1101 bp, Stenotrophomonas maltophilia
atggacatgctcgcaaccctcaagaagaagcccctggtcgcggcggccgtcgtcgtcgtcgtggcactgctggcctggtgggcctggaacagtctgctcgacagcgggccgggcgaaggtttcgtcagtggcaacggccgcatcgaggccaccgagatcgacgtggccaccaagctgccgggccgcatcgaggacatcctcgtgcgcgaaggcgacttcgtgaccgccggccagccgctggcgcggatgcagctcgataccctcgatgcccagcgcgccgaggccgaggccggacgccagcaggccgaacacggcgccaccgctgccgaagcccaggtggtcctgcgccagagcgatgtcgccgccgccagggcccaggtcgcccagcgcgagaccgaactggacgcggccaggcgccgcttcgcccgttccgagaccctcgccgccgaaggcgccgcctcggtccaggaactggacgacgatcgcgcccgcgtccgcggcgccgaagcggcgctggccgcgacccgtgcccaggtggccgccgccgaggccgcggtcgcggcggcgcaggcgcaggtggtcggcgcccgctccagcgtggatgccgccgccgccacggtcgcgcggatcgaggccgacatcgccgacagcgtgctcaaggccccgcgcgacggccgcgtgcaggtgcgcgtggcgcaaccgggcgaagtgctgggcggcggcggccgggtgctcaacctgctggatctgtccgacgtctacatgaccttcttcgtgcccgagaccgtggccggccgcgttgccctcggcagcgaggtgcggatcgtgctggatgccgcgcagggcgcggtgatcccggcctcggtgtcgttcgtcgccagccaggcgcagttcacgccgaagacggtggagaccgagagcgagcgccagaagctgatgttccgggtgcgtgcgcagatcgcgccggagctgctgcgccagtacctggaccaggtcaagaccggggtgcccggcgtggcctggctgaaggtcgatccgcaggccgaatggccggcgtcgctggcggtcgaccctgcgctgatggcccgcacgacggactga

SEQ ID NO: 528355 - DNA, 1500 bp, Stenotrophomonas maltophilia
gtggccaagcatgcaactgccatcccccaggcgtcccggacgacacttcgccatggtgtcgccgccggcctgctgacggcggccctggccggctgcggcacgctggcgccgcgcccggccgaggtcgccccgccgattcccgccgactggatcggcctggccgaagcggatgcggccgcaacccccgcaacccccgcggccgtcgtcggctgggaggcctatttccgcgatccgctgctgcagcgactgatccggatcacgctggacaacaaccgcgacctgcgcatcgccgcgctgcgcgccgaggaagcgcgcgcggcgttccggatccagcgctccgagcagttccctgcgctgggcgtcaacgcccagggggcgcgggcacgggtgcccggcggcctcaacgccagcggcgtttccgtggtcggcggcgagtaccgcgccgaggtcggcctgagcagttgggaactggacctgtggggcagggtgcatcacctcaagacgtccgcgctggaacagtggctggccagcgaggccgggcgccacgcggtcgaactggcgctggtggcccaggtcgccgacggctacctgggcctgcgcgaactggacgagcgggtcgcgctggcccggcgcacagtggacacgcgcgccgaatcgttccgcatcttcagccgccgcttcgaggttggcgcggcctcgaagctggaactgacccaggttcagaccctgctgacccaggcccaggcgctgctggcgcagttggagctggcgcgcgcccagcaagcgcatgcgctggggcaactggtcggtgcccatcccggcccgctgcccgaggcggccccgttcgacgaggccctggtgctgtccgaactgtcgccggccctgccgtccgacctgctgatcgcgcgtccggacatcatcgccgcagagcaccggctgcgtgccgccaacgccaacatcggcgcggcgcgcgcggccttcttcccgcgcatcgcgctgaccggcggctggggcagcgccagcgccgaactcgacggcctgttcgactccggcagccgcgcctggaccttcgctccagtgctgtcgctgccgatcttcgacggcggccgccgccgcgccaacctggcgctgagcgaggtgcgcgaggacatcgcggtggccgagtacgaaaagagcatccagaccgccttccgcgaggtcgccgacgcgttggcggcgcgccgctggctgggcgagcagcgcgacgtgcagcgggtggcgctggacgcggcggcagagcgcgcgcggctggcgcagctgcgctacgaccacggctcggccgcctacctcgaagtgctcgacgcccagcgcgatttgctggccgccgagcagcaactggtgcaggcgcggcgcgccctgctgtccagccaggtcgcgctgtacgcggcgctcggtggcggcagcgccggccgcgtgccggccgccaccgattccccctccgattccaacagcgccaggtag

SEQ ID NO: 528356 - DNA, 765 bp, Stenotrophomonas maltophilia
atgggcatcctggacggcaagaaagggctgatcatcggcatcgccaacaatcgcagcatcgcctgggcctgcgccaaggccatggacgccgccggcgccacgctcggggccacctggcacacggaaaagtcgcgaccgcacgtcgagccgctgctcgacgcgctgggcgcggacatccggcggccgctggacgtgttcgaagacgcccagatgcaggcgctgttcgacgcggtcgccgaacgctggggatacctcgacttcatcctccacgccgtcgcctacgccccccggcaggatctgcagggtcgcgtcaccgacagctcgcgcgaaggcttctgccaggccatggacgcgtcctgccattccttcatccgcctggcgcggctggccgagccgctgatgccccatggcggcagcctgatcacgatgagctacctgggcggtgccgaagtcgtcccccactacgggatcatgggaccggtcaaggccgcgctggaatcggccacgcgctatctcgccgccgaactcggccccgccggcatccgcgtcaacgccgtttctcccggccccattccgacccgcgccgcctccgggctgagcaacttcgatgcgctgatcgccgacagcgcggcgcgcgcgccgatgcgcggcacgttgcgcatcgatgacgtcggtccgctgtgcgccttcctggccagcgacggtgcccgcgccatgactggttccacgctgtacgtggacggcggctaccacatcctcaattga

SEQ ID NO: 528357 - DNA, 1776 bp, Stenotrophomonas maltophilia
atgctgcactacagcatccattctcatgccgggacggacatgccccccccatcgcacggcccccatccgctggacgtcaaggcgagcgccgccctcgccgggcttacggcctcgatgtcgccgcaatcggccgtgctcgcctggacggactgggccacgcacctggccgcttcgccgggcaagcaatccgaactgctgacgctggggctggagcaggccgcgtcgctggccggctatctgcgcgaatgcctgctggaaggccctggcaaggcccacggctgcatcgagcccccggcgcaggatcgccgtttctccgacctggaatggcgccgctggccgttcaacctgtggcaccaggcgttcctgctcaaccagcgctggtgggaagcggccacccgcgacgtgcccggagtggagcggcaccacgagaacgtcgtcggcttcgccgcgcggcagtggctggacctgttctccccgggcaaccagctggcgaccaatcccgtggcgctcaagcgcacggtcgaggagtcgggagcgaacctggcgcgcggccaggccatcctcgcggacaacctgcagcgcacgctcgccgggtcgccgccggcgggcacggaggatttcgtggtcggccgcgacgtggcggcgacgcccggcagggtggtgctgcgcaaccgcctgatcgagctgatccagtacgcgccgaccacggcgaaggtgcatcccgagccggtcctgatcgtgccggcctggatcatgaagtactacatcctcgacctgtcgccgtccaactcgctggtgaagtacctagtggatcaaggccacacggtgttctgcctttcctggaagaaccccggcgcggaagatcgcgacctcggcatggacgagtacctggatttgggcttccacgccgcgctcgatgcggtcaacgcgatcgtgcccaaccgcaaggtgcacgccaccggctactgcctgggcggcacgctgctggcggtggccgcggcggcgatggcccgcgacggcgacgaccggctggcctcgatgaccctgttctgcgcgcagaccgacttcagcgagccgggcgagctgggcctgttcgtcgacgagagccaggtcaccctgctggaagcgcagatgcaggtgaagggctatctgggggccgaacagatggccggcgccttccagatgctgcgctcctatgacctgatgtggtcgcgccgggtcagcgagtacctgctcggcgaacgcaggccgatgaacgacctgatggcctggaacgccgacgccacgcggatgccggcgaagatgcacgcgcagtatctgcgccggctgttcctcgacgacgatctcagcgaggggcgctatccggtggacgggcggccggtgtcgctgggcgacatcgccctgccggtattcagcgtcggcacgatcaccgaccacgtcgcgccctggcgctcggtctacaagctgcactacctgtcgccggccgagatcaccttcgtgctgaccagcggcggccacaacgccggcatcgtcagcgagccgggacggcctcggcgcagcttccgcatcgccacgcggccggctggcggcaactacgtgccccccgacccgtggatcgaagccaccgcgccgcaggcaggctcgtggtggccggcgtgggcggcttggctgcgcgaacgctccgcagcgccggtggcccctccctccatcggcgcgccgcgcaagggctgcaagcccctggacgatgcgccgggccgatacgtcctggagcggtga

SEQ ID NO: 528358 - DNA, 3846 bp, Stenotrophomonas maltophilia
atgaaccgtatctatcgacgtatctggtgtgccgtccggcagtgctgggtggtggccagtgagctgagctcgccgcgcggcaagccagcgcagacgcgggtactgatgtctgcgcttctgctgacgaccgccggcggggcctttgcggccaatgaaacggatgacctggatctggcttcagaatccagtcccggaacattgctgatccagaaggagctcattcccgtgatgtccttcgcggcgccgaattctgtcgcatccgcgatcgcaccgcgcgggaggtacgatcagtgggcaattgtaatgagcggaaactacgccgacgctcgtgtcagcggcgctgacgttctggcacttggctcgcgcgcacagatctacggcaccgaatccactggcttgggtaactacgcagagaccagcggcggatacgcaacggctgtcgggcataacgccagggcctatggcggtcatggaactgccttgggaacaagctcgtatgcaggttccaagggcgcaacggcacttggacacgatgcgcgggcagcgggaagtaacgcaatcgcgatcggcagtggcgcacgcgcctcctattctgaatcggttgcgattggagcgaactctgtagcctacgaatccggaacggtttcgatgggtaacagcgtgcagcggcgtcgtatcactaatattaacgcgggagagtctggttacgacgcggtgaacgtaaaccagctgaacaacacgaatcgcaacgttgcgacagtagaaggcattgccaatactgcgcgaagcactgcaaacaacgcgcagacaaccgccagcaatgcgcagacaacggccaatagtgcaaagaacaatgccgacagtgcgctcgcgaaggccaacgtgcgcgaagggctgctcaatcagacgtcgattagcagcacggtccgcctcggtggaagcaacagcggtgcgcttctcgatatccgcaacagcagtgggggcagtcgacgcatcaccggtgtggcagatggtcaagtgaccaccagcagccttgaggcagtcaacggccgccagttgtacgcgaccgatcgcctcgctacccgcggtgacgcaacggcgaccgcggcaatgcgcaaggctgacgcgacaaccgctcagttgagtggcgtgtcgctggcgctggggcataccgcgacggccaacagcagttatggaacggcactgggggggagcaccaatgcaggtgagtatgcagtcgctgtgggttaccaggcattggccaaggcgaagaacgcggttgcgctgggctatcgatcggacgcatctgcggcgaacagtattgcgttgggtgagtacagccgggcgtacggtggctccagcattgcagtgggcaactcgtcccaggccggtggtgccggcgccgccagctttggttttggcgcaaacgcaagcgcagacaactcgttggcgtttggcggcctcgccaaggcttctcacactggttccgttgcgttgggcaatgattccatcaccaccggcatcaatcaggtatctgttggcaatgcgagcgtgcaacgcaagatcgtgaacatggctgatggcctcgtcgccaagggcagcaaggaggcggtgaccggcagccagctgttcgataccaacaccactgcgcagagcgctaaggtagcggcggatgccgcattgttgcaggtcaaggcctcttcctacctgttggccaacggtacggtcggtagcgatacaaccaaggcaaaggcaaccggcacgggtgcgctggccagcggcatctataccgaggccagcgggacggctgcaaccgcgatgggccgtacggccaaggcattggcggaaggagccatcgccatcggtgatcgcgccggcgtcgaatctgttacatccaagcacagcatcgccatcggaaccatggcaaagaccgggccgcaggaagatctgctggccattggtcgcaatgccaatgcctccggcggggtcggggcgatggctctgggttatggcagcaccgccagccatctgcgctcggttgcgcttggctcggattccacgaccagtgcccaggaccaggtgtcggtgggtagcaccagcatcaagcggaagatcgtcaatgtagccaatggcagcctaacctcgaccagcaatgaagctgtgaccggtgcgcagctcttcgcaacagatcaggctgcgcgtggcgcggaatctacagcgaaagaggctagtgggaaggcggctcaggcacttgcgaaggccgcgacgctggagggcctggtcagcgaatctgctccgacgggcaatgttcgattgggtgcggcgaattccggctctattgtggacgtgcgcaacagtagcggcagcaagcgtcggatcagtggcctggaagatggcgccttgatcgctggtggagcggacgccgttaacggcggccagctctttgctaccgatgagcgcgcgaaggctgcgcatgacgttgccagtgatgctgcttccagggtcgcggaagtggaggcgcaggccaagtactcctctgtgggtgctggtggtccaggcgtggctgcgcgggctggcttggtgggcgttgcaattggcgattccgctcaagcatcgctgaactcggagggggcggtggctctggggagtttcaccaacgcagccggcatgaattcagtcgcattgggacgcgctgctcgggtgactgagtatgcacagtctggcttcgcactcggcgcaagttcttctgtcgatgagattgctggtctggcacttggtgctgccagctcagtgaagcgcggtgcggtcaattcagtcgccataggtgctggtgctgtggcggacgaagctcgcactgtgtcctttggcacagttggacttgagcgccggcttgttcacattgcccgcggcaccgccgatcacaacgccaccaccgtgggccagttgaacgacagcctcgccaccctcggtggtggcgccaagctggacgccaacggcaacgtgacagcccccacctacagagtccagaacaccgaccagcgtaccgtgggcggcgcactggccatcctcgatggcgccgttctccgcaccacctcccgcgtcgacggcatggaaggccagctccgttccatcttccaggacaccgccaccgcccgtgccgatggcttcaaccaactcaccctcgccggtgcgcagggcatgatcatttccaatgtggccaacggcctgatcgccgcaggtagccgcgaggcagtcaacggcggccagctgcatgcggtgcagcagcagctcaacggccgcatcgacgggctggaacagcgcgtagacggccagggcccggcgccgcagtcgcgtgccatggcgctggcatccaccgagcaggaggccgcggtacccacgccgcccgccacgcaggacgacaaggtcgtcgccgataccggcaacgcaccgaagtcctcgcccgcgccgcagcccaaggctgatgcgccggaatcacccaagccgcaggtcgacaccgccgagctggagaagatgctggcccgcgccaacgactatagcgatggcatcgcccgcgaagtggatgcgcgcttgaacaagatggacaagcgcttcaaccgcatggcggcgatgagcagcgcgcagaccgcgatggcgatgaacaccgccggcctggccacctacaaccgcctcggtgcgggcgtgggctatgccgagggcgaatcggcgatggcggtgggttaccagcgcgtgttgaacgacaagggttcggccaccttcagcctcaatggtgcgttcaccaacagtggtgagcgcagcgtgggcgtgggtgtgggcatcggctggtaa

SEQ ID NO: 528359 - DNA, 708 bp, Stenotrophomonas maltophilia
atgaacaagttcgtctacctgttactgccggtggcgctgctgcttgcagcgcccgcccatgccaatctgaccgttcaccccatgcgatcgtcggtggagggaaaacgcagcacgcagatccgtgtgtactcgcagtcaacccaggcgcagtacgtgcaggcaacgctgcgtcgcatcgataaccctgccagcgccaacgagcaggaaagtgaggttgagccgcacgaggccgccatagcggtgacaccaggaaagttcgcattggctggcggcggcaaccgcctgatccgcgtcattccgctgcagcccgtgcagaaggaaaccgcctaccgcgtgtacttcgagggcgtgcgcgggccagacgaagccacgcaggaaggcgaaggccgctcccaagccaacgtaggggtcagcctggtatggggtgccttggtcaacgtgctgcccatcgatggcgaggtggcgctgcagctgcagggcaacaccctgctcaacaccggcagcctgcgcgtgggcattaccagcgtggccgagtgcacgcgcgcgggcgcatgcaccgcccacgacatcacccacagcctgtacccggatgccgcgctggagctgcccttccagcccaaggccggcaacaccctgcagctgcgctatcgccttacccgcgacggctaccgcgagcacgtgcagatcgtggccgcttcagcaggctga

SEQ ID NO: 528360 - DNA, 1137 bp, Stenotrophomonas maltophilia
atgaaacggcgagtggtgtttgtgtggatggtgatgagtgggttggctgtagtggtgccgaaagtgtgggcgcaacagccgccgcagaccgatccgccgcgtggcgtgttcacacaggatgtggtgatgcgctgggatcgatccgccgttccggcggacgtcgagctgtgggcaccacgcacgctgctggcttacgacacggatctgagtaagcgctatggcgagctgtacatggtgtgtgcctcggcgacggatagcagcacgggacgatgtccggtggaggacatgcttaccgcactcgcatatcaaacgacgccgatatcgataaagttcgaggatgcgcgtacaggcctggcgctaaatgcggacgcgaccgccgccctctaccgtgcagactccaccgttggctgctctctcgactactgggcgccagggacgtatggaatatcctcatctgtaagccccacgtgcgatccggttccttcgggaaccggcaaagctttgacgatgcgtggagctgatctgctgaagctcactgccggtcattggaaaggaaagctcgaactccacctgcggcgcccgccttctgagcatctcgccacttacgtcttcaacttcgatttcacgatcaccgattacgacgcgatctcgatctaccttcccgcgttcgagaacggcaatgccaacgtcaacatggaccttcgttacgatccgcgtaacggggacatcgccggcagcaaggacgtcgatatgtgcctgtacgacggcctcggttcgcagagcgaatacctcggtgtcacggtgcgcgacacaggctcacggcccagcgtcggcgacgactactcgctctggcaccgcgatgcgactggcgacgaccgcgagcgcgtgagcttcaacgtctggctgcactatgccggcagcaagcgccgcatgcgcaacaacgtggaagagcagctgctgggcgtcgacagcaccgcgctaaggctggtgaagcttcccaaactcgatcagcccgtgttctgcgttcccacgcccatcactttggaaacgccgcgctttccagcgagcgcaaagcgcgaaggcgtttatacgggtgagctgaaggtggaactgcgcgtgcccaccgaccgcccctga

SEQ ID NO: 528361 - DNA, 2733 bp, Stenotrophomonas maltophilia
atgaacattcccgcccccgccgttacccggctggcgatggcgctcgccttggcgctggcccccgcgctgtgcgatgcgcgtaccgtccccgccggtttcgaagatctggttgaaggccagaccgaacagctggacgtcagcctgtttggccagtcggccgggctgtcgccggtacgggtaacgctggatgacgtgcagttgctggagccaaaacgtgtagccgaagccctcgggctaactgccgaagcacaggcggccctccttcctgcgctctcgcagccgatgccacgcaacagccatctggcctgccgctacggcggcgctgcagcgggctgtggctacatggcgcctcccgaggagcccactgccgtaagcgcgctctacgacgagggcgaaggctcggtgcgcctgttcgttgcccgccagtggatccccggtgaagtgcgcgagccgcaccgcttccacagtgtcagcagcaacgccgagaacgcgtggctgcaccggcagaccttcaacatcagcggtggccgcgattaccagtcgttgagcgcacagggtgcaggcacgctgggtgtgttcgcgcgtggccacctggcaggcgagtggaactacaaccgtcagcagtaccgccacggcggcagccgtgatgatttccagctggacagcgcttattaccggcacgacctgggccaggagcactacgtgcaggctggcctgatggaccgccgcaacctgtccagcacgcagggcggcaccttcgccttcggaatgctgccactggaccgcttccgcggagtgcgcttcggcaccacttacgcttacgtggatgccgacggcgccgtgcaggcgtcaccactgaccgtgctgctggcgcgcgatgcgcgcgtggatgccttcgatggcgagcgcctcctgcagaccttctacctgcaggcgggggtgaaccagctcgacacccgcaacttcccgatgggcagctacaacgtctccctgcgcgtgtacgaggacggcatcctggtgcgcagcgaagatgcgccgttcgacaagggcggcgactggaccgacagccgcatgcagtggttcgtgcagctgggacagcgcgatgagcgccgcagcaacactttcgacagcgaccaggccctgcatgcgggcgtgcgcgtgccgctggtgcgcgatgtggccgttaccgccggtatggccgacattgccggcttcacctatggcgaagtacggctggatgtgcggcgccagttcaccacccaggatgtgcgcggtgccttcagcgtgctgcgcggcagtgatggcagcagcggccagcagcatcagctgtcctaccgccgcacggcggcgtggaacctctaccagcaacgcatgcgcggcaatgcctgccgcttccaggacgatgcgcgcgaccggctgggctgcagcgattcgctcagcgcctcgatgtcgctgccagtggccggcggcagtgcctacgtgggctacacccgccgccagacctggcggccctcgcgcgagttgcccggctttggcgatgacccgctggacgggctgctgccgtggctgccgccggatccgctgcgcccgcagcgcgaggccaagcgcagccgcacctggcaggccagtttcagccgtacccatcgctggggcgagttcaccgtttccacccgcaccggcgtgtggcagcagcgcaacgacgccgtgctaggcacacagggcagccgcgaccgtggcgtgttcctcagcgtcagcctgagccgcctgcagcagggcgagcgcggcagctcgcagcgccgctatgccgtggatgcgcgccagcccgaacaccagcgcccggacgtgacctacagcgtggcgcagagcctgcgccaggacgtggacgccaactaccgcgaagtgaccggcgaactgcgcgccaccaacaatgaccgctacagcgccacgctgggtacgcagctgcagaacccgtggggccagaccggcgccacgctggctggctaccgccagccgggccgaaacacttactcgtacagcgccaaccacgcctccagctttgctctgagccgccgcggtctctattggggcggcggcgccaccgccgatgccggcttggccgtgcaggtggatgacaccgacgacctggacctgagcggcctggccgccgagctgcaggtgggcggcgcacgccgccagcggctgaagctgggcgagcgccggctgatgccgctgcaggcctaccagacccaccgcgccgagctgcaggatgcaagcgcgctggagggcatcgcttcggtgcgggtaaccggtgcttcgggcatgcggccgctgttcctctcgccgggccgactggtacgcatgccggtgcccatcgaggtgacctacaccttcatcggcagtgcgcgcgacgtggcagggatgccgctgggcggcgcccgcattctcaacgcgccggtgccgggcaccagcgccaatggcggcttcgtggccgagtttgcgcgctttgagaagacgctctatctgctgcaggacgaccgcctgctgcagtgcccgctgcagatacgcgagcgccgcagcgtggtgctgctggtgggcgccgtgcagtgcgagccgcttgccgtggcgcagctgccgccggagatccgccagcaggcgcgagtgacgcggctgctgcaggaacaggccttgattgcggctgtaccgcagaccgctgctacaggagaaacgccatga

SEQ ID NO: 528362 - DNA, 534 bp, Stenotrophomonas maltophilia
atgaacgtcatcatcaagaaagccgcgctcgctgcagcgctggccaccgcttcactgtctgcgcatgcagtcgacacccgcatctccgtctacgccaacgtggacaccacacttgccttccagcaggagaacggcagcccgctgccggacagcatcaccatgaactacctgccggagttcaacgatggcagcggtggcaacgtccgtcccggcggcctggagccgtggacgctgatgacccgcatcttcaccaacgacgacagcaaggacattcaggtcagcctgcagaatgctctggaactggtgccgaccatcggccacgtgggtgccacgccggtgccgatgaccgtcagcctgcacaatctggaactgaccaccgccagccaggatctgagcgccacagatctgttcgatggtgccatcgacggcgtctccaagccgctggaactggcaatcacccagaccaccgccggggtgctgaagtccggcagctatgaaggcatggccaccatcgtgatgcgccagaagccgtaa

SEQ ID NO: 528363 - DNA, 1128 bp, Stenotrophomonas maltophilia
atgacgccatcggatctgctgcagctggcggcaggcgccgcgattctcggcctggccgccttgtccaccggagtgagcttcggccgcgcccggcatggcagccacctgctcaccaccttcttcgcctgtttcgccgccgccaacctgttcggactggtgctgctgggtggccaggcctggctgtcggccgacgccgtgcgctggctgcgggtcatcgaggtgccactggtctttctgctgggtccgctgctgtaccgccatgcacgtgcgctgctgtcccctgcgccggaccacacttcgttgctgccgctcgcgcatctgctgccggccatgctcgcgttcgtcatttccctgttgaatgctgctgcgcctttcgaagcctcgctgctgggcaaggtgctgttccagctcagcttccatggctggctgctgcagggcacgccctacctgctggccacgctgtggctgtcactgcgcacgccttcggctccgcgcggaactgccatccaacgcagcggactacgcgggctggcaatcgtgatggcgggctgctggctggccagcgcgatgaaccggtggccgccggacgccgctccgcttctggccagtatcgggctcagcctgttaaccacggcaggtatgtacctgctggcgtgccaggtcgtacgccagcagctgcgtgcacgtgtggtcacttcggcacccgtcctgatggacatgcccgcatccaccgaggacacgccccgcgcacgctacgaacgctcgggcatcgatgcaacgcagtgcgcggccattgccagcgcgctgaccgcattgatgcaggacgaacgcctgcatgaagcgcccggactggatctccagtccctcagccagcgcagcggctggtcatccaaccaggtctcgcaggccctcaaccagggcctgggccagaatttttccgagttcgtgaccggcttccgtgtggctgcagcgagaacgtgcctgtccgatccgtccgacctccgcagcgtgctggacatcggccttgctgccggcttcggcagcaagtccaccttcaacagcgcgttcaagcgcgccaccgggcagacgcccagcgagtaccggcgccgtcgcaccacgtccgactga

SEQ ID NO: 528364 - DNA, 471 bp, Stenotrophomonas maltophilia
atgaatacatccagcaaagaggctggccgcaatcacgtggcgtcgatgaagccgagaggcttcaccttgatcgagctgatggtggtcctggccatcatcggcatcctcggcgtgatcgcactgcctcagtaccaacgattcacggtcaaggccaggttggccgctgcactcgcagagttggcgccgggcaaagccggtgtagaggccatcctggccgaaggcacattgctgtacgacatatcggtaacgcccgaatcactcggcctcccaacgcccgcgaagtactgcagggggttcaccgtacagatggaatttggcgacctgagataccggatgatctgctacgtgggaacgcacgcggcctatggcggcaatcgcaggatagaccttgtactggacaaggatctgaagtggcgctgcacaagcgacatcgaagacaagagcctgctgcctgaaagctgtcgttcctga

SEQ ID NO: 528365 - DNA, 816 bp, Stenotrophomonas maltophilia
atgcatcctgcccttcgttgccttctgaccatcgttctgggcacctgttcactctggcctctggccgcgtgcgcgtccgaatccaatgaacgtggtgcagcggaagcagcccgggacgaagggcgcttcatcgctacctatgcgagggcatccacccggggcaatgcggtagaggctcggctgtggaaggaacggaagctgctggaagacttcgttgaagcgatgaacagctacatccgcattccgcgtgacatcgaggtcatcgccaaggagtgcggagagtccaatgcctactttgatccggaaacgagcagcatcgagctgtgctacgagatgtctgctgaggagcgcatgcgctttgaggcggcgggcgatgccgccgaagacatcgagaacgcgctgtaccagagtgcggtaggtacgctctaccacgagctgggccatgcactgatcagcgaattggagctcaagatcaccggccgcgaggaggacgttgcggatcagttggctgcctacgtactgaccgcagatgatgaatccaggcagttcctggtcacggttgcagatacctatgtgctttctgcgcaggagcagacccgtatcgaagatctgcccacggcgggcacccattcgttggacttccagcgcgccgtcaatttcctgtgctacctgtacggctcagacaccggcaccttcggctatctggtgaaggatggaacgctgcccgaggagcgtgcggagaactgcgagcacgagtacgggcagctcgccgatgcctgggagtcgctgttgaagccgtacctcaagccagagtaa

SEQ ID NO: 528366 - DNA, 315 bp, Stenotrophomonas maltophilia
atgatcgccctggacgcggcatacgtgcctgacgccgatgaggatgaggacgagtacgaccgccgacgcctgcccggtgcctactcccaaacgctccatcacatccgggagctgcgcaaagagcgcgatgccttgctactgcgtggccacccaggcgacagattcagggccgcccacctgtcgtggttcatcaggaacaacgagcactatgccggccgcctcccgcagcgaatggaacaactcggtgccaccgccccgcacgcactcctcaccccgcagccggcactgccggcccaactggacctgttcgtatga

SEQ ID NO: 528367 - DNA, 426 bp, Stenotrophomonas maltophilia
atgaaccccatcatcctcaagaagatcggcgccgaccgcaaccagctgccggacgattccatcgaccacgtcgccgtgttcctgcccgactacggcctgaccttcactgccaccagcatcgtggaaagcgatgttccgcatgctgactgcgaatccgccgccaaggccctggacctgctcggccacaccgactgggatctgccgaccatcgaggaactgcagctgctgatcgaccgcagccgctactcgccggccatcaacaccgacttcttcaaggacatccagaacgactggtactggtcgaagaccccggccgcctggtcctcggcgtccgcgtggtacgtctatttctacaacggctacgtcgcctacaacccccgctacaactacgggttcgcgttggccgtgcgtcgtgccggtcagtga

SEQ ID NO: 528368 - DNA, 906 bp, Stenotrophomonas maltophilia
atgaatctgttggtgttcggcggcaatggccaggtgggccaggaactgctgcgggcactggcgccgttgggcaaggtcgtcgcgaccacccgcagcggtgtcctgcctgatggccgcgtctgcgaaactgccgattttggccagactgaaagccttacggcactgctggatcggcttcagccgtcgatcgtggtcaatgcggccgcctatacggcggtggaccgcgccgaacaggacgcagatgcagcctttgcggccaatgcgctggcaccgggcgtgatcgcgcgctggtgtgcgctgcagggcgtgccgttcgtgcactactccaccgactatgtattcgatggacacggcacactgccctaccgcgaggacgaacccaccgcaccgctgggcgtgtacggcaccagcaagcgtgatggcgagctcgccgtgcgtgcagcgggcgggcgccacctgatcttccgcacggcatgggtgtatgcctcgcacggcgcgaacttccttcgcaccatgttgcgggtcggcgccgagcgcgacacgttgcgggtggtggtcgaccaggtcggcacgccgacccccgcagcactgatcgccgatgtcactgcactggcattgcagtaccctggccagttgtcaggcacctggcacctgactgccactggccagaccagctggcacggattcgccgaggcgatcttcgccgaagcgttggcgaaggggctgctggaccacgcaccggtggtggaggccattccggcttcggactatccgaccccggcgcgccgcccggcatggtcggtgctggacaaccgtcggatccagcacgatttcggcatcgtgctgcccagctggcaggacggtctggcgcgggtgatcggcgagatcgcattgcctggcagctga

SEQ ID NO: 528369 - DNA, 975 bp, Stenotrophomonas maltophilia
atgagtaagtcgcccgtcatgatcgatggcatcaacgaaccttcgcccccggttctggacgtttccgtcgtggttcccgtgtatggctgccgaaactgtcttgaagaactggtcgaccgtgttggccgggtcctgcaggcggactcgcggtcgtatgaaattgtcctggtggacgacaacagcccggatcagtcctggtccaggatcaaggagctgtcggatcgacatgaggctgtccggggcctgcgcctctcacgcaattttggccagcatgcagccatcaccgccggcctcgcccatacccggggcgagacggtggtggtgatggattgcgacctgcaagatgtgcctgaagagattcccacgctgctggccgcgatgacgagggatgtcgaggtggtgctcggccagcgcattgaccggcaggacggctgggccaagcgcacgggctcgatgctgttctaccggactctggggtggttgaccgatacccgttatgaccacaccacggccaacttcggtgcatacagccgcaaggtggtcgataccttgaacagaatggacgagtccgaccgtttcctacccttgctggtccgctggaccggcttcaatacggccaaggttcccgtgtcgcacggcctgaggaccgagggaaagagcggctacagcctcggaaagctgctgcagatggctggccgcattgcattgtctttctcggacaagccgctgcggctggttatgacgtcagccctcatgatcgccctggtcgcagcggcaattgccgtgttcagcgtctatcgctatagttccggagatatacgtgttgcgggctttaccagcatcatcgcgtcaatctggctggtgggcagcatcgtcatggcatgcataggcgtgttgggcctgtacctgggcaaggtgcacggcgaggtcaagcgacgccctcgctatctggtctggcaggacacatggaagtga

SEQ ID NO: 528370 - DNA, 774 bp, Stenotrophomonas maltophilia
atggaagtgaaatcaacgagccccacccggcaccttgcagcagcgcccctggattcgcgccgttttggcatcaacgtgcttcgcggcacgatcgacgccggggtggacactgccgaggtcattgaggagatcgaggcaagcgacgccgacttagtgatcttccgcgtgcctgccggctgcacggaggtgccgaccggcctgcaacgccggggcaacgtggtcattcacgcagacaccttggtctattacggaatggatttggaccgcggttcggcccctccggccgaagcgaaagtccagcgggccgccgatgccgatcgtgccgcactgacgggcatcgcagagcgcagtttctgcaactaccgcgcgcactacgcggccaatccgctgctgagccgtgacctggtgctttcaggatacgtggagtgggctctgagccggctcagccaggatcgtgccaacgaagcgacgtgggtggtcattgaggagggcacggtggcaggttttgccacctgcgatgtcagcggcgactcggtggagatcatcctcaacgcggtccaccccgatttcgaacgacgcggcctctacggaatgctgttgcggcacatccagcaccactatgcacagcagtcgctgaagcggctgctgatttccactcagatctggaacttcaccgtccagcgccagtggggtcgtaacggcctgcagctgcagcaagcctttgacacgtaccacatggatcggcgcttgacgccgtcgtcgggcaaacgatga

SEQ ID NO: 528371 - DNA, 375 bp, Stenotrophomonas maltophilia
atgaacgctatcttcccttggctgatggtggcatcgaccatcgttcttaccagctacggccagctggtgatcaagtggcaggccagtgtgttcaagccgggtaccgaaggcttgattgggcgcctgcccgccgtgtttcagctgttgctgcaaccgtgggtcatctccgcgttcgtcgcggcattcgccgcatcgctgtgctggatgatggcggtttcccggctggaactgagcaaggcctatcccttcatggccctgaacttcctgctggtctgcatcgtcgcggtaccgttgttcggcgaacccttcaacctcgccaaaggcttcggcctggccaccgtggtggtgggcctggtcatcctcagccaaggctga

SEQ ID NO: 528372 - DNA, 1137 bp, Stenotrophomonas maltophilia
atgatccgcttcaatcgaccgttcatgaccggcagggaattgcccctgatcgagcaggcccaccgcaacggccacctgtccggcgacggtcccttcaccaaggagtgccacgcgtggctgcgggagaacaccggcgccaccacagcactgctcacccattcatgcactgccgcactggaaatggcggcgctgctgctgcggctgcagcctggcgacgaggtcatcatgccctcgttcaccttcgtatccaccgccagtgcctttgccctgcgaggtgcgattccggtgttcgtggacatccgtccggataccctgaacatcgatgaggcgctgatcgaacgggccatcacttcccggaccaaggccatctgcgtggtccactacgctggcgtatcctgcgaaatggacgccatcatggccatcgccgaaagccacgggcttcgcgtcgtcgaagacgccgcccaaggcatcatgtccagctaccgcggccgtccgctgggcaccattggcgacctgggcgccttcagtttccacgagaccaagaacatcatctccggcgaaggcggtgcactgttgtgccgggacgaggagtatggcgaggccgccgaaatcatccgcgagaagggcaccaaccgcagccggttcttccgcgggcaagtggacaagtacacctgggtcgacgtgggctcctcctacctgcctggtgaaatcaccgccgcattcctcgccgcgcagatgcaggatgccgacgagatcacgcgtcgccgcctcgccatctggcggcagtaccacgagtgggcgctgcagcacgagcagtctggacgcctccgccgcccggtggttcctgagcactgcacgcacaacgcgcacatgtactacatgctgttgcccagcctcgaacaacgcactcgcttcatcgaggcactcaaggcgcgcggtgtgcaggcggtgttccactacatcccgctgcactcgtcccccgccggccagtcctgcggccggcccgatggcgaactcccggtgaccaacgacgtgtccgaacgcctggtccgcatgccgctctggctcggccttgaagaatcgatggatcacgtgcttcgcagcgccgacgaagccctgcaggaggcatctgcgtga

SEQ ID NO: 528373 - DNA, 1497 bp, Stenotrophomonas maltophilia
gtgatcgacgcaacggccggcaacggcagcaaggtcgccggtctcagcaggccagcgttgttcgcgctggcctacgcatcggccttccttggctccaagtacctcgggctttcgaccggctacgccctggacgactacgccgtcagccacacatcgccggagggactggctggattcttcctgagccaggggcggtacaccaatgccgccctggacacgatcctgcgtgcgagcgacctgaacatgaccagtttctcggtcatcgcgttcatcgcaaccctgatcttcagcacgctgttctaccttgccgtcttcaagccggacagccgccagcagcccagcaccattgccgcagcggctgcgttgcttggcgcccattcgtattacacggagtacatcaccttccggcaatcggccctgcccatgtcggtgatgttcgccatgctgtgggtcgcgataggccagtatcgaatcgccatgttcaccgctgacgggcgtaccgttcgactggccgtggcggccgctgcaggcgtgatcgcgatgggtgccaaccagctcgcactctgctatgcggccatcgcggtgctctacatgcacctggccgtgcccatggcaggcctgcgggagggctctgcggccccactgctgccccaggtatcgaaggccgtcgccctgacggccgcctgcgggttcgtcctgagcgctggcaacctgctggcagcgatgatcggcaggatagtgggacatgtcggcaccgacggccgcgcggcactggtgtcggcaggtcagttgcctgagcgcgcagcgcagctgatggagctcatgcccaggctgctcatcaaggccgagcccatcgccgcaacacctgcgaaggtactgctgctgctgagtgtgctgttggcgcttctgccgttcggacgagcgtacgtacgtggcaggttgctggtgctgctgttcgctgcgacggcatggggcattgcgttgctgccgcatgttgtgtccggcacctggtggccggttccgcgtacccttgtggccatccccatggtctttgccggtgttctggtgctgtgcagccatgccggccagttgcagctccgcgtgtccgcgggattggcgctcgctgcggccgttttgttctgcgcgcacagcaatgccatcctgatcaaccagcagcgagtgaaccgctgggatatcgcgcaggcccaggacatagcaagccgggtggccgaacgcttcccgcagaagcatgcgaagctggcaatcgtggggggcaagtggagttacgccgtggcaccccaggctgcgcaaggcgatatgaacctgtcggcactgtcggtcggctgggccatcgaccctctcttcgacgaggccaccggtatcgacctgtccgttcgttcggcaccggagctggcggaaacctgcgccggcaagcccgtcttcccctctcctgagtccaccatcgaagctgcggacgagatcatcgtctgcctttga

SEQ ID NO: 528374 - DNA, 546 bp, Stenotrophomonas maltophilia
atgaagcccttcgcacgttcctcgtcgacgccgttgctgggtgtcgctgtcctcctgctggccgcgtgctctggcaacaatgatcaggcggtcgatagcccggcgaaggctgacgaggccccggctgccgctgctgcgtcggagccgccgccctctccgtggaacggcactgcgaacatcacgccggtctacccggaccaggcagcgtcgaaggagatgaagctggactatgagtcctaccagttcgaagacaacggcctcagcgttgcgccgcttcccccgttcttccggcgtacggtggatgtcgagctgaaggacgccgccagcaagtacacgctgaccgccggtcgtgccggatgcggctacaaactgaaggtcaccgtcggttccggcgagcccaagctgcttgatcccaagcagggcgagaagctcgaaatcgacagcgcggccttcgcgggcaccccgtccgtgatgcttcatgtggcgctggaagacggcgcggaacagaactggtcctgcaacctgcatatcgcagcgcacagctga

SEQ ID NO: 528375 - DNA, 1347 bp, Stenotrophomonas maltophilia
atgccgacctggctgcaggatgagatgcgcgcccttgccgcgatcgagcctgagctgctgccgccaggaaccggcatcgagcgctacgccttctactccgtgcccatggatacgcggcagggggcggtttacgccatattgtccgacgccattggcgaagcgtcgtacacccacgttctgctggtgccgtggctgaagccaggcggcgccgaccgcggaattctctaccacgcaagcgccattgcggagagcgatccggcggcacggatcctcgtcctgacgactgagcctgcttcctcaccctgggcctccaggctgccggcgcgggcgcatctggtggacttcggcaatatcgcagccttgcttgatttcaaccagcaggtgaacgtgatggtgcgcgtgttgctgcagttgcgcgcaccgaccgtccaccttgtgaactcccgcgttggctgggatgcgatcctgcgccatggcctggcattgacccagcactcgcggttgttcgcttcgctgttctgcgatgactacgaccagcagatgaacccggttggctatgcgcgtgattatctgcgctactgctacccacacctgtcggcgatcatttctgacaactcgcgctatccgcagatctggtcgcgcgagctgggtatcccgcatgcatctttcaccttcatcccgttcccttatgacggtcgagtggcggaaggggcaggtcgggcaatctcaaccgaaggtgccgggcgcgtgctgtgggctggccgcttggaccggcagaagcggcccgacatcctggccttgatcgcggagcagatgcccgacgtgcatttcgatgtgtacggtgcacaggtcatgtccggcgcggcggtgcaggacctttccaggctgcgctcgctgcccaacctcaccctgcacggtgaattccagcggcttgaggaagtggccaccccggagcacttcgcttatctgcacaccacggcctgggagggtaccccgaccattctgttcgatgtcgctgcggcgaagctgccgatctgtgccccgcaggtcgggggtatcgttgacttcctcgcagagcaggacatggtggagcgccatgacgatgtcgctgccttcgtgtcccagctgaaactcttgcagtcttctgcgcagctccgggacgagcgggtccagcgacagctggcatcgctgcgccggaatcgcggttggaaagatttcactgcttcgctggaggcgctggagggctacctgacagtccactctcgaacctctgcatccctgaccggagcgtcgttggccgcagccggcagtgaaggcggcgcgctgcagcgggctcgccagggctga

SEQ ID NO: 528376 - DNA, 708 bp, Stenotrophomonas maltophilia
gtgatcattggacgaggcctggtcgcaaaggccttcgccagcaactggcagcaggatcgggcgacggtgatcgttgccgcaggggtttccaactccgatgagtgtgggcaggccgcattttatcgtgagcagcatctgctggatgaggtgttcagcgatccgcacgtgcgccgtgtcgtgtacttcggcagctgcgccgtgggtaatccggatgagccgaagaccccctatctgctgcacaagacccggatggaggagagggtcctggcggacgagcgcggaacggtgttccggcttccccaagtggtcggggaagggggcaacccccacacgctgacgaacttcctgcgccagcgtattcagtctggtgagcatttcgaagtatgggcccactctgagcgcaatctcatcgatgtcgaggacgtggccacgctggcgacccacgtactgcatcatccggagcggtttccgcgcatgatgccgctcgccgacgtccaatcgaccaacatgctcgccatcgtccacactatggaggacgcgctcgccagacgcgggaattacagcattctcgagcgcggtgcggcgttccccatcgacaccacggactgccagagggccgccgatgcgtgcggcatcgcctttggtcctggctaccttgaacagcttttgaagaagtactacggcgctgcccgacgtgcaagatcctag

SEQ ID NO: 528377 - DNA, 2157 bp, Stenotrophomonas maltophilia
atggcgaccgacgccgctgcggatggcctatggcggatcgtgcagcagcaatcacgctgccgctggctgggcgtgctggcatcgcgaccacctgccccgtcgcagcccggcctcgaatggaccaaccctgcgcgctggccggagttctccgattcgctggatgtggtgatcacgcagatggccttcgatgccgaggactggcacaggctgctgcggaatgcacatgctccactacgccgcagcgggcggcttgtcctgcgtgtgccgttggcgcatggactcgatccactgtcacatctggtcacttacttggaagagttggagctggtggtggatcgcgtgtggcatcagcgtactactggccggattggtctcgatcagttccaggaagttgaccgcgagactgggctcgccgctgcacgcggggagagcgccgacgcgcttgtgctgctcgcggtgaaaactggcgggcgaggggtcacgcaggacctttccgcgcaggttcccaacatcatcgcattccatcgcgactatcaggacgcaagcgtggtccgcttgatcgtttccatcggggaacggattgaatcgccggtgctacgccggcagctcgcccgcagtgtactcgactcggcatcaccgacttccgccgattacggtgctgccctgtgcgtactgctttatgatgaggaagcagtcgccggaaatgagcgtgaggtgttgctcggcgccgtctggcactacatcagcgcgtcagctaccaaccctaccgtgctgcgctggcaggtttccctggcgtttgccgccgcgctgctctaccaggcggatggcaggctggaagaggcggctgagctctatcaacgtgtgctggcattcgatgtgctcggcttcagcccgctgctgggtaccaagaccactgctgccgccgcaaggctgggctggatcagattcggccaaggcaacgtcgacgctgcacgcatggcatggtcccgcggcttggatgaggcgcgtcggctgtccgctgaggcggactggtccgaagtcgtggctgatcctgcggcgccggagacattctcgatgccagagctggctgcggccatggatgaagctggtggattggcgaccgcgttgcgagttactgctgagtcccctctgcggccggggatggcttggcgatggggaaaccatacctggaaagcgcagttgcaggaggcacgcgcagaacttcggcttcagcaggagtggatcggccagttgcaggctgccaaggactggcttgacggccagtacagccacctcaacgatgagttggagcggcgggggaggctggagcgcgcactcgaatcacaactgcttgtgcttgctgaaagcatggatgaactgcgctcggatcttcagaggcatcgaatcgaaagcgaaacgcttcaggaaggaaaagcgtggctggacgggcacactacgcgtctagcagctgagctgcggcgactgagtgcccagcacgaggagctctcgtctgggaaaaactggctggatacccagtaccatcgtctgaatcttgagctcgttcagcgtctggcttggcagcacgagctgcaagagggcaaggactggttggagcaacagtgctatcggctgaacatcgagctcgatcagcgtctggcttggcagcgccagctgcaagcaggcaaagactggctggagcagcagtactaccggctgcatgatgagttggcactgcgtaccgaagagcttcaggcatcgcagtccgagagtggggtcagggccgcagagatcgagggcctccgggccgcatttcgctttgcgcatctgcatgcggaagctgaatgggcggggctgcaggatgagctccagcggaagcgggaggagttggcgcaggtgcacaacgcgtatcagcgccaatcagctgcactggacgataaaatcgcagcacaccggaagctggcggacgcagcgcgtgacctcgccgcagcaaccgggctgatcatcggcaactcacctcagctgcggttcccggccgaggctatcgcagaagagatgacctcgctcgcgtcagcacttcagcgtatgccactgaagtcggtcgttcgcacggcattgcgtgtgcttagcaagctgctggattggagacatccgcgatga

SEQ ID NO: 528378 - DNA, 756 bp, Stenotrophomonas maltophilia
ttgcccgtgaccgagcaaatgactgaaattctcaggctcactgaagctccgatcattgactttatttgtgaagtgcgtttcgaatcaacggttccgcgcttgggcgatattctgtcgaagtcgttggccgagacctttccggatcttattgctccggcgggtcgtagaaccccggacctacctttccctttaccgcctggtttggaaattgcgttcggcgggaacatgacccagttggtgttccaggatggcatgaatgtaaacgtcgcggaacgagccgtaggtgtcggtgttacggggccttatcggggatgggcggagttgcgtcctagaatcagagatgtatttgcgacggtgctatcgtcaagcctcatcaccaaggtctcgcgttgctcagttaagtacacgaattttttcccaggctctccggtcgatgtcgatagcgttctaaacgtttcggttgagttgggtgggcggcgggtccgctccaatagttctcaggtcagaacggagtttaaagacggggttgatgtgtcgatcattcagatcatcaaccccgtgaaagttgaaggtcgcggcatcgatcaaaatgaagggctgctgctggatattgattgcatcaggtcttttagtcagtcgcgcgatattgatttgctgatggaacagattgacggagttcacgcgcaggagaagagggttttctttgacctgctatctgccgctgcaagggatgcaatggggccaatttatgcgtaa

SEQ ID NO: 528379 - DNA, 378 bp, Stenotrophomonas maltophilia
atgctgctgtccaacacctgcgacatgtcgctggagaatgctagggacgacgaagtgatggtgagcgttgctcccataatgcgagtttcaaggtggatcgaggccttgagaagtcgcggcgtagacgctggcaaaatcgaagacaaggcgaagtccgctcgcttacagcgactaacgtcaatcgtctatctgccagagcgagcgggcatggaggaatcattcgtcctcctggacaaaattcagtcaattcctatctcgctaatttccaattggaaagaggcgcgcactgccattctttcgcaggcgggggagtggacgctagttacaaagctatcgatgcacttctcgcgccagcttgaaggtgtcatgaggggctag

SEQ ID NO: 528380 - DNA, 225 bp, Stenotrophomonas maltophilia
atggctgaccagctgctcaccgtgaatccggttcgcgcagtggtgagcgcgaagttcattgcgagccccggagtgtccgtgcttcagggtcgcttccagtgcgaactggattgcggccacatcgtcatccgcccaggagagcacgtgcgcggcaccaggttctccgtacgagcgccccagagcgcctcctgcgatcaatgcaaaaaggagcccatccatggctga

SEQ ID NO: 528381 - DNA, 228 bp, Stenotrophomonas maltophilia
atgaccaccgacaacaagaccgcgccagtcgatgtgctccagtggctgggtgacgagcgcttcatgtacgggcccgacaccgagagccgcgccaagtgcgaagaatcccgcgccgcagtcgccgacctgatcgctaaagccgaggtatgcgtggctggaggttacaactaccacacattccttgatctttctggcgccctcgcccgcgtcaaaggagaattagcatga

SEQ ID NO: 528382 - DNA, 303 bp, Stenotrophomonas maltophilia
atgagcgagatcaaacggtgggaccttgcagcgctgggaagcggcttcattgggatgaagcaaagagatgatggcgctttcgtccgtaattccgaccacgaggcagaggtagcccgcctgcgcgctgaggtggaggcgtatcggaaggacgccgagcggtatcggtggctgcataaacgagctatttcggcagacttcacaatgaccgattgtgttgggctcaccttcggacttccgcagggctcgagagtttccggcgatgtggacaagaccatcgacgccgcaatgggagcatccgcatga

SEQ ID NO: 528383 - DNA, 240 bp, Stenotrophomonas maltophilia
atgagccgttctgttgtgatctacaggccgcacctgtgcggcgaaaacgcaaacgcgcaggagctgcgcgaacacttcggcctgcaggccgtgattgacgactgggatgggcacagcagctatccgctggataacacgctggtactgaccgacaaccccgacgctgtcgcggacagctcgtccaaggtgatgcaccacggctcggccctgcgtgcactgctccctgaggccagcgcatga

SEQ ID NO: 528384 - DNA, 405 bp, Stenotrophomonas maltophilia
atgaaaggactcaccctggcggcagccgtgtccaccttcctgacggcttgcgtctccgtgccgactgccacggaagttgcagcagcagactacgggacgccgattggccaggaacaggctgaagaacaggccaagcagttcctcaatccacgactgaaagacccctacagcgccgtgtggtcctgcgaaaacgttagctcgggctacttcaaagacgcccctatcaacgggggcaaggtcacgtatgggtggcgcctactgtgcagcgtcaacgcgaagaacagctacggtggattcaccggactgaagcgctatgggttcctgttccgcgacgggcgacttgtgtcagcccaaggggaggctcagctccaaggcgggcaaggctacatgcaaaagctgctttaa

SEQ ID NO: 528385 - DNA, 789 bp, Stenotrophomonas maltophilia
atgcatcaagtaaagcacagctttacttcatatgtaaacccccggtttattggctctgcgcgtccaaaggccgatcatcaagctatgcttgataacgacgaactcgccagacgtattcgcttcgcattcgaccagtcggcccgaggaacgaaggcacgggttgccaaggagtgcgggatcaaccctcaagccgttacgggttgggagcggcgcggatcgatcgatcgcacgcacatcccaacgctagccaagctcaccggcagacgagtggactactttctggacgtgcacatcactgacgatgtcagccaagccgacgacgcggatgcatccggttcagtctcagcgcctgagagacaggcgtacgactatgtccgagtgatgcaactggacggcgaggctgacatgggtgagggacgtatcaacgatgactatccggaggtgatcaagtccatggacttcaccccgacctacattcgctcagttgtcggctacatcccgccgccgggccgccttgtgttggtcacgggtcgcggtgactcgatgatcccggtgatccaaccaggtgagtctctgatcgttgacacaggaattacgtcctttgacggcgacggcatctatctcatcaacacgggcaatgggcaacagatcaaggcgctccaggatcgcggcgaagccgtctacgtggtcagcgccaacaccgccctttaccccgctttccggctccccacgggcgcgatcatcggaggcaaggtctgccttcgaaaccgtatcgatcggctgaactag

SEQ ID NO: 528386 - DNA, 339 bp, Stenotrophomonas maltophilia
gtgccgtcgcgtgatccgaatctaaccattgcgatctcacggttcggctgggtagctggccaccgtcgctatcggctggctcgcgtgtacctccagctccgcaaatgcggggtgatcgtcctgctgctcgctgcgatgacatgtgcggtgcatgtgctgttctggggcccagaacacgcaaacgacgccgccgagcccactgcaaatgttgaacttgcgcaaggctgtaaagcgcattcgaactgggaagctgctgatctctgccatggcgccaatgttgcgctggccgctgcccgccttcccacgatgatcaatgccgtgtttcaggggaaagcatga

SEQ ID NO: 528387 - DNA, 366 bp, Stenotrophomonas maltophilia
atggcaaagaacttcgtttccgatggggacgtgatcctctggatcaataacagcgggcaggccgtggcctccggccaggcggtggtcatcggccaccagttgggtgtggcccttgtggcgatcgccatcgacgccgcgggcagcgttgcgctggggggcgtcttcaccctgccaaaggtgccggcggcgaccttcgagcagggcgagaagctggtgtgggacgccagcgccaatgccttcgacggcagtgatgcgactgctgcggccggcgatatcactggcgcggcgttcgcgtggactgctggagcagcaggacaggccaccgccgaggtgcgtctctcgccgggcaacgccaccaaggcgtaa

SEQ ID NO: 528388 - DNA, 342 bp, Stenotrophomonas maltophilia
atggtcggcggcgacatcagcgccacggccccctggtgggctgccggcagcgtcgttgcgctgtggcttctgagggagacatggactgcatttctgtcgcgcaggaaggaccgtactgagaccgacgccaatgttgggctcatcaagggcctctccgagcgcgtcgactccctggaacagagggtcgcggttcaggacgaacggctgcaggcagaaatgctgatgcgcctcaaggcacaggaggaagccagtgccctgcgcatgcgggtccgccagcttgaatcgacgctgcgtggcctcggtgcagtcatcccgcctgaagacccggtggtgcccgcatga

SEQ ID NO: 528389 - DNA, 768 bp, Stenotrophomonas maltophilia
gtgagccaggtccggattgccgtcgatgcggacaacatgctcggccgccagttcacgcagttggagcgccagaacctggcgttcgccgtgatgcaggcctgcaacgcaacggcgtttgacatccgccagcaatgggaaggcacggctgcccgcgtgttcgaccggccaacgcgtatgacgcaacgtgcaccgcagtatcgcaaggcaacgaaagacaagctgttcgcggaaatcttcctccgtgatgaggccagcaacggcacgccgccggcaaagtacctgctgccgcaggtggatggcggcacacgtcgcaggaagggctttgaggtgctgctgcagcagcgaggtgcgatgccgccgggcatgtttgcggtggccggtgagggcgccgatctggatcagcacggcaatgttcgcccgcggcaggtgagccagatcctctcccagctcggcgcccgccaggatgccctgcagaaccagacggacaccagcaaggcccgccgccggtccaagcgtaagcgtgggggcgagtactttgcactgcaggcgcaacgcggaaagctgcggcctggcatctacgagcgcatcgcaaccgcgtggggttcggcagtgcgcagcatcttcatcttcacgaacaccgcgacctacacgccgcgttacaacattttcggattggcacagcgggcgtgggacaggctgatgccgttccacttcaatcgcgaactgaccaaggcgctggaaacgtcgaagttcagggggcgccagtga

SEQ ID NO: 528390 - DNA, 159 bp, Stenotrophomonas maltophilia
atgccggtggccgcatacgaggttgtgatcagcctgttccgcgcggaagtagttggcgagcgcgacgcagtagtcgaggtcgacggcgagagatacaggctgacggacaagctctcagatgacggatcgcgtgtccgctgggcggtggcccgtgcctga

SEQ ID NO: 528391 - DNA, 474 bp, Stenotrophomonas maltophilia
atgacggatcgcgtgtccgctgggcggtggcccgtgcctgagccgaccccgcgccgccggctcctggatgccttcgctgcgaatctggagcaggtactggtggccgctggctactggaccgatgtcggccaggtcgtgacgctcgagccaagccagcttgatccggaatatgtggatgatggcgtggccgtgtacatcgagcggcaggagcgctcgcccgagcaggcgactgcccgaacgcatcgattgaccaccgtctgcgtcctggtgaagcgagttgcccagagtgccgcagaggcccgcctcgacgccgtggtggacgacatcgagcgagcccttgatgggcggcccaagacctggcccctgggcttcacagctccgcagtacgaatcgatggagcccgtaagggctccagctggcgccgactgggtcggcgcactgttccgctacacctcgaccatccccaaacgttga

SEQ ID NO: 528392 - DNA, 756 bp, Stenotrophomonas maltophilia
atgaccatgaaagaccagagctacctgggcagcggcaaggttctggcacgcgagtacggcgtgcccgggccgttcattgatgtcggaaactgctcagcactgagcctgagcccgcagaccaacgccatcaccctggccgaccacacccagcctggcggcggcgaacgcaaccgtgtcgaccgcctgaccggcgtcgagctggcctacaccttccacgactttgcgcccgagaatctggcgcgtgcgctgcgcggaactgtcaccaatgtgatcgccggcaatgccgcggatgaggcggtggtgggctacaagggcggcctggttcccctgttgcgaatcgcgaaggagatcaccgcggtcaagccggcaactggcagcaccaactacgttgccggtaccgactatgtgctgcaggacggcgcgctgttcattccgaccgacagcgccatcgtcgatccggtggctggtgcagcgaacctgaaggtgtcgtactcgttcggtgcgcagtcggtcctccagcccgttgtcaccgcggccaagcagtaccagctgctgttcctgggcttgaatgaggcacagagcggcaaggctgttcgcatcctggcccaccgcgtgtctggcggcgttatggcgcagttttcggccattggcgatgagcatggcgctggcgaggtgactggcgccctgatgagcgattcgaccaagggggccggcctgtcgcggtacttcgaagtggtgcaggaggtgatcgcgtga

SEQ ID NO: 528393 - DNA, 432 bp, Stenotrophomonas maltophilia
gtgagcgacggccgcgctgatgagatggaggtgctggcagcggccagcacctcggtgcagtaccagggcgaagaattggtgatctccccgctggccgtcggcctcattccttcggtggtccgcgagcttcggccggtggtggcgggcctccgctcggctggttcggcggatctcgccttggaattcgaaatcagccccgagctggtgatggatctgatcgcagaccattccggggcgcttttcgccgcgaccgccatctgtgctgggcgagacgtggagttcgtgaagaagggtgacgcggccgagttcatcggcttggtgttgaaggtggtggaggtgaaccgggatttttttactcggcagatcagcccgctcctggccggcctgcgcacgcggattcttggggttgggccgatgccatccagctcctga

SEQ ID NO: 528394 - DNA, 162 bp, Stenotrophomonas maltophilia
atgggctgcatcaagggatacaccttggcgcagttcagggccttcagcgaggcatcggcactggcacgccgccgccacctggcggaagaactgatgaacctgcgtgcggcgcagttcgagggttcggactacagcgcatacctgaacaaactgatggactga

SEQ ID NO: 528395 - DNA, 2952 bp, Stenotrophomonas maltophilia
atgaccacatccgctcccaatctgcgcgtacgtatctcggccgacatcaatgacatcaagcagggcctggcgctggtgcgatcggaggttgccgccttcaagcaagaggcggccaaatccatcgacctgaagggcatcaccgatggcttcgggcagctgcgcaacttgatgggagggctgttcgctggcgttactgtaggcggcctgttcagggctctaatcaccgagacgcgcgacgcgtccaatgaggtggcccagcttcaggccgtgcttgcatccactggggagcaggccgggtttacccagcggcagttgctggacatggccgagaagatggccggcgctacaacgctttcagccggcgagatcgttaaagcgcaaacacgccttctctcttacaccgggatcgtcggtgagcagtttccaaaggccgtgcagatggcgatagaccagtccgcccgcctgggtgagaacgtcgaacagtccgccgagacgatcggtaaggcgctggacaagccttcgcagggtgttgccgcattgaccaagcagggcttcaagttcactgaacagcagaaacagcagatgaaggtcatggaggccaccggacggacagctgaggcacagcagatcgtgctggacgccctgggggaaagctacgggggcgcagcacaggcagccaggaacacgttcggaggcgcgctttctgcggttggcaattctttgcgggagttggttgatggctccggcagtgggagccttggcgcagtgactgctgcgatcaatgatgttgccaaggcgttggcgtctcctgaaatgaaggcggccgcgggagcgctggctgactcggttctgcgttcggtcgcggcattcgcgacgttcatggcacaggacggcgttggctacctggtgaagattgcccaggcggcaatggtggtagcgaggaacatcgatctggtagccgtcgcgatcggtacgtatttggctacccaggcagtgtcggccgcagtatccggcattgcgagtctgatcagcggcttgaacgcgctcagactggcactcgtcgggacggcggtcgcagcgaatgcaaccaaggcggcgttggctacgctgggtggccccattacgctggctatcgcagcgcttacgacagcgctttactacctgtaccagcgcactgagcaggcgcgtttggcagcagaggaacacaccaaagcgctgaatcagaatcgtgagtcggccaagttgagtcgcgaagaggcaatgcgggaggcttccgcgaagcgcaagcaggcgcttgaaactctcaatgctgcccgcgcgattcttgaagagcgccgtgcgcgcttggccgataccagttccgtgactgcgcgaggcggtgatcgtggtgatggtgcagcaatggcggcagcaaccaacgtcgagcgcgctcgggctgatctggaccgcgccaagagccagcttgatgactgggggcgtcgcctggttgagatgtcgatggaggtcaccgaagaggtgctcgctggatcgggcgtagcggctcaagcggccgaagccggtggggctgccttggcgaaatccaacgccaacatgattgatgccgcccgtcgtgcgctggtggctttggatgctgtgtacaaggacaacgggatctccattgagcagtatttctccaagcgcgtagcgctgcagcagaggtctatcgatctggagattgaccaggcccgagccgagcttgcggttgcgacagaggccgccgggcgtcggcggatcgaagagcagattgtgaagctgcagcgcgaccgtaccgatgtcgctaccgttgctgcagatgagcaacgaaaggcggaggaggcgctctcgcagtcgttgtccgcagtgaaggggcgactcctggacttggatggcaacgccgggcaggcccaacgcgttcagctggaggcggagtaccgggggttgatggaacggttgcgtgctgagggcgacgccacgggtcaggcgctggtcacgagcctgattgatcgcttggtggctaaggccaggtcagacgagttccgtgatgcgctcggcaagatcacctcgcagctgcaaggggcagagagcgtcattggcgcccaggtaagtgcaggaatgatgggctacggcgagggcgaagcccagactgcagcggctcgtgcgaaggcgctggaggatcttcgggcgctgcgcattgcctccctggaggccatggacggcctgaaacagggctcaccggaacaaatcgccgcagtggctggattgcaggagatcgacctgaagattgcccaggtcattcagacacaacgggtctgggcgcagaagacgcaggatcttgctggttcggccctcggcgactttctggcagatatgtccactcgcaccaagcgcttcaaggatgcgttcagcgacatggtgaagagcttcattgccggcgtcgctcgaatgattgcgcaggaggctgcgctgcgtgcggtgcgcgggctgttcaacgccggtggaggcgtagggagtgccgccagcgagctaagtgcagtggtctcaaagcaccatagcggtggcattgtcgggggcggtggctctcgtatgcggctggcaatttcacctgcgatggttggccaagccccccgctttcatggaggcgggggattcggtttgaagtccgatgagcgggtcgctgtactgcagacaggcgaacgggtactcagccgccggcagactgctgcgtatgacgcagccggaagtggtggcagcatgaaggtcgagatccacaacaacggcagccccgctcgcgttgagagcgcacagatgggacgtggtgctggcggcgagcagctgctgaaggtcttcctggctgcggctgcagatgacgtggcctccgggggccagattgcgcgtgccggcgtcgctcgatatggatgggaggaccgcgtatga

SEQ ID NO: 528396 - DNA, 357 bp, Stenotrophomonas maltophilia
atgacccagcttcccagtaccaccactgtgatgatggacggcttcgctgaatcagcagaccccagcgtcgagcgcaccgagatggaacgcggcgtgcccaagcagcgcttggcgaacacgggcgtcatggcgaggctcaaggtggcgctgtacttcgcaacctccgcagctgccgacgagttcgacagctggtacttcgacacgttgaagcgcatcggctggttcaccttccgcaatccgcgcaatggacgcgagctgaccgttcgctttgtaggcggcgatgctggggaactgacgctgattgacgatacgggctttgacagcaagcggtcggtaactctggagtacctgcgatga

SEQ ID NO: 528397 - DNA, 462 bp, Stenotrophomonas maltophilia
atgaccacgtttaccgagcgccggcagcgcgtcaccgacaccgatggtgtgctgctgttccttgagatctccgcgccgtcgttcgtggaggtgctgcgcatcgttaacgacacccgcaactggaccagcaacgggttggagtacctcggcgtgccgtttggcttcaaggtgcccgacgacgtgagcgggcagaccgcgcgcgcggttctcacgttggacaacgttggccgtggcatctccgaagatctggagcgtctgcagcatgacgatgtcgtaatggctgtgcttcgagtcagcgaccgtgctgacccgaatgtcatcgagcggacctaccggctgccgatgacccaggtgtcagtgaatgtccgcacagcgacggcgcagtgcggctatgacgcgatcatgcgccagcaggcggtgcggctgcgctacaacggcgttaccgcgccggggttggtctga

SEQ ID NO: 528398 - DNA, 390 bp, Stenotrophomonas maltophilia
atgctggccgctgctgagcgcttcgtcggcatcccctatgaccccgattgcatggactgtgccgatctggtcgtgcttgtgcagctggagctgttcgggcgcgtggtggagttgcctggacgccgcccgcgtggcgccgccggccaggccgcgctgggtgagctgtcacggccctactgccgccgggttgattcgccgcaggatggcgacctggtcctgatgaccgaaacgccgcacaagcgccccggacacgccggaatcttcttctttctggcccatgagggctgggttcttcacagcaacgagcgcaacggctgcagcgtgctgcaccgcgtgcgcgatctgcccgggttcgggcttcggattgaggggtactacgcgtgggcctga

SEQ ID NO: 528399 - DNA, 1578 bp, Stenotrophomonas maltophilia
gtgggccgggttagagtcgcggtcccccgggagcgctgcatctgccggccacgtatcagccaacaccagctcgcggctctcgcctgtgaaggcacgcacgcgcagcacgcgatagacgcgttcgccagggacgcgcaggccaatgaaagcatctgcgccggagcgccccgggacgggctcgtccagggtgagccggatctgcgtcccatcgcgcgccgcggccacgacccggccgccaaagccccattgcgtcatatcgtgctggagcgccagcagcgacaggcgctgatagctcatgtgctcgatatcggtgctgtagccaatgtccttgtactggtacagcgactgggccagatgccagcgcgccagccgagccgcgtgctgctccgacgtaacaccctcgccgctgatctgcgcagggttgagcatggtcgttacaccaggcgcagccacttgcaggggcttggcctcccacgtctccggatcggcataggtgaactcaatgccatcggcggcactggccaggttgtagtcgacctggaactgccccttcttgatggtgcccatgttgaccacaccacccagcggctgctcctgcgccgcccacaccacgcccagccggccacccgccagggtgatctcaccaaagccagcccgcgcgatcgcagacagcacgccgaggtggttacgggcatcgcggacgcagtagtcgtaggtgtagtcattggctgcgcagtgcagggtgaaccccttccacgcctccaggtcaatctggctgtcgtcaaaggccatgccgcccagcagtcggccagcgcggtagatgccgcgggcgtaggccacgcattgcgcgcccgggttgctggactccttcaccacataggctgtgccatcccattccgggatcggatcagccacgcctacgccacggatctggtccggggtcccgttgagctggccggtcgccttgatctgcaagccggtacgcgagataccggcatagttacccgggtcaggacggatgctggtcagcatcgtccattggaagtcgttcttctgggtgttcttaccttcgtagtcgccctgtccgaccttgcgcacgcgaacgtcgtactgcccctgtggcacgtcgcgactgatggtggcgcggcgcacgtcgaagcggtccgagcggtaagactcgttcgccagcatcacccacgaactggtgccgacggccctgtattggacctcgatgcgctcggtgacggggtacgacttgccgctggtgccagtgccacccagcacgtactccaggccgatctgcacccggatggtgtcggttctggtagtgcgctcgacccatccatggtccttgggcaactcgccgccgtcgatggtgtccgcgttgccgtacagcgggatgacctgttcgggcatctggctgtaaccggcatggaaaacctgcacgttgtcgaagctgcccagcggcgtatccccgatgcgcagagcgtcgatgcggccgacgttgatacccgaacacagcaacagccccacgtactggtcgttgccctcataccagctgtaaggcttgctcaatag

SEQ ID NO: 528400 - DNA, 297 bp, Stenotrophomonas maltophilia
atggcctggttgtcgctgctgctgttcctgccctggttcctgctgctgggcagcctgtactggctgttcccgcgccagccgcgcaccccgcggcggcgcctgttcgatggcatcaccctgctgctggccttcgccctgagcatcctgtcgatgctgtggggctatcgcattggcatggcacagcccggcgccggcccgatctggccgcaggtgctggcggtgctgtacgcctacggcgcgttcctggcggtgctggtaatggcgttgctgctgcggccgcgctggctggtccgataa

SEQ ID NO: 528401 - DNA, 2037 bp, Stenotrophomonas maltophilia
gtgaagaacacctccggcattggcctgtcgcttggtgcagacacagcgattccgacgcttcctccatcgaggtttagcatcgacaccggcaccgtcgagggcataggcaccgctgttcatgtcagcaacggtggcaacgttgtagcctccaacgcgaagttcgttgcgacgttcgacaaatcacgccccgcctctggtgacaacggcactgcgcttcatatcgaaagggcagacgtgcacatgaatgattcctccttgcacggcgatctgcacggcgtactcatggcctcgagggagactgcaagcactgatatacccacggtcttctgggcctatcagacgcgcattgagggcacaagcggcagttccatcgtagtcgccgcgtcatctgatgtcccagccaattcccttatcctgcgcaaagttgaactgatcgccggcaacggcgtcctcatcgatgttcaggccaactcatcgcctcgtgcctcgggcgcatctacggccatctctattggcgagagcaaccttgctggtgatattcgtgtggcccccggcgagactgccacgctgacactcaaggacctcaccacgctgcgcggcgacatatccggagatgtcggactgtacatggaggcaggcggcttctggcaactcgcacgcagtgcacgtatttcagaccttgacttctacggacgaaatgcgatcgaacttggcgcgggaggcgactttcataccttggaaatcacaggggactttcagggcagagttagctcgcggggcagcatcggaaccatcgtgttcaacactgcgttggctggtgacgactcgccgaccgatcgactcatcatcggcggatccacaaccggcattgccaacgtggaggtgagaaacgccggcggcggcggcgcccagaccagcaagggcatagagctcataactgtaaagggtgcatcggccgccaccttcaacctgcttgggcgtaccgtggctgggcagtacgaatacttcctgcataaggggaacggtaccgacgggaactggtacctccgctcgcagttacccgtccaacccgagccatgcgaattggatcccagccttccacaatgcaaccctcaacaggtgttgcgtccagaggtcggtgcatatctgtccaatctccaggccgcacagaccctcttccgctctgattatcacgatcgccatgccgggcagaacgcgggccgggcatgggtccgcgccagtggatcgcgacaggagttcgacgctattgcgcgtcaactagatatccgcgggaacagccaatcgctgaccgtaggtaccgatgtatggcgtgccgacgccggcagcatcggcgtgcagttgtcggctgggaacgccgccagcacctccgtcaataatctgagtggctactatgcacgaggcaaggtcaagggagaggtgctgggcctatatgccacctggcgccgcagtgaaagtgacgagccgtatgctggcttctacgtggacggttcgttgcagcgggctcagttccgaaatcgcgtggagggcatcggcctggacaccgagcaatatgaaactcgcgcgtggcagagcgccattgagtccggctacgcgattctcattactgatgacgacagccgcagcgtctatctggaaccgtcgctgcagattggatacaaccgatgggacaatggaaatcacaacgaagcaaatggcacttcgatgaaggcacttggcgccaacggcgtgttcggtcatgtggggctgcgcctatccggggcaacccgctggcgtggtgccgccgccctggtacagccctacatcgctgccaattggcttcatgaccgggcaagatcccagattctgatgggcgacgaactggcgaacgcccgtattcctcgtagccgcggcgaattcactgcgggtgcttccatgagattcgccagcggcatcggcgcttggggaggtatgacggtgcagaagagcggcgcttatcaccagaccagtgcgcaactcggcatcaactacacttggtag

SEQ ID NO: 528402 - DNA, 678 bp, Stenotrophomonas maltophilia
atgctgctgcacatacccaacgtgctcgccccggaagaggtggcacagatgcgccagcggctggatccggccgattgggccgacggtcgcgagaccgtcggcgcgcagggtgcgcaggtcaagcacaaccagcaactgcccgatgcctcgccgctgaaggcagaactcgggcagcgcatactcgccgcactgggtcgcagcccgttgttcttcgctgccgctctgccgctgaaggtcctgccaccccgcttcaaccgctacagcggcggtggcacctatggcttccacgtcgatggcgcggtgatgaacctggccaacggcgagcagctgcgttcggacatctcctgcaccttgttcctgtccgcgcccgaagagtacgagggcggcgagctggtcatcagcgatacctacggcgagcacgaggtgaagctgccggccggcgacctgatcgtgtacccgtccagcagcctgcacaaggtcaatccggtcacccgtggcgcgcgcgtggcctcgttcttctgggtgcagagcatggtccgcgacgacgtgcagcgccgcctgctgtgggaaatggacggctcgatcgaacgcctgcggcagaccggcggcgacgccgaggcggtgctgcagctgaccggcgtgtaccacaacctgctgcgccgctggagcgaagtctga

SEQ ID NO: 528403 - DNA, 801 bp, Stenotrophomonas maltophilia
atggcagtccaggtgcagtcgttcttccaccgtgacagcaataccttcagctacctggtcagtgacccggccagtggcgaggcagcgctgatcgacccggtcttggactacgacccggataccgacgccagcagtgaagcgccgctgcacgctgccttgcaggccctccaacagcagggcctgcagctgcgctggctgctggaaacccatgcccacgccgaccatgtgtcggccgggcgccggctcaagcagcacttcccgcaggccacgctggccatcggcgaaggcatccgcgcggtgcaggccacttttgcgccgcgctatggcctgcagctgccagcagccgatgaaatcttcgaccacctgttcagcgatggcgaaatctttgcgcttggcgaactgcgcggccaggtgatcgccgtgcccggtcacaccagcgacagcattgcctatctgatcgacgatgcgctgttcaccggcgactcgctgttcatgcccgacggcggcaccgcccgctgcgacttcccgggcggtgacgccgcgcagttgtaccgttcaatccagcgcctgctggcgctgcccgatgcgacgcgcgtgttcgtctgccacgactacggcccgggtggtcgcgacttcgccaatgagaccaccatcggcgaacagcgcgcgcacaacatccatgtgcacgctggcgtggccgaggcggagttcgtcagcgtgcgccaggcccgcgatgccacgctggaagaacccaagctgatgcagccggcggtgaaggccaacatccagggcggggcctga

SEQ ID NO: 528404 - DNA, 474 bp, Stenotrophomonas maltophilia
atgaagcgttcgcttttactcgttctgctgatgctggcatcaggctcgacggctgcagcggtttcagtgcacatcgggggcaagccaacggagcttctgaccgcgcaatctccgggtatgaaggtcgaagtgcgactgggcatttgtgctacaacggccgacgatccgcgctacgtagtctgcgaaggcgcgcgcccctgcaagggagtgcaatcgctgcagatccgagtcaatggtgctgccttggttgttccgcgttccgcctatttcgatctggtggatctttccagtgcgacgattgatctcagctccaagggcggcagcctgatgttgcagggcggggatgcctcagagagttacaacgtgcgtattcggttcagtaaaaaccgggtcctgtcgagagagatctttgttggaacgtctcaggatgacctgttggaggaaaccacctatcacgaggcgagcatcggatag

SEQ ID NO: 528405 - DNA, 447 bp, Stenotrophomonas maltophilia
atgcgagccaatagcaagaggctgcttttccttgcctgcctgggctgcctcggtgcatgtacgcaccgcgacggcgacgctccaactccgatgagccgcgagttcggggtgtgcattttccttcgggccggtgatagctaccacgtgaaggccccgggactggattttgaacagggattgttgaagctggctggcaaggacattgatgtctacatcgggaatcatccttcctacgatggcgttcgatggaaccgggatctgagcccgacccgtggattcgtgctggtcggcacggagcattcaagaggtaaagatcgagtgctgctcggcaacaagcgcgcagaccagaaaggcctgatctacgtgcagttcatgggtgttgaccttgcggcgcaggttcccgttctgacgcgcaaggatctggtagtggattgtggactggattga

SEQ ID NO: 528406 - DNA, 564 bp, Stenotrophomonas maltophilia
gtgaagtacgcgccgctgttgatgatggcggcgctgttggcagggtgcgcgacccagggccggctggccaccgtcgatacccgcagcgagaatgtcggccaccagcgcctgcggccgcagaccggcgacggcgatggacaggtgcaggcgtactcgctgggcgcgagcgagggctaccggatgccgcagctctacgcggcaccggacccggaggtcggtgatcgtgatccgcgcgcggaactggcaccgaccaccatctgcctgcaggtggtggtggacgccgatggcggtgtggaacgcagcctgccattgaccgatcgtgctgagtgcacagccggggccgcacctgagaacgcgcccttgttgcaggcggctcaggacgcggtggcgatgtggaagtactcctcggcggcggtctgccatttcgcaccgggcaaggtgccggcggatcgcggcgattgccgcggcgcggagcgcatcgagccggtggcggtcacgctgcagtacgccttcaccttcgagatcgtgaaggggcagcatgtggtgcggatgcaggggcggtag

SEQ ID NO: 528407 - DNA, 1242 bp, Stenotrophomonas maltophilia
atgactgagctgctcgaccggctgtggcaggccagcctgtggctggcggtgggggtggtcgtgctggccacgctgcggccgttgctggtgcgactggggggcgctggattggcctatcgcagctggtggttgctgcccttgctgatggtggcgctgctggtgccgttgccccgggttgcattgctgcagcaggtgccgacgctgccgctgaaggtgatgccgggcgccctcgagggcgcgagcggtcatgcgctgccatgggccggtctgctgctggtggcctgggtactggggatgggcgtctgcctgctgcgcgagctgcgtgcacagcggcgcttcgagcggcgcatgggcccgttgcggccgcgtgccgatggcagctggcaggccagcggtgatcccgggctgccggcgctggtcggtttgtggcggccgcgcatcgtggtcggcccggcgttcgaccagcagttcagcgcacaggagcaggacctgatcctgcagcacgagcgcagccaccgtcgcaatggtgaccactgggccaatggtgcgctgctgctgatgcgcacggtgttctggttccacccgctgttgccctgggccgcacgccgtttcctgcgcgagcaggaaatggcctgtgatgcccgcaccatggccccgcagcctgcgctgcgcggcctctacgccagcacgctgctgaaagcgcagctggtccatccggttgcgcccgcggtctgccattggcgcagccaacccgtgttgaaggagcgtatcgccatgttgaagcagtccaagcggaaggcattgccgtgggtgtcgggccaggtgctggtgatcggggtgtgcctggggatgggagcggtggcgtgggccagccagggcggtacggcgggagcgccgaggatcggggtcgagccgtttgaacacgctcaggaagacgcagccagggctgggctggaccgacccgtccaggtcgacaagatgccgccgccgtcctatccgaagtctgcggccgaacaacgccaggtgggcgtggtgaacctgcgcgtggaggtggatgcacaggggcgtcccgccgatgtccaggtgctcagcgctaccaatccgggcgtgttcgatgcggtatcggtggctgctgcgcgcagctggacctatcgtccggcaatgaagaacggtaagccggtggccgctgccgtgcgtattccgatcaccttcgcgatggacgacaccgaggacgcgaagtga

SEQ ID NO: 528408 - DNA, 366 bp, Stenotrophomonas maltophilia
atgaccccgatcagcgaagccgaagccgttgtgatggaggtgctgtggcagcaggcaccgcgtagcgccgacgaggtggtggccgcactggcccaccgcgactgggccgagccgaccatcaagaccctgctcaaccgcctgctgaccaagggcgcagtcgccgccgagcgcgatggccggcgctatctttaccggccgctgctgcagcgccaggcgtgggtggaggcacagagccaggacttcatcggccgcgtcttcgaaggccgcgtggcaccgctggtggcgcacttcagcgaacgcggccagctgagcgcgcaggacatcgccgaactgaagcagctgatccaggagctggaccatgactga

SEQ ID NO: 528409 - DNA, 558 bp, Stenotrophomonas maltophilia
atgaaagcgctgcccaaggaagatttcccggtcgagcaggcccgccgcttcctcgaacccggtccgatcgtgctggtcagcaccgcgtggcgcggccagcgcaacctgatgacgatgggttggcacatggtgatgggcttctcgccttcgctggtcgccacctacctgtggcacgagaaccacagccacgcattggcgcgcggcagcggcgagtgcgtgatcaatgttgccggcgtggagctgctcgatacggtcgtggacatcggcaactgcagcggccgcgaggtcgacaaattcgcccgtttcgggctggatgcactgcccgcgcgcgaggtcggcgcgccgctggtcggacaatgccattcgtgcttcgaatgccgcctctacgacgatagccaggtggaatcgagcaacctgttcatctgggaaatcgtgcgtgcgcacgtggcgccgcggccgaaactgccgcgcaccgtgcattaccgcggcgatgggcagttcatggtgtccggcgccgaagtctcgcgtcgacggcggttcaagcccgacatgctgtaa

SEQ ID NO: 528410 - DNA, 1953 bp, Stenotrophomonas maltophilia
atgaccgaacacctcaccgacctggacgccgctgtcgactggttgtttgcgcgcgtggacgggccgctgcggatcggggcgccgctggcactgggcaagccgcaccggctgctcaatgccctgtatgcacgcgtcgagcaggatccgtcgcggccgctgcagctgtataccgcactgtcgttgaatcctcccaaggcacgcggcgatggcctggaagcgcgcttcatggcgcctttcgcacagcgccatttcggcgatgactttccgcgcctggcctatgccgatgcgatcgcgcgtgacgcgttgccggcacatgtgcaggtggaagagttctacatgcagtccggcgccctgctcgggtcgcggcaggcgcagtccagctacaccagcctcaactacacccatgccgccgatgcggtcgcccagcgcgcggcgcaggtgatcgtgcagaaagtggcgatgcggccggatgaccggcggctctcgctgtcgtgcaacaacgacattacccaggacacgctggatgccatcgccgcgcgcggactgccgcgcccgctgctggtcgccgagatcgatccgcagctgccctacctgggcggctcggccacggtcgatgtgtcgttcttcgatctggtgatcaccccgccgccgccgtacccggcgctgttcggcctgccgcggcagccggttggcgatgcagactatgccatcggcctgtatgccagcaccctggtgcgcgatggcggcacgctgcagatcggcattggtacgctggccgatgcgctcagccacgcactggtgctgcgccataccgacaatgcgcgctatcgccgcgtgttgcatgcactcgacccacagctggccagccatccgctggtgcaggaaatcggcggcctggacccctttgaagtgggcttgtacggctgtagtgaaatgctcaacgagggcttccggcggctggtacagaccggggtgatcaagcgcaaggtgcacgacgacctcgcgctgatgcagcgcatcgagaacggtagcaccctgtcgatcgaccatgccacgctggctgccgaaggcgagtacctgcacggcgcgttctacctgggctcaccggagttctacgaatggctgcgcaccctgccggaagacgaatgccgcgcgatcggcatgcgccgcatcagcgagatcaaccagctgtacggcggcaacgagacgctggagcgcctgcagcgccgtcatgcgcgcttcttcaactcctgcatgatggccaccgcactgggtgcggcggtctcggacgcgctggatgacggccgcgtggtatccggggtgggcggccagtacaacttcgtggcgatggcacatgccctgcccgaagcccgcagcgtgctgatgttccgcgccgcgcgcgacgacaagggccagcgcgaatccaacgtgcgctggaactatggccacaccaccatcccgcgccacctgcgcgacatctacctcaacgaatacggcatcgccgatctgcgcgggttgaccgacgaggactgcgtgcaggcgatggccgcgatcaccgaggcaccgttccaggccggcctgctgcagcaggcgcacgccgcgcgcaagctgttgagggccacgccgccggatcccgaacgcctgcagcgcaacacgccgcagtcactggccgcggcactggcaccgttccgcgccgatggcagccttccggactatccgctgggcagcgacttcaacgagatcgaacaggtgctggtgaaggcgctgggctggttgaaggccaatacgcagacccgtggcgacaaattgcgcacggtgtgggcggcgctgcgccaaccggccggtgatggcgatgcggtgtacctgcagcgcatgggcctgcaggcaccgaaggatttcgccgagcgcctggacgcacgcctgctgcgcctggcgctggcgcgcaccgcctga

SEQ ID NO: 528411 - DNA, 306 bp, Stenotrophomonas maltophilia
atgccgttgcatgatccgccgcatcccggggaatcgctgcgcgaagacatactgccggcgatcagcatgtccatcagtgcgctggcgcagcatcttggttattcccgcggacagctgtcgaccatcatcaacgggcacgccggaatctccgcggagcttgcattccgccttgagcttgcaggtctgggcaatgcgcgcatgtggctggcaatgcaggcggcctatgacctgtggcaggtcgagcatcgagagcatccaccgattgcccgcctgcatcttgaggattcggtgaggatcggacagtag

SEQ ID NO: 528412 - DNA, 1998 bp, Stenotrophomonas maltophilia
atgacgcagcctacccgtcgccagttggccaacgccatccgcttccttgccgccgatgcggttgaaaccgcaaagtccggccaccccggcatgcccatgggcatggccgacatcgccgaagtcctctggaacgactacctccgccataacccgagcaacccgcactggttcaaccgcgaccgtttcgtgctgtccaacggccacggttcgatgctgcagtacgcgctgctgcacctgagcggttacgacctgccgatcgagcagctgaagctgttccgccagctgggcagccacaccgccggccatccggaacgccacgagaccccgggcgtggaaaccaccaccggcccgctgggccagggtttcgccaacgccgtgggctttgccctggccgagaagctgctggcacagcgcttcaaccgcccggagctggaagtggtcgaccaccgcacctgggtgttcatgggcgatggctgcctgatggaaggcgtgtcgcatgaagcggcatcgctggccggtacctggggcctgcacaagctggtctgcttctgggacaacaaccacatctccatcgatggcaatgtcgagggctggttcaccgacaacaccccggaacgtttcgaggcctatggctggaacgtggtccgcgatgttgatggccacaacccggacagcatcaaggccggcatcgaggccgcgctgtcgcagagcgacaagccgaccctgatctgctgccgcaccaccattggttttggttcgccgaacaaggcgggcaaggaatccagccacggcgcaccgctgggcaaggacgagctggaagccacccgcaagcagctgggttgggaatacggtccgttcgagatcccgcaagcgatctacgacggctggcgcgccaatggcgccggcaccctgcgccaggccgagtgggagcagctgttcgacaagtacgccagccagtatccggcggaagcgtccgagctgacccgtcgttcgcacggcgagctgccggccgacttcgttgccaaggccgatgcctacatcgcccaggtggccgccgaaggcccgacgatcgcctcgcgcaaggcctcgcagctggccatcgaagcctacgccccgctgctgccggaaattgtcggcggctcggccgacctggcgcactccaacctgaccctgtggaagggcagcaagtcggtcgccagcgacgacgccaacgccaactatgtgtactacggcgtgcgcgagttcggcatgaccgcgattgccaacggcctggcgctgcacggtggcttcattccgttcgacgccaccttcctggtgttcagcgattacgcgcgcaacggcgtgcgcatgagcgcgctgatcccggcccatgccatccacgtctacacccacgactcgatcggcctgggcgaagacggcccgacccaccagccggtggagcacctggcctcgctgcgctacatcccgaacaacgatgtgtggcgcccgtgcgatgcggtcgagtcggcagtgagctggaaggccgcgatcacccgccaggacggcccgagctgcctggtgttcagccgccagaacctgccgcaccagccgcgcaacgccgagcagatcgcccagatcgagcgcggtggctacgtgctggccgatgccgccggtaccccggacgtgatcctgatcgcgaccggttcggaagtctcgctggcgaccgaagccaaggctcagctggatgcggccggcctcaagacccgcgtggtctcgatgccgtccaccgacgtgttcctgcgccaggatgcggcctaccgcgaatcggtgctgccgaacgccgtgcgcaagcgcgtggccgtggaagccggcgtcaccggcttctggcgccagttcgtcggcctggacggtgcggtgatcggtatcgacaccttcggtgcctcggccccggccgaccagctgtacaagcacttcggcatcaccaccgctcacgtggtggaagcggcgaagtcgctgtaa

SEQ ID NO: 528413 - DNA, 1320 bp, Stenotrophomonas maltophilia
atgacagcagctgctgccgacaagaagaagttgcccctgcactggaagatgggcatcggctttgcgatcggcctggtcctgggactgaccgtgcatgccctgggcggcagcgtcgagggtctgcagggcggtgccaagtgggtaatggactacgtcaccaccccggcgtcgggcctgttcctcaacctgatcttcatgctgatcgtgccgctgatcttctcggcgctgatcatgggcgtgtcggagatgggtgacatccgcgccctcggccgcatcggctggaagacgctggcctataccgtgctgctgtccggcattgccgtgggcatcggcctggtgctggtcaacgtgctcaagccgggtgccggcgtcgacccgcaggtcgctgcgatgatgctgtcggagaacgccgagcgcagcaaggagatcgtggccggcatccatggcacgccgaagggcatggacatgctgctgtcgatcgtgccgagcaacgtgctgcaggccgcgtctgacaacggcgcgatcctgtcgctgatgttcttcgcgttgatgttcggcatcggcatggtgctgaccgacaacgagaaggtcgctccgctgcgccgcgccatcgaaggcgtgttcgaaatctcgatgaccctgatcaacctggtcatccgcctggccccgtacgcggtggcctgcttcatgttcaacctggccgcgctgttcggcttcgagctgatcatccgcctcggcgcctacgtgggcgtggtggtgctggcgttgggcctgcacatgatcgtgacctacggcaccgccgtgtggctgtcgggccgctcgccgctgtcgttcttccgcgatacccaggaagcgacggtgatggcgttctccaccgcctccagcaacgccaccctgccgactgcgctgcgcgtggccgaccagatgggcctgccgcagcgtgtgtcgcgcttcgtgctgaccgtgggcgccaccgccaaccagaacggcaccgcgctgttcgagggcgtgacggtgatcttcctggcccagttcttcggcgtggacctgagcatcggccagcagttcatggtgatggcggtgtgcatcctcggtggcatcggtaccgccggcgtgccgtcgggctcgctgccggtggtggcgatgatctgcgcgatggtcggcgtgaacccgctgggcatcggcctgatcctgggcgtgaaccacttcctggacatgtgccgtaccgcactgaacgtgaccggcgacctggccctgaccaccctggtggccaagggcgagtcccacgacggcccggcgctgggtccgcagcaggactga

SEQ ID NO: 528414 - DNA, 1716 bp, Stenotrophomonas maltophilia
atgacgcgggcgatcaacatgcatgggcgctggccccggcaggtactggcagcgctgctgctgtggctgccgctgctggcctgggcgcagccgcgcgcctggctggaccgcgatcgcattgcaatgggcgatacggtcaccctcaatgtcgagagcgatcagggcgcgcctgacttcacgcctctgcgtaccgacttcgacctgagcgcgcagaccagcagccgccaggtggagtggagcaacggcagcatgcagcagcgcaacctgtacggcgtggcgctgacgccgcgacgcagcggtgcgctggtggttccgggcctgcaggtgggcagtgtgcgtaccgcaccgctgaccctgcaggtggacgcggccgccgtggcgggcccggacagcactgcgatggccttcatcgagacggttgtcgatgacgaaacgccgtacgtgcagcagagcgtgggcgtggtggtgcggttgtattttgcttcgcagctggcgtcgggtgaactggtgctggataccccggcgggcgcgtcattgcagcgcgtgggcgatgaccgcaccgatgtgcgccaggtcaacgggcgccgctacaacgtggtcgaacgccgcttcctgctgatccccgagcgtagcggcgcattgcggttggccggtgcgcgcttcagcgggcgcagtgccggtggcttcttcgacgacttctttggcgggggcgacggccgcatgaatgccaccggcgccaaccgcacgttgcaggttcaggcacaaccggcgcaggcgccgcagccgtggctgccgctgcagagcctgcagttgcgctataccagtacgccgaccagcgcccgcaccggtgaggccgccaacgtggtggtcgaagcggttgccgaaggcgcgacgcgcgcgcagttcaccgatctgccggtgccggatgtcggcgccaatgcgcaggtgttcgccgaaccggcacagtacgaagagaccttcaacggcagcacgccacgcctgaagatcacccgccgctattcgatcgtgccgcgccagccgggttcgctggtggtgcccggcccgcgcctgccctggtgggatgtgcgcagcggcaaggcacaggaagcaacgctgccggacctgacgctgacggttgcggcgggcaatggcggcggcaatacctcgccggctccgttgccgccgatcgacaccgacgccgcgctgcccggcaccgatggccaggacagccgcatcgcggccaccgacccgcgcgccagcggcatggccgagcgcccatggccctggatgggcgcggcgatcgggctggcgctgctgtggctgctgaccctgctgtggggctggcagcgtggccgtcgcccgcgtgcagcggcgcctgtcgccggcacgtccgctgtgccgactgtggcgagcggccgtgccggtttggccgaactgcgccgcgtgctcgatggcgagggcttcgaccaggtggaagcacagctgtgcgcgatggccggtgtcgaacgtatcgagcaggtcatcgcgcgtctggacgatccggagcagcgccaggtgctgcaggacctgcagcaggcgcgctggggcgggcagggcgatctggcggcgctgcgcacgcgcctgcgcgcggccttccgtgacggaccgcactggtcggcggttgcgggggccgctgacactggtctggcgccgctgtatccaccgcggcgaacctga

SEQ ID NO: 528415 - DNA, 1839 bp, Stenotrophomonas maltophilia
atgatcgcgttggcgtcgaatcttcccgactggaatgcgctgcatttcctgcgcccggaatggctgtgggccctgctggccctgccagtgatcctcgcgctggcgctgtaccggcagcggcgcagcgatgcatggcggcaggcggtggatccccacctgctgccgcacctgctggcggcaggcacgcgtcgccgtacgcgcctgccgtgggcgctgctgctgggctggacgctggcgtcgctggcgatggccgggccgagctggcggcagcaggcgcagccgatgtttcaggccagcgcaccgctgctggtcgtgctggatctgtccagccggatcaccgccaccgacctgccgccgtcgcggctgctgcaggcgcgggccaagctgggcgagctgctgcgcgcgcgcaagggcggccaggtcggcctggtggtgtatgcggatgacgcctatacggtggcgccgttgaccgatgacggcagcaatgtcgcgctgtatctggatgccttgtcccccgaggtgatgccgcgcgatggacagcgtgccgatcgcggtatcgactgggcggcgcagctgatgcggcaggtcgcggcgctgcagggacaggtcctgctggtcaccgaccaggccgacggcgaagccgcgctggccgcagcccaggcacgcagcctcggcctgcaggtttcggtgctgggcctgggtaccccggccggtgcggcctatcgagatgggagtggccagatccgccaggcggcgctggatgagggcagcctgcgcgccgtggccaccgcaggtggcgggcgctatgcacgtatcgccgccgatgacagtgatctgcgcgcgcttggggttctggatgcgcgcgagggcacagcggcacagcggccgggtgaaggcaagcagtggcgcgatgaaggcttttggctgctgccgccggtcatgctgctggcgctgctggccttccgccgccgcgcggtgctggctgcggtgctggccgttggcctgctgccgtggatgaatgacgtgcaggcgcaggcccttgcgacgcctgcctcgcagccggcgcagggcacgctgtggaagcgtagcgaccaggtgcagcaccagcgcctggccgaaggtgtgcaggcctaccgcaacggcgactttgccaatgcacgcaagcagttcgaaggcatcgacagcgatgccggctggtacaacctggccaacgcgctggcgcgccagggcaactacgatgaggccatcgccgcttacgaccgcgcgctggcgctgcatcccggcatggccgatgcggtggccaaccgtgccgtggtcgatgccgcgcgcaagcgcacgcagtcgggtggccagggccaggatcagcagaagccccagcagagcggccggcagaagcagcagaacgattcgcagggcaagcagaatccgtcgggccagcagccgcagcagggccagcagaatcccggccagggccagccgcagtcgggccagcaggacccgcccaaggcgggtgacaacaacgcacagtcgaagcctcagcccggcgagcgcggccgcgatggccagcaggcaccaccgcaggtggaagatgccaaggcgcaggcgcaggccgacgagcagcagcgccagcgcatgcagcaggcaatgcagcaggcacgtgaaggcaagggcgaacaggatggcaagcccgtgccaggcagcgaaggcaccaccccgcgccaacgcgaggagcaacaggccgtggaggcgtggatgcgacgcgtacccgatgatccgggggcgctgctgcgggccaagttccagctggaaaacgaacgcaggaagagggaagggcgatga

SEQ ID NO: 528416 - DNA, 1005 bp, Stenotrophomonas maltophilia
atgaatctgctggcgagttactggccgtggccggacctgcagctggcatggccactggcgctgctggcattgccgttgccgctgctgatgtacgcgtggaagcgtcgcgctgaccccggcgcggcgctgcgcgtgccgtatgccgccagcgaactggaagcactgaccggtggtggccgcgtcgacgtgtcttggctgcgtaccctgctgttgtggttgggctggtgcgcgctgtgcgttgcgcttgcccgtccacagcaactcggtgaggccatcaccccaccgcagcagggccggcagatgatgctggcaatggacgtgtccggcagcatgggtgagggcgacatggtgctgggcggacaggccgtggatcgcctcaccgcagccaaggcggtgctggccgacttcctcgaccgccgcgccggtgatcgcatcggcctgctgatcttcggcgaccgtgcttacacgttgacgccccttaccgccgacctggccagtgtgcgcgaccagctgcgcgacagcgtggtcggcctggccggtcgcgaaaccgccatcggtgatgccatcggcctggcggtgaagcgcctgcgcagccagcccgaaggccagcgcgtgctgatcctgctgaccgacggtgtcagcaatgccggcgtactggagcccctgcgcgcggccgaagttgcccgcgccgagggcgtgcgcatccacaccgtcgcgtttggcggcgacggcagcatgcgcgtgttcggcatctccatttccgccgaccaggatccggtcgacgaggccacattgaagaagatcgcgggcatgaccggtggccagttcttccgcgcacgcgatacggcacagctggccggcatctatgccgaactggaccggctggagccgatcgccgcgaagggacccagcctgcgcccgcgtgaggaacgctatgcctggccgctgggcctggcgttgctgctgggtgcgctggcgtggctgtggccggagcgtcgccgatga

SEQ ID NO: 528417 - DNA, 450 bp, Stenotrophomonas maltophilia
atgagcgccaacctgccgctgcgcgacgtgcagctgccgccggccccgtcatggtggccaccggcaccgggctatctgatgatcggtgcggcggtgctactgctgctgtcggtcgttgcattcgtgtggtggcagcgtcgccgccgtcggcagcgctggctgcagcagttcgacagggagctggcggcctgtacggatgcggtggcggaactggcggcgatcgccggcctgctgcgccgtgccgcgcgccaggcacgtccgggcagtgaatcgttgcgcgacgacgcatggtggcaacgcgtggacccgcagggcacgctgtctgacgcacggcgcagcctgctggccgagggcgcctatcggccacgcgtggatgccagcgaagtggccgcggtgcgcagctggtcccgagcgcgctatctggcaatgctggtggagcgtcgtcgatga

SEQ ID NO: 528418 - DNA, 930 bp, Stenotrophomonas maltophilia
atgaccgatccatccccggcacctgcatccatggccagcgagggcgacgggctgcgcccgcagttggccgaactggtcgcgctgcgtcggctggcacagcgcccgccgccgccacgccgcggccgtgccggcaatgccgggcaggcaccgtcgccgctgcgcgggcgtggcatggagtacgccgaatcacgcgagtacgtggccggtgatgatgcgcggcatatcgactggcgggtgaccgcgcgtaccggccgtgcccacaccaagctgttccaggccgagcgcgagcgggtcagcctgatcgtggccgacacctcgccggcgctgtatttcggcacccgggtgcgcttcaagtcggtacaggctgcgcgcgcgggcgccgttgccgcctggtcggcgcagcgtcgaggcgaccgcgtgggcgccctgcgtggcagcgaccgcgagccgccggtcgcacccgcgggcgggccgcgcggtgtactgcgcgtactcgatgcgctcacccgctggtatgcgcagcctcccaccgatgatcttggtcttgagcgtgcgctggaccacgccagtcgcgtgctgcgccccggtgcgcgcatgctggtgctggccgatccgcagcaggcggcacggattgcgccggtacgctggagcgcgctggcccagcaccatgacctcagcctggttctgctggtcgatccattggaactgcagccgccgtcggccgcgctgcagttccagaccgcgcagcagcgcatcggactcgacctgcgctgcagcgacgtgcaggcgcattggcacgcgcatttcgtcgagccgctgcaggaactgcggcgccagctcggcgcacgccgcgttgacgtgcaggtgctttccagcgatgcgcccagcgatgcgtggctggccccggtgccgaccgaggtgccggcatga

SEQ ID NO: 528419 - DNA, 1026 bp, Stenotrophomonas maltophilia
atgaacctgcctccgccgatgcccgaaaccgtcccgccgccgcccgcgccggccagctcccgcctgcacgccgccttcagccagctgcgcgatgcgctgtcagccgaaatcgtcggccagtctgcgctggtcgagcgcctgctgatcgcgctgctggccgacggccacctgctggtggagggggcgccggggctggccaagaccacggcgatccgcgcgctggcagcacggctggaaaccgacttcgcgcgcgtgcagttcaccccggacctgctgccggccgacctcaccggcaccgagatctggcgcccgcaggaaggccgtttcgagttcgtgcccggcccgatcttccacccgatcctgctggccgatgaaatcaaccgtgcgccggccaaggtgcagtcggcgctgctggaagcgatgggcgaacgccaggtcaccgtgggacgccacacctacgcgctgccgtcgttgttcctggtgatggccacgcagaacccgatcgagcaggaaggcaccttcccgctgccggaagcacagctggatcgcttcctgatgcatgtgcgcatcggctacccggaccaggcggccgaatcggaaatcctgcggctggcccgtgagcgtgcccgtggcgcattgggcgaagccgcgccggcgccggagaagctgccgatgcaggatgtgttcgcggcccgtcgcgaagtgctggacctgcacatggcgcccgcgctggaacgctacctgatcgaactggtgctggcctcgcgcgatccgtcgcgctacgacgccggcctcggtcgccgcatcgcgtggggcgcaagcccgcgaggttccatcgcgctggaacgctgcgcacgtgcgcgcgcctggttggcgggccgcgatttcgtcacgcccgatgacgtgcgcgcggtcgccgctgatgtgctgcgccatcgcgtgctgcccagttacgaagccacagccgaaggctgggatggcgagcgcctggtgcaggagctgctggcccgcgtgccggcaccctga

SEQ ID NO: 528420 - DNA, 1965 bp, Stenotrophomonas maltophilia
atgacctttcaccaagccaaggggctgcgtcccatccggcgctctaccttgaaccgtgtcagcgcgttgggagtcgcgctgatgctggcctgcgctccggcgctggctgccacgccggcggaaaagccggccggcgccaccgtggctgcggccgtcgcaccgacaggcctgtcggtggcgaagattgatttcaagcgcggcgatgatggtgccggtcgcctgatcgtccagttcgacgggcagggtgcggtgccggacctgcgcacgcagggcaacagcgtggtggtcgatgtcggcaacgcccggctgccggccaacctgcagaggccgatgaacgtcaccgacttcgcaacgccggtgcagcgcatcgacgccaagccctccggcgcgggtacccagctggtcctgagcaccggcggtgcggtggattcgctggcctaccagagcggcaacgaatacgtggtcgagatcagcccgcgtcaggcgccggcggcagtcggtgcggtcactgcgggcagcgttgcgcaggccgccaaggccgtgggccagcgcggtttcaccggcaagccggtgaccttcaacttccaggacgtgccggtgcgcaccgtgctgcagttgatcgccgaagaatccaacctcaacgtggtggcgtccgattcggtgcagggcaatgtgaccctgcgtctggtcaacgtgccgtgggaccaggcgctggacatcgtgctgcgggccaagggcctggacaagcgtcgcgacggcagcgtgatctgggttgcgccgcaggccgagctggccaagttcgagcaggagaaggaagacgcgcgcatcgcgatcgagaaccgcgaagacctggttaccgattacgtgcagatcaactatcacagcgccacgcagatcttcaaggcactgaccgaagccaagggtatcggcggtggtggcggcaacggcagcagcggtggttcggcgtcgcaggaagacagtggcttcctgtcctcgcgtggccgcatcgtggccgacgaacgcaccaatacgctgatgatcagcgacatcccgaagaagatcgcgcgcatgcgtgaactgatcggcgtgatcgaccggccggtcgaccaggtgctgatcgaaagccgtatcgtcatcgccaccgatacgttcgcccgcgagctgggtgccaagttcggcatcagcggcagccgcgacaacgtgtacttcagtggtgacctggaagccaaccgcaagacccgcctgtcgcaggcggatacttcggccgccaatgccaaggcctatcgcgattgggaagcgggtggcagcgttggaccggcaccggtgccgctgcttccggccatcacccgtggcctgaacttcaacctgcctgccgcttcgaccgccaccccgggctcgttggcgctgtcgatcctcaatgccggctacctgctggacgttgagctgtcggcgatgcaggaagaggcccgtggcgaagtgatctccaacccgcgcgtggtgaccaccaaccagcgcgaggcactgatcaagcagggcaaggaaatcggctacgtcaccatcagtggtggcggcaccggcggcgtcgccacgcccaacgtccagttcaaggaagtggtgctggagctgaaggtgaccccgaccatcaccaacgacaaccgcgtgttcctcaacatgcagttgaagaaggatgaagtggagcgcctgatccagctgcagggctatggcaccgtgccggaaatcaaccgccgtgaagtcaataccgcggtgctggtggacgatggccagaccgttgtcatcggtggcgtgtacgagttcaccgaccgcagcagcgtgagcaaggttccgttcctgggcgacgtgccgttcctgggcaacctgttcaagaagcgcggccgcagcaaggacaaggccgagctgctggtgttcgtcacgccgaaggtgctgcgcgtggccaagcagaactga

SEQ ID NO: 528421 - DNA, 534 bp, Stenotrophomonas maltophilia
atgcgcacgtacatcgcacgcggtgcaatggcgttggcggtcctgttgctggccgcctgcggccgcggcgtgaccagcacgcccggcgacgcccccaacctggaaaagtgggtggaaggcgagcgggctcggccggcgcagccgctggagccgctgccggtgatgcagcagttcgagaccttcgagtattcggcgcagggcatgcgtgacccgttcaccgacgcctggaccaatccgcagcaggggaatggcggattgcgtccggatccgaaccggcgcaaggagccgctggaaggcttcccgctggacgcactggacatggtcggcaccatcggcacgggtgcgggcgtcgtcgcgctggtgatggggccggacaaggtgacctaccgggtgcgcccgggcggttacctgggacagagcgacgggcggatcacggcggtcttcgaagaccgcgtggagctgatcgaactggtgccggatggtgcgggcggctggctggaacggccggcaacgctctcgcttgaagatcaatga

SEQ ID NO: 528422 - DNA, 675 bp, Stenotrophomonas maltophilia
atgagccagaagatcgatctgaagaacctcgatttcaacgacatcggcaactggccgcagaaggccaagatcgtcttctgctcggtgctggcgctggtgatcatgttcctggcgtggatgctgctgatcagcggcaagcgcgaggaacttgctggcctggaatcgaaggaagtcgagctgcgttccgagttcaccaagcagcaggaacgcgcggtgaacctggctccgctgaagcagcagctggcgcagatggagcaggtgctgcagcagatgctgcggcagctgccgagcaagacggaaatgcccgacctgatcatcgacatttcgcagaccgcgttgtccagcggcctggccaacgagctgttcgagcccgagcaggagcaggtcaaggagttctacgccgagaagccgatcaagctgcggatggtgggcagctaccaccagttcggcgcgttcgtcagcggcgtggcgtcgctgccgcgggtggtgatccttaccatgcacgacatcaacctcaagcccaaggacaagtccaagggcaacgtccgtagcggtgcgctggagttgtccggcacggtcaagacctatcgctacctggacgagaccgaagtgcaggcgcagcaggctgctgccgatgccgaggcgaagaagaagggcaaggggggcaagaagtga

SEQ ID NO: 528423 - DNA, 894 bp, Stenotrophomonas maltophilia
atggcacgcatcaatctattgccctggcgcgccgagcggcgcaagcaacgccagcgcgagttctacgcaatgctgggcatggccgcgatcggtggcctgctgctgtcgctgctgatctggttctactacgaccgccaggtgagcggccagatggatcgcaatgcctatctgtcggccgagatcgagaaggtcaaggaacagaacaaggagatcgaccgcctcgatgcgcagaaggaacgcctgctggcacgcaagaaggtgatcgaggaactgcaggccaagcgctcgcagatggtccatctgttcgatgcgctggtgcgtacgattcccgatggcgtggtgctgaccgcgctgaagcaggaaggcgacgtgctgaccctggaaggccgtacccagtccaacgcccgtgtctcggcctacatgcgcaacctggacacctccggctggatgaccaatccggagctgtcgatcatcgaggcgcgcgagccggagaaggacaaggacggcaagaccggtccggttaccgacatcaaggcactgccgtacgtgttcgtggtcaaggtgaagctgccggcacagagcgaagaggttgcggcgacgccgggcctgaacgcggatggcacggttgtgtcggccccgccggctgcggtggccccgcttgctgcgggtccggacgccgccgcgcctgccacgcctgccgccccggctgcggctccggccgcgaatgcgcaggcaccggctccggcggcacctgccactgcaccggccgctgcaccggccaagccgaaccagccggcagcgccggctgccaagccggccccgaagcctgagggaagccgcctggtgcagccgccgcaggccttcatcgcgccgctgcagggggaccgcgcatga

SEQ ID NO: 528424 - DNA, 1059 bp, Stenotrophomonas maltophilia
gtggggctcatcccaaaaagtcagtcgccgcttgtaggcgtcgacatcagttcgactgcggtaaagcttttgcagctgtcccgcagcggcaatcgtttccgtgtggaacactatgctgtggaaccactgccgccgaatgcggtggtggagaagaacatcgtggaggtggaggcggtcggtgaggccatccgccgggcgatgaaccgttcaggcagcaaggccaagctggccgctgccgccgtcgccgggtcggcggtgatcaccaaggtgatcccgatgccggccgagctcgacgagaacgacatggaagcccagatcgagctggaagcggtcaactacatcccgtatccgatcgaggaagtgaacctggacttcgaggtgatcggggcgatcccgaacaaccccgagatggtgcaggtgctgctggccgcgtcgcgttcggagaatgtggagctgcgccagtcggcgctggagctcggtggcctgcaggccaaggtgatggacgtggaggcctttgcggtcgagaacgcctacgccctggtcgccagcgagctgccggtgtccatcgacggtgtcgttgcgctggtcgacatcggcgcgaccatgaccaccctcaatgtcctgcgcggcggccgcagcctgtacagccgcgaacaggtgttcggtggcaagcagctgaccgacgagatcatgcgccgctacggcctgagctacgaggaagccggcctggccaagcgccagggcgggttgccggaaagttacgagatggaagtgctggaaccgttcaaggaagcgacggtgcagcagatcagccgcctgctgcagttcttctatgcaggcagtgagttcaaccgcgtcgatcacatcgtgctggccggtggctgtgccgtgctgggtggcctgccggagatggtcgaagaacagctgggcgtgccgaccgtggtcgccaacccgctggcacagatgaccctgggccctaaggtgaacgcgcatgcgctggcccaggatgcccccgcgctgatgatcgccaccggtctggcgctgaggagcttcgactga

SEQ ID NO: 528425 - DNA, 2424 bp, Stenotrophomonas maltophilia
atgactcgactccgccgctggctgcgctggatcttcctgattgtcctggtcctggcgctgatcggcgcggccgccgtgggcggtctgtactacgccgtatcctccaagcttcccgacgtgcagaccctgcgcgacgtggagatgcaggagcccatgtacgtctatgccgccgacggcaagctgatggcggtgttcggcgagacccgccgtaccccggtcaccatgaaggacgtgcccgagcgcctgaagcaggcgttcctggccaccgaggatgcccgcttctacgagcatggcggcgtggactacatgggcatcggccgcgcggtgtggctgctggccaccaccaacgacaagcgcgtgccgggtggttcgaccatcacccagcaggtcgcccgccagttcttcctcagctccgagtacagctatacccgcaagctggccgagatcctgctggcgcggaagatcgagtccgagctgagcaaggacgagatcttcgagctgtacctgaacaagagtttcttcggcaaccgcgcctacggcgtggccgccgccgccgagttctattacggcaagaagctgggcgaactgaacctggacgagatggcctcgctggccggcatccccaagttcccctcttccggcaacccgatctccaacccggaacgtgcccgccagcgccgcgacaactacgtgctgcagcgcatggccgacctgaagttcgtcacccaggccgaggccgacgccgccaaggcggtgccgatgcatgccagcgcgcatgagccgccggtgcaggtcgatgccccctacgtggccgaactggtgcgccaggaaatgatcgcccgcttcggcggcgatgtggtcaacaagggttaccgcgtcaccaccaccatcgactcgaccctgcagactgccgccaacctggccgtccgcgatggcctgctgctgtacgaccaccgccacggctggcacggcgtggagaagcaggtccaggtgggcgccggcgaagatgccgccgccctcgccgagcacctgcgcggcatgttcggccagtccggcctgctgccggccatcgttgccagcaccggcgccgacggcagcgccaccgtggtgctggccaaccgcagcgagatcgtgctgccggccggcgccgccaagtggaccaacaagaccccgggcaagctggtgcagcgcggcgacatcgtgcgcgtgcgcgccggcgccaaggacggtgagtggctgctggaccagctgccgcgcggccagtccgcgctggtctcgctggatgcccacaacggcgcgttgaaggcactggtcggtggcttcagcttctccggcaacaagttcaaccgcgccacccaggcccgtcgccagccgggctcgagcttcaagccgttcgtctacgcggccgccttcgacaagggctacaacccggcctcgatcgtgctcgacgcgccggtcgtgttccgcgaccgccgcggcaagacctgggccccgcagaacgacggcggcggcttccgcggcccgatgcgcctgcgcgaagcactggtgcagtcgcgcaacctggtctcggtgcgcctgcttgacggcatgggcgtggactacgcgcgcaagtacatcagcgaatttggtttcgccgaatcggaactgccgccgaacctgtcgatgtcgctgggcaccgcctcgctcaccccgctgtcggtggcccgtggctacgccgtgttcgccaatggcggctcgcgcgtggacacctggctgatcgaccaggtcaatgaccgcgacggcaccctggtgttcaaggaaaacccggcgctggcctgccgcgagtgcgccggcagcagcgaccagccggtcaaccaggtcgtggacggcttcaacttcggtgccccggcgccgaaggtggatcccgctgcggcagccaagaccgaagccaagaccgaaaccgctgccgtaccggccaacccggatgcccgcaccgccccgcgcgcgatcgacgcccgcaccgcctaccagctggtgtcgatgatgcgcgacgtggtccagcgcggtaccggcgtccaggccaaggtgctcggccgcgaggacgtggccggcaagaccggctccaccaacgaccaccgcgacgcctggttctccggtttcggcggcccgtacgtgaccaccgtgtgggtcggccgcgacgacttccgctcgctgggttaccgcgaatacggtggcaaggccgccctgccgatctggatcgactacatgcgcaccgcgctgaaggacaccccgatcgcgcagaacgacccgcccagcggcatggtgcaggccaccctcaacggcgcgaccgagtgggtgaaggtggaagacatggaccgcctgaccgactacgacctgaacctcaatacgccgcaggccgacgccgccgcgtttgatatcttctga

SEQ ID NO: 528426 - DNA, 645 bp, Stenotrophomonas maltophilia
atgcatcgcgcacgccagcatgctgccagccagacccgcgagcggcgtcaccgcctcgcccacgaagccgcccgcctgatggccgaaggcggcatccgcgactaccaccaggccaaattgaaggccgccagccgcctcggcatccacgacgatgcctccctgccccgcaacaccgagatcgaggacgccctgcgcgagtaccagcggctgttctccgggccgcagcatggcaacgaactgcagcgccgccgcgaagccgcgatgcgcgccctggagttcctgcacggcttcgcgccgcgcctggccggcccggtgctggagggcaccgccgacgccaacagccccgtgcagctgcacctgcacagcgacgacccggaggccgtgcaccgcttcctggacgagcacggcattcccgccgaatcgcgcacgcgccgcctgcgcatggaccgcgagcgcagcctcgatgtgccggtctgggtgttcagtgccgaagagctgaccttcgacctggcagtgctgccctatgacgccctgcgccaggcaccactgtcgcccgtggacgagaagccgatgcggcgtgcttccgtggcacagttgcggcaggtgctggccgaggccgagatcaccgcctacatcggcggataa

SEQ ID NO: 528427 - DNA, 747 bp, Stenotrophomonas maltophilia
atgtacggatgggtacgccagttcatcaactatcgcagcttctacctgtggcgtgcgcgctatcggtactacacgcgcaatgtggacggctggatgctgtccagcgcgctgtgcctggcgtgcatggcgatggtgctgtggtactactggcgggtagcgagcgtgctgcccccacgcgtgcatcccgaagcggcagcgctgcgcgtggaaaacatcacccatgaggccatccgccgcatcgtgagtgtgcggcacggtggcagcgtgcctggcgagatgttcggcacgcccgaagaggtccgcgccggcacactgcgcacgctgcaggtgcggcagctgctggacagtgcggaggcgtggcaactgaaggcccacctgctggccgacatggctgactacatcaccgctaccggaagctgcttcccctacgagtgctggcgcgtgacgcatcgcctggagctgctgcggacggcgcaggcagagaatgcggcgatcaacgatgcgctggcgtcggtgctggccgagccgttggacaggatgccgaacctcgatggcggtgagcgcacgcgcgtgcagagcgcctggtccgatacgttcggcgatgcctacaaccacacctggttgctgggggatctgcaggccatgcacgcacggatgatgctggaatacccgcaacgcgcgggcgcaccgtggctggcgcgcttgctgaccggggatgcggaagagccgcacctgtaccccctgtag

SEQ ID NO: 528428 - DNA, 3846 bp, Stenotrophomonas maltophilia; identical to SEQ ID NO: 528358

SEQ ID NO: 528429 - DNA, 708 bp, Stenotrophomonas maltophilia; identical to SEQ ID NO: 528359

SEQ ID NO: 528430 - DNA, 1137 bp, Stenotrophomonas maltophilia; identical to SEQ ID NO: 528360

SEQ ID NO: 528431 - DNA, 2733 bp, Stenotrophomonas maltophilia; identical to SEQ ID NO: 528361

SEQ ID NO: 528432 - DNA, 534 bp, Stenotrophomonas maltophilia; identical to SEQ ID NO: 528362

SEQ ID NO: 528433 - DNA, 1095 bp, Stenotrophomonas maltophilia
atgagtacccgatttgatccacccgagcgcggaccgctcggccccgacgtcgccaccgtcgtcaccgcccccatcgttccgcccgccagcgaaagcgcggtgtcctggggcgcgatcttcgctggcgccgtcgctgccgccgccctgtccctcatcctgctgattctcggcgtcggcctcggcctgtcgtcggtgtcgccgtggtcgtttgaaggtgtcagcaaggaaaccttcggctggtccagcatcgcctggctcaccttcaccgcgctggccgcctcgggcctgggtggctacctggccggtcgcctgcgcaccaagtggacgctgatccacggcgatgaaacctacttccgcgataccgcgcatggcttcgtatcgtgggccgtggccacgctgctcaccgccggcctgttgacctcggccatcggtggtgtgctgggtgcgggcgccaaggtcgccggtgccacggcgggtgcagccgcgtcgacggcaggcgtggtcaccgcagcagccggcacggccgctgcaggcaatgcgcaggaaggcgacctcaactattgggtcgattcgctgttccgcagcgcggctcgcccggctccgggcgcaccggaggcaggggcgccgccggcaccgggcacgccgccggcaccgggtgcgatgaacgatccggccgcaccgccgccgccggcggcaccgaacgccggtccgcgtccggccggcatgacgccgccgccgcgcccgatggcgggtggccccggcggcgatcgccgcgaggtgcgtgcggaagtgaaccgcatcatcgtcaacagcctgcagggcgatggccttgacccggccgatacccagtacctgtcacagctgattgcccgcgaaaccggcatgagcgaagccgaagcgcaggcccgcgtgaccgacgtgcagacgcgcatgcgtgcggcgctggagaaggccaagaccacggccaagcaggccgccgacgatgcacgcaaggcgacggcgtacgccgccctgtggctgttcatcaccctgctgatcggcgcgttcttcgccagcctcagcgccacgtggggcggccgtcgccgcgacctgtag

SEQ ID NO: 528434 - DNA, 999 bp, Stenotrophomonas maltophilia
atgccgcctcttcgacccgttcttctgaaatcccttgtgccaacagcacttctgctgactgcgtgccaaggctcgaccgtcagaacgccccagaagcactctcctgagctcacagcacggatcgaagcgctgtcgcaaaagaccaagaaagaccttgtggaggtggaaggcggcaccttcatcatgggcgatttcggccccatcgatccgcgcgcgaagatgccttacagcggtgagcgcgacgatgacgcgctgcgcgaggtgacattgagcagctacgcaatcggtgcgaagaagatcacctacgccgacttcgacgtctataccgatgcaacgggccagccccggaccgcgcagtacccgatggatctggagtaccggaacctgccggacgatctaccggtcggcgtgagctgggaggccgcacagcagtactgtggatgggtcggagagctgattgggcgaaagatggagcttccgacggaggcgcagtgggagtacgcggcacgtacccggggcgagttcgtcatctggcccaccgatgatggcagcgtcgacgatggaaggaacgttggggactacagaaccgtcacacgctacgcgtcgaagcatggctacatgtctggaccgactccaatcggtcagtatccacccactccgttgggcctgtacgacatgatcgaccatggatatgagtgggtttttgattggtatcaggatacatacgatggtttggatgtacgagatcctcgcggaccggcgcatggcaaagagaaggtactgcgcagccacggcaatcgaggcggagattcgcttttcatcgtgtcgatgacgttcacgcgattcaagcgcaatccggacccaggaccgaacccactcctagacgacgaggacaagcacctattcaaccccaacagttcgaccagattccgctgcgccgccaccgcacctctgcgtcctatggaaagtgccgcctcacgttccttgaccccgtcatga

SEQ ID NO: 528435 - DNA, 972 bp, Stenotrophomonas maltophilia
atgccgcctcttcgacccgtccttctgaaatcccttgtaccaacggcgcttctgctgaccgcatgccaaggctcgaccgtcaaaacgccccagaagcactctcctgagctcacagcgcgcatcgaagcgctgtcgcaaaagaccaaaaatgacctagtagaggtggaaggcggcaccttcatcatgggcgatttcggccccatcgacccacgcgcgaagatgccttacagcggcaggcgcaacgacgacgtgctgcgcgaggtgacattgagcagctacgcaatcggtgcgaagaagatcacctacgccgacttcgatgtctacactgatgcgaccggccagcctcggaccgcacagtatccgatggatctggagtaccggaacctcccggacgatctaccggtcggcgtgagttgggaggccgcgcagcagtactgtggatgggtcggagagctgattgggcgaaagatggagcttccgacggaggcgcagtgggagtacgcggcacgtaaccgagggcagttcgtgatctggcccacagatgatggtagcgtcgacaacggtcggaatgttggggattacaagacgatcacccgctacgcgtcgcagcatggctacatgtctggacccaccccattaggtcagtacccacctactccgctgggcctatacgacatgatcgatcatggatttgaatgggtctttgactggtaccaggatccgtacgacatgtctgacaccaatgacccacgcggaccgacgcgcggcgaggagaaagtgcaacgaagtcacagtgatcgcggtggagattcgcttttcatcgtgtcgatgacgttcacgagattcaaacgacaccctgatcccggaccaaacccattgctttccgaagagggaaagctgaagttcaatccaaacagcgcaaacagatttcgctgtgcggctactgccccttccgccccaggtggtgggtag

SEQ ID NO: 528436 - DNA, 987 bp, Stenotrophomonas maltophilia
atgtatgtgtattacgaggatgggcgtttccggatcaaggtcagtgcgcggttgtgcctgggcattggatgcaagggggcgctggattttgtggtgggtgtggaggggatgctggagttcgccaagtgggtgtattaccagttggcgcatgctgggtttaaggagttgatgttctttgcggatggtgtactaggctatctggccaagctggagcttctgcagatttcaagtgacgggtctgtaggtcggtatctgcactcaaacattgaaatggggcaggaaatggtgcgagatgtgattcagcggcttgaaactgccgagagtcgatccgggcttgtgcggcgcatcaactctgtgccgaccgaaggtcaggctggatccggcgcatggcttgtgtatgcgacgccaatcacgaggggcatgcttctctacgccatcacccgccacgattggatgacgcatatgaagaatccagcggagctcgagggggtgcttgacccgcaattgcactaccttcccgatcacaagagagctgttattcgggtgataaagggcatcagtctcgttagtgagtggcaggccatgttccagcacatgactgccgacggcgagcccagcggtgagggagcgggtaagcttgaaggtgatgttatgaagttcctgaactatgggcgctcgttggccgatgatctcagatcaaaagttatcgatccaatcaatgcggattccgacttgtcatcagagaggctgggaagcagctaccttgagcagttcattgcccatcgtaggaggctgttggggcgctttccgaaggggtacgaagtgacccagttgcagacgatggatgtagatgcattgctggcgcttgaagggcgggaggcggctacattcgcgagtatcgatggtgactgcctcagaccccgggatcatgaacagcggtctgttgccgcatccggtcgccacattccgtcagcaaccgcctcctag

SEQ ID NO: 528437 - DNA, 1761 bp, Stenotrophomonas maltophilia
gtgctgcagacgctggtcgcgcccaagtatcgaaacagccgcgcattgatcctaggcgcctacgatgatgatcgtttcgtcgctaacgtgcttgcgagggttgaggatgctgacctcctgcggaccgcatcgaatggcgagtgcggagtagtggcgcgcaactgggtcgtggcccggtccaaacaggtgcttgagaagttgacgggggaagccgcggcagtccagtactcactgcgggatgacacctgggctggggccggggtgtgcgaagacagtctgtgcgactggactcccgccgaacgcgcgcttatgacgacaatttcaaacggcgtttggcgcggaacctatctgaatcaagtcctgcatgcggtcgctgagatggatcgatcactgagccgagcgttcgatgcgctgaaggaagaggcaagggaaaagaaggtcaggctccgcaccgcattgttcgccgatgcctacgtgatgtcggggcgcgccggggtatcacagctgatgaatcgcatctgccacggtgattttccatccagagcagccgagagcgaagttgcggacagtctgaaaggtgcgtgggaacggcctcgcacgcccggtcagacgcatcttctgttgaccttggtcaggttcgcggaggacaagggctacgtcgtcccgcatatcctgccgctgcttggcgagcagtggaggtatcagccctatcatctgcagcttgcactgctggactccgtgcattctcttagtctggctgatgagaggctgaaacgacagcttgtcgaggtgctggaagccttgcttccgaccttggggccaatggtgtccggggtggtggtcgaagcgcttgagtacatgggtgccctcgagcaggaggtcgaccagcatgtcggttcggtcagggaggatcttcagaatctgctgtcgggccccgtggacgaggcggatgcgaaggcttgggcagcgtactcctgccagttcgatcacccgttctcgtcggcgtactgcgaggtcatacaggagttgagcccggaccagcgcaagcgcctgttgaccatggcctgtcgaggcgccgggtacgcaggactgttcgtctctcccttgattcaggagctgaccgagtatcaggatcctacggttgcgccggctctcacgaaatggacagcgctgccggaactaaacagcttcatgccgcaagaatcgatctcggtgtttgtgtgggcccacatcgcgcttggaatgttcagttctccgctgccagcggaccgaggggatatggactccccggcgaaggatgccttggtcgccttcggggacatgtactactggattcatcgcgcggatctcgacgccgaacgtatcaatcagcgctgctcgccggcgctggacgtcttgttgcggccggatcagctcggagcggcatctaccctgtacctggtggcaaagtcgctctcgtacgagaacggagtccgggaatcggtcatgcggagattcccggacaagatggcgtgcatatgccggaatgcgctgctacggcgagacgaccaggttggctactttccccatttcgcctatgacagcctcgatgtgcttcgattttcggttggggtgattggctgtctcggcggcattgaagatctacccctcctgcgcagcttgagcgatgacctggcgctcggtgaatcggctatcaaggcgatccaactgatcgaaggacgcgttggcaatgtgggcagcctaattcagttcttggcatag

SEQ ID NO: 528438 - DNA, 858 bp, Stenotrophomonas maltophilia
atgctcctcaactttccgcctccagcgaactggcaggattttcagctgctcactgctcgccttgtcgagctcaagtgcgccgaagggacagtgcgcgaatacggccgccagggacagcggcaagatggggtcgacgtctacggcgaaatgtacaatggcgagcatcttggtgtgcagtgcaaggagatgcagcctggacggaagctcacccaaaggctgatccagacagaggccgataaagcccgagacttcaagccagcgctcaacacattcgtgctggccaccacgctgccggaagacaccgcgatgcaccaggcggtgacgaccatgaaccagtccggcgcctatccattccggattacgtactggagttggaaacactttaacgacgtgctcaatcgatccaaccaggtcgtccaggacagctacaaaatctacgcgcagagctttggctttgaccaagagctcgcggatctggaagccatcagaacaggctttgatcgcccggcctttattgatgatttcagatatgagatgcgctacgtcgatttcgtacacgcacttggcgacaccgctctttttctcgaaactgggctgctacgtgatcggcagaccaacagcctgatcagcgccacatatgcgcgcggcatgctgcctgctgggtcttcaaagacactgcgctcggaactcaagagagaagttactgcactgcgcatacatgccgcccaagaccttaaagacgggcggctcgatgcgagttcggcgatcgtgtacaacgcgcgacggcgtgcggtacttgagactctgaatagagggctgcagcggcacaacatgcccccgattgctgccagctactga

SEQ ID NO: 528439 - DNA, 627 bp, Stenotrophomonas maltophilia
atgaaaggtgtcgagcgaatggctctggtgaagaaggttcttgtcaggggtgctctgatcgggctggcgctgtctgccttgactggcttggtgctgaaattcatggacttcaggctagtgccagcaccatccagtcctccgaatcctcgcatcattgagcctgatactggccatgacattactgatgctccgccggaaatgagtctgacaatcgggatcgccaactactctgatgaaggcttgggtaaggttttcataaatgacgcgtggggtggtgcaatgcgggctagagctagtagcaatgggcgtacctgttgtgtgacgctccctcgtctttggcatccaggcctaaaggtgacggtggcctaccgcaccagcactatgtttctgaatgatccgcacagctatgtggaaaaggaggtggtgctgcctcgctatgagcccttcttggatggtttcatctacttcatgtacttcccggatgatcaggtgcgggttgtggcaactccatacacgccgggatatccagggttcggctacgacatcggttttgctgatcgagagcgtgacatggagaggattgatgattttctagaagctacaaatggcgatgaggaaaaacaatga

SEQ ID NO: 528440 - DNA, 417 bp, Stenotrophomonas maltophilia
atgcgcgcaaacaggggatttacgctcatcgagttgatgatcgttgttgcaatcatcgcaattctggccgccatcgcgttgccggcttatcaggactatacggtgcgggccagggtttcagaggctctcctgctggcgtcggcagccaaagtgacggtcactgaaaatgtcaacaacatcaacaagctggatgcgacggcttgttccggtgtcgacggctcgggggcgccgacgaacaatgttgactcactgacctgcacggggaacggtgttcttactgtggtcacaagtgcagtggcgggaagggtgacgttgcagcttgcgcccgcctacaatccgaatgaagttattcgttggacctgctcgcgaattgcgggagccaacaagtatgtgccagcggagtgtcggtccccctga

SEQ ID NO: 528441 - DNA, 1167 bp, Stenotrophomonas maltophilia
atgcgcccgattcccaccttgctggccctgtcgctggccgcccttcccgccttcgcttcggcagcggatttcgacaactggccgaccaagtacaccttcggcgatggcaccgagctggccgccaccgccaacatcgcctacgactacaacgacttctcctcggccagcggccttgaggacgatgatgccgtgcgccgcaaggagttcggcgcaacgttgaagaagaagggcgtctacgacgcgatggtctactacgacttccaggccgacacctggctggacgtgttcgtgcgcttcgagagcaaggcgttcttcggccgcgacgtcggtcgtttccgcttcggctacatgaagaccccggtcggcctggatgcgaacacctcctcgcgtgccggcagcttcctggaaaccgcgctgccggtgcaggcgttctacgccggccgccgtaccggcgtggaatgggtgctggagcgcccgcagtacctgctgcaggccggcgcctatggcggcaaggacctgcagggtgacaaccccggcaccacccaggcggtgcgcgccgtgtggacgccggtgaaggcgccgggtgatgtgatccacctgggcgtggcttattcgcaggagaatccgcgcggctacagcgatggccgcgatgtgcaccacgaagccagcgcacgcctgcgcgcacgtccggaagccggcctgaccgacatccgttacgtcgactccggcgcgctggtcaccgccgaccagatccgccgcaccggcctggaaggcatctggatccgcggcccgttctcgctgcaggccgaagccctgcaggccaccgtcacccgcaagggcctgcccgactacaccggcagtggccagtacgcgatggccagctgggtgctgaccggcgaatcgcgcccgtacaacgccggcgccgtggccaacatcaagcccgcgcacaactacggcgcggttgaactggtggcacgctacagccgcctggacctcgacgacggcagcatcctcggtggccgccagcacgacctgaccctgggtgcgaactggtacctcaccagccacttcaagttccaggccaactacgtgaaggtcgacgccagccgtcgtggcgtgcacagcacgccggaaatcttcgagctgcgcgcgcagatgcacttctga

SEQ ID NO: 528442 - DNA, 579 bp, Stenotrophomonas maltophilia
atgcgcaagattgctttcctgattccggccctgctgctggccgcctgttcgcagccggcaccgccggccgagcctgcggcggatgcgccgccgccgatgaccggttccaccccggccgaagcggcagccagcaccacgccggacccggccgctgcaccgcaggcagcggcagaacacgccagcgaaaactccacccccgcccccgccgccgccgccgaggagggcgatgcacgcgcgcgcatcgaaaacgtgctgggcgatgccgcgcagtacgagaaagtcttcaacgcgttcaagaccgccgtggtcggtggtgaccgcgcggccgtggtggaggaagtgcgcttcccgttgaacatcgccggcggcaagaagatcagcggcccgggcgaattccagcgcaactacgagaagatcatcaccccggcggtggtcaaggcgatgtccgggcaggacttcggcaaggtgttcgtcaaccagcagggtgtgatgatcggtgatgggcaggtctggctgaccggcgagtgcctggacaaggcctgtgcgcgtaccgaggtgaaggtcggcaccatccagtga

SEQ ID NO: 528443 - DNA, 765 bp, Stenotrophomonas maltophilia
atgcgccgccacgctctgccgctcaccgccgcactgttgtccaccgccttcgcagccccggccatggccgccgtgccgttcttcaacgccagttgcccgggcggcatcgatgtgcacgccgatgagggcgggccggtctacgtgcagggccgcgagacggcgttgaagcgcttcaacgaccgctatttcgaagcccgcgacgccaacagcggcatcaccctgtcaatcagcagcaacgatgacggcacgccgcaggtcagctacaccggccgaggcggtgccaatggcatctgccaggtcagcagcagcgctgcaccggccgcgacggagcggcacgaccgccgccaccacgatgacgatgagggggcggcgctgccgagtgaggtcacctgcgaatccaccgaccagcgccaggtgtcgtgcgcgatggatacgcgcggcaacgtggaagttgcccgccagatcagccgcacgcgctgcgagcagggccagaactggggcctgtcgcggcacgcggtgtgggtgaatggcgggtgccgcgcggtattccgcaacacgtcgcgcgccgcgtacaacgcgcccagcggtggcaatgcgctgagggcctgcaacacgcgcaagggcgcacagggcacgctggtgacccaggtgccggtgggcagtgactaccaggagatgatcatcgattaccccgatggccgcttcctgtgcatgctgcgcaacagcggcgaagtgcagagcgtgacgccggtgcgccgccgctga

SEQ ID NO: 528444 - DNA, 834 bp, Stenotrophomonas maltophilia
atgggtaggagaggcagattgaaaatcgcacgcacggtcgcgctgttggtgctgggcgttctttcagcctcctgtacagagtccgatggcaccccggctgagtgcactactggtggcagtgcagccctgagttcggtgaatgccgatggtttcgacgttatcgttttcggcgaggttcatgggaacgtccagaccccgcaactgttcttcgatgccgtgtgtaaattcgcatcgaaatcgaatccaatccttgtcggaatggagatccctgcctcttccatcaaggccgttcgaaactcagccggacgcgggaggaaggcagtgttccgggacggcttctgggccagatcgagggacggtcgatcaagcgccgcaaatctggaactgatcgagcgtctggttcggctggaatctgagggatacctccggcttgttgggttcgacaagcgagtaacgggtaaagaagatttcggctcaagctcattgtcagcgttggcatccgaagagcaggcgagaggcggcaatggcaagtggattctacttaccggccggggccactccaggtatggcaatgacccattgagtctgacatacgccctggtccaaagcggtcgcaacacgagtgctgtggacgtgaccctggcctccggaacgacatgggcctgcgtgatgggcgaatgtaaagttcagcagatcggcaacggacagtgcgagaactcctacatgtccagggacatcgggccgggcacgcgtctacaagtcaccaatctctgcatagactcagccactgcatctgctccggcagctgactcagcgaccgacatcggcacatag

SEQ ID NO: 528445 - DNA, 183 bp, Stenotrophomonas maltophilia
atgaccgaccacgacttcttcgccgccatggccgtcggcatcccgcccatcaagcccccggcgacaccagaaccggtctggatcggggtcgacctggccaacggtcccgatacgcacatcgaagtcgacagagcctccgacggcacgttctacgccattccccaggagcagagcaatggataa

SEQ ID NO: 528446 - DNA, 270 bp, Stenotrophomonas maltophilia
gtgagcgcccctgtcaatgtgctggccgtgctggatgcccttatcgagtccacagttcggctcgcaaatggtgagccagtcacagcggatgcggccaccgttgctctggcagagcgcacccgcgccgcagtcgccgagctgatcgaggcggacaagcggatcgccgagagggcgcgcaggaaggccggcggcggctggtggatgatctcgaacgaggacatgaccgcccagcgcacagccctcgcccgcgtcaaaggcagtgccgcatga

SEQ ID NO: 528447 - DNA, 231 bp, Stenotrophomonas maltophilia
atgaacaacgaggaagtgaaggcagtcgcggaagtgatcgcgcagacatcgggtgcagcagtcagagcaattggcgatttgacgctagccctgagcaagcaacctggaatcgatggtccgaaactcatcgcggacttcctggagctgctcccagagaacccggcacaacaggggcgtggccaagcgatgctggatgggctgaagtcctatctatctccagagaagccctga

SEQ ID NO: 528448 - DNA, 204 bp, Stenotrophomonas maltophilia
atgaagacaacgaagaacctggcgccgaggctgaaccctcaagccgcgccacgcgagcgccgaatggatcacaacaccgtatcccgccccaagcgcacgaagcccggaatcaccttccgcggccccgtcgagacggtggacgagttcaaggcacgcggcgggcaggtgcagcgcctgacggccagctgggagaaggcagcatga

SEQ ID NO: 528449 - DNA, 348 bp, Stenotrophomonas maltophilia
atgaacggcctggacctcaagccgtgccctttctgcgcatcgacgagtgttgctgagcagaacgatgtggttgtgtcgacggatggcgacgagggatacagcgagtggatcgagtgcggcaactgcggctgccgcgccccccaggcgccggcatggaacctgcgctcaggcacttccgtgaactggcgaccaatcgtggaagcgccgcaggacggcacccgattgatgctgtgggactcggagacacagcggccggtgttcggaagctggcgcctcggcagcgcccaggaccacggcccgatcacgcactatgcggcggagccggtcggcccggaggttggtcgatga

SEQ ID NO: 528450 - DNA, 246 bp, Stenotrophomonas maltophilia
atgatcacgttcgatagaaacactggtgttgttacggtcgtgatctcggtccggggcgcgctgccgggcgacctgaatcgttatcgcgtgtccggaatgctgaagacgctggacagcatcgcgcgcgaggagcaggggccggttcgccgaaagctgatcgactgcctggtgcgggaggcccgcgcgctgaagcgggacgaatcagagatgcgcgcagctaagcgcgcgcataaaggggtggcctga

SEQ ID NO: 528451 - DNA, 210 bp, Stenotrophomonas maltophilia
atggacgccgttttccgggttggccagttggtcatggtgaaggaagacccagaagtgttcttgtttgcgggcgagatcgcacgcgtgtctgttcttgatgttccgtgcatgggcgggatcgggatggaggtaatcagcgaccacctgggccgattcaagggcacctacgagcagtttgaaccggttcctgaaattaaagggaggcactga

SEQ ID NO: 528452 - DNA, 354 bp, Stenotrophomonas maltophilia
atggacgccatcgagaagcgggcgcgggacctgctggctgcggcgtatgaggcggatggtatgggtggccgcgcaggggagatccggaatccggctcagtacatggagaagccggacaggcgtgcgttgggctgcatcatcgccgccctcacgccgcccgagggctacgtgctggtgccggtggagccgactgaggagatggtcggcgatggcgcggagtcacggccgatgcttccattcactccgctggaggagtgggaggcgtttgaggcaatgacgggctgtgaacagggatggcataaggcgaggttgtgctgggctgccatgctcgccgctcgcccggaggtgccgtga

SEQ ID NO: 528453 - DNA, 414 bp, Stenotrophomonas maltophilia
atgcaggctgactgtgcgctggagctggtactgccctggccgagcaaggatctgtcgccgaacgcccgcgtccacttccgggtgaaggctcgggcgacgaagcacgcccgccagacagctgtggtgctggcgcacgacgctggatggcgcgcgctgcagttgcctcccggcaagttgcacctgtggatcgactgctaccaggcgccgggcaagaagctgcctgacgacgacaacatggtgggccgctgcaagccgtaccgagacggaattgcccagcttcttgggatcgatgacgcgttgttctatgggcacctgtctgtgaaggacgagcgtcggccgggcggccaggtggtggtgcgtattacgggcgggccggtggcggcccgccactcaacgacaggggaacgggcgtga

SEQ ID NO: 528454 - DNA, 477 bp, Stenotrophomonas maltophilia
gtgaaccggatcagcatctacctactggtgttcgtcgcctggtccgctggcatgttcggtgccggttgggcctggcgtggtgaccgtgcaaagaccgggcaggcgcgacagcaggcaagtgccagcgccgtgcaggtgcagcagctcaaccaagcccgcgccgtcgagcaccagcaggccgacaccatggccaccatcggagccaagcatgaagaagatcgcactgcggccacggccgtccctgctgttgttgctgctggcgtgcgtgatggcagcctccagctgcgcgacgacctcgccacctgcagcaccagcctcctgtcccaagccgtcgccggcgccgtcgaacgtgatgcgcacgccgaactacgagcagaggttgcgggagctgctgttcaaatcggtcgcgacgccgacgaccacgtccgcggcacccaagcagtgatagcggctgaccgtgaagcggtgaggccgtga

SEQ ID NO: 528455 - DNA, 471 bp, Stenotrophomonas maltophilia
atggcaaagttcatcaagcccttccgtggagtgccggaaggcgagatctatcccgtccagttcgttgccggcgatgactgcccgcccgagctggaggccggcgcactctctgtcggtgcgctcagcctgatggcagacacaccgcccccggctctgttgggttccagcgtgcagcccgcgagcttcgagcttcctgatggcaccgtgctggcgctgggcgacgtggtccgcgaggcgcacgtggcctctggtctgtcggttggggactggaacgcgcttgaggacagcgcacgcgaggcgctgatcgccgataccgtcgacaagctgtccagcgagggcgatcagggccgagtcgctgctggcgacaagcccgccttgattgcgcagctggaagccgccggcatcccgttcgacaagcgctggggtttggagaaactggccgcggcgctggccgaaggcaagaaggagtga

SEQ ID NO: 528456 - DNA, 480 bp, Stenotrophomonas maltophilia
atgcccctgttgacgcctgagcagtgccgcacccaatgcagggtcgatggggattacgccgatgcagagttgctagcgctgctcgcatcggccgaggacgcagcagctgcatacctcaaccgatcgcttttcgccgatcaggccgctttggatggcgctttggatgctttcccgggtgaagcggcggcagctgcctcggcctactccacatccatgacggcggctgactctgagcctgatgctgccaaagcggcggcgatgcgttccgtcgcgaggcaacgcaaggcgtcggccgatctggccttgtcgcggaacctggccggaatggtcgtcaacccgagcgtggttgcagccgtccggttgaccttggcgcacttgtgggagaacccggtagcagtggttatcggcgcaaccgccgtcgagttgccgctcggcgtgataccactgctgcggccatatcggcgggtgatgacgccatga

SEQ ID NO: 528457 - DNA, 342 bp, Stenotrophomonas maltophilia
atgagccccaagaacctgcgactcaagctgttcaagcctacgaccgagcgcgacggctacggcgaagaggtagaagccttcgcggaggctggcgaagtctgggcggcggatgagccgctgtccctgcgcagtaccagcgccgtgcttggggtcgagtccggtgcgctgaacgctcccgaccttcggtggatgacggtgcgggtgaaccgggagatcgaaccgggatggcgtgtagcgcgcacaaccgggcgcgacgccggcaagcagatgctggtgatcgcggtacgcgcctccaaatcgccattggacatgcacctgatagcgaggctgcagcatggctga

SEQ ID NO: 528458 - DNA, 402 bp, Stenotrophomonas maltophilia
atggctgacttcgatatccacatctccggcctgagagagcttgaaacggcactgctggagctctcggacaaggccgcccgtcgcgcactccgaaagggcatgcggcggggcgcaatcgtggtcagaaacgatgcccgcaatcgcgtcaggatcgcccggggcaagttacgtcggtctatccgggtgcgggagcgtagcgacgaacagggctggatgcggttcgctgtggaggtgcctcgatcggccttctacggcaagttcggcgagtacggcacatcgaagatggccgcctggccgttcatgcgcccggcggcggagtccaagaccgaggaggctgttggcaccatgcgtgacgccctcggagaggccatccaggacgaaatgcggagggcccgccgatga

SEQ ID NO: 528459 - DNA, 339 bp, Stenotrophomonas maltophilia
atgaacctcgatcttcgcctcgcagcagccgcgggcacgatcactgcggcgttctacccgtttcctgcgccgaaggaccggccggcactgtacgtgacgtaccagcgcgctggcggcaggcggcacgccactctcaactctggcgctggtgcggagcggggcacgttccagatcgatgtgtgggggccgaagaaggggcctgtgagggagcttgctgaacagctcaaggatggtctgccggacctgctcaaggtcggcgagatcaccgacaaccccgatgactatgaggcggatacctcgctgcaccgcgctagcttcgatgtaaccgtttgggcctga

SEQ ID NO: 528460 - DNA, 453 bp, Stenotrophomonas maltophilia
atggccacgaatgaagcgatttccgcgcaggactctgcgctctatgtgaagaagggcactgcgcccaccacgccgaacgatccggccggctacaccgaggtcgacggcttgacgggcttcccgttcggccgcggccaggcaaacaccctggacgctaccaacctgaagtccaagcaggtcgagaacatcgccggactggctggcggccagactgtgcaggttgccggccaccgttggccagttggtaagtcggccggccaggagatcctgcgcgatgccgacgcggatgaggacctgcacttcctgatggtgctgccgaccggcgatgcggccacgttcgtcggcaaagtcgctggcttcaacgtcaccccgggcaccaacgcagtactgaccttcaccgcggacctgctgccgcgcgacttcaccatcgtcacccttccgaccggaccgtaa

SEQ ID NO: 528461 - DNA, 348 bp, Stenotrophomonas maltophilia
atgaccctgctgaacaagagccagatcctcgccgcctccgaccgcaagaccgaagacttggaggtcaaggagtggggcggcaccgtccgcatctccaccatgtcggcaagtgatcgcgacaagtgggagcaggacacctacggcggtgagaagaccaagaccgaggacttccgcgcccgcttcgtggcgctgtgtttggtggatgagaagggcgaccgcctgttcaccgacaaggacgtggcccagctgggtgcgaagtcggctgcggcgctcgatcgcgtgttccgcgccgcacagaagctcaacgccctgggtgatgccgccatcgaggccgctgaaaaaaactga

SEQ ID NO: 528462 - DNA, 255 bp, Stenotrophomonas maltophilia
atgctggcgggaatggattcccgccagctgacggagatgtacgcgttcgcccgcatggagccgctggaccagcccttgcaggacatgctggcccagctgaccgacgtgctggccagggtccatggcaacgagaccagcccgaaggacttcctcttggttcgggagcctccacagccggtggacgagggtgttgcccgtgcccagcagatcgccgagctgttccaggcggcgtcggcaaggaactccgttcattga

SEQ ID NO: 528463 - DNA, 3591 bp, Stenotrophomonas maltophilia
atgacttctaccgcggcaaccatcgacgtacagctgcgggcgaacaccgctgcttaccgcgccgagatggtgaattctgctcgcaccaccacgcagcagcttggcctgatccgtaaggaggcctcacagacagcggtttccattgcgaacctcaacaaggcggcggttggcttcgtaggcttcgaagcggtcaagattggcgtgctggcactcttggatgcgcagaagtcgatccagcaaatccactacggcctcatgggtgctacggggtcggcccaagccgcagacaaggcctacggcttcgtcgcgcagacggcgaaggaccttggcctgaatctggaggaggccggcaagagcttcaccagcatgtcggcggccgccaccgcgaacggcatagccatgaaggatcagcaggagctgttccggcaactgtcgcgctcggcgacagtgatgcacttgaccagtgagcagatgggaagagccaccacggcgctcgggcagtccttcagcaagggcaagttccaggccgaggagctccggcaacagcttggcgaagccatccccggcatcgtgccccgtttcatccaggcggttgccaagatgaacgaaggaactgctcttgccggcaagtccttcgacaagcttctgcaggacggcgacctgagcgtccagaagtacctgccggcgatgatcaaggcgctggaagcctccggcactggagcagaggaggctgcaaaagggctgagcgcagagctgaatcgcctttccactgcatggttcaacttgaaggtcaaggccagcggcggggtgttcagcgacgccgcaatctcgtccgttcgattcatggccgagaatctggagaacgtcgccggtgccgcgacggtggctgcgggtgtcatcgctggccgtctcgtcggcgtcggtgctggcaaggcatatagcgctgtcgccgcaccgatttcagatcggatggctgcatccagccaggcatcggacttggcaagcgtcgcgcgggagcgtgtcaaggaggctgccgcaacagtcaaccaggcaagggagtctgtacgccttaccacgacgtggaaagcccaggctgcagccgcccaggatactgctcggggccagttggccgtggctgcggctgcccacgaagccgcacaacggacgctagaacaccagcagggcgcggcaactctgtctgccaacctgcgggcgcagaaggaggctcaagccgcagtggttgtcgcccaacgcaaccttgagcgggcccagcgcgagtacaacgcagcatctctgtctggaacgcgagcagatgcagcagctaccgcggcgaaggggcggctgatcctggcccaagaggctgctgccgtagcaaccaacaacctcaccgcggcgcgcgggagggaggccgctgcggcgtcggcatcctcactcggcggaatgctggctggcggactgcgcagtgccggtagcggtctgttggcgctggctggtggcccgtggggtgctgcagcgatcgccattggtggtgtcggcattgcgtacatggatatggtgcgcaagtcccaacaagcgagggaggagtacgcacagcaggttaagtctctaggtcttctggcctatcagatatctgatgttacggagagatttcagaagttcggtagtgaagtgtcactcaaggagtttatcgggcaatggaatgaggctgcgcagaagatcaagcagtcggaggaacgggcgaaggcgcttgaggccgcggtccgcaactatcaagcgctgttggatcaagggagaacgtccacgcgcgagggggctgggctcacgattgttcgtgacatggagcgcctcgctgacgcgaaggcggatctgaagaagttccaagaggaggtggcgccgactcaagcgaagttcgacgaaatgtcgaccgttcttcgatctcggctgacgccggagttgttcgaggctgcaaaggcagcagcagcgcttgggaaggagaagttggaggagtttttggcggcgctgccagaggcggcccgacgtgcagtggacgcaggaaacgcgatccaaggaatgttgtcaggcttgcgaactgatagttggaaggatcaggtcgagtggatcaagaagtccaagggtgagtacgcggcatggatggccgagcaaggcaaggtcatcaacgataatggaggtgtgcaagcgctgacgccgcaggagcgcgcttctttcaatgctgaggctgcgcggaagaaggcgcactttgagcggatgaagcagctcgaggatgagaagaagtccagggctggggccgcccgttcagagatcgctgacggcaaagcccagcagagccagtacgcatcgatcaccgatcggatcaagcggcagatagctctcgacaaggagcagatgggcctgaccgacgacatgacggcggcgcagaagctccaggtggtcatcgcaaatgagctggcctcggccaagagcaagctgagcgaggaggagcagaagcgcgtcaaggcgttgctcgaggaggcggtggcccagggtaaggcgcttgcggcgcaggagtctgcgaagaaggccgcacaggacatgctgcggctccagaaggagctgaacgaggcggccgtcacccagcagcaggccaacgcgatcgacctggccggcatcggcactggcactgagcagatggagcgcatgcgccgccagctgcagctcaaggaagagtacgaccgccggctgtcagcgctgaatgaccgcaacgccagcgccaacaatggcaacggctataccagcaagcagtacgcgcagcagctggacgagctggacaagtaccacaaggaggcattgcagcgggaggcgcagtaccaggcggatcgtcagagttcgatcaccaattggtcgttgggtgcctaccgtgccttcgaggactatcgttcccaggcggccaatgcagcagagctgggcaatcaggcgttcaccaacgcattccagggaatggaggatgcgttggtgaacttcgaaatgaccggcaagctgagtttcagccagctggccaactcgatcattgcggacctggctcgtatcgcggccaagcaagccacatcagcgctgttcaacgccggattcaacgcttttgccgggccggttggaacggtacagcgggagcggatccagatcccagggttcgacggtggtggcttcaccggttacggcgggcgactggagccggccggactcgtccacaagggcgagggcgtgctcaaccaggacgacatgcgggcactggggggcccatcggcatttcacgccctgcgcgcggcgttgaggcgaggttacgacgttggcggcatcggtggacaggttcccgcccgtgttgcgctgagcggccggcagggtggccaaggcgggccgttcgttgagatccacaactacagcggcagcaaggtgcaacagcgcgaggaatcgcagacgctgccggatggatcggagatcaggaagctgatcgtccagattggcaacgaggagctcgatggtggttcgtggggccggataggccaagcccgctatggctggcaggacgcgatgggctga

SEQ ID NO: 528464 - DNA, 357 bp, Stenotrophomonas maltophilia
atggagaccttccccagctatgccgagatccgctttgcggactacggtgaggagttcgaccccgcggtcgagcgcaccgagatggaacgcggcgtgcctcggcagcgcctgctgaacacccacgtcatgcagaccatcgaggcgtcggtgcagttccgctcggcgcagacggtggccgacttcgaggcctggtacttcgacaacctcaagcgaatcggctggttcaacattgagcatccccgcacgggccagatcattcgtgctcgctttcaggggggcaagatcggcaagctgcagccgctcaacacgctgtttcgattcgccaagcgcgatttggtactggagtacctgcgatga

SEQ ID NO: 528465 - DNA, 1605 bp, Stenotrophomonas maltophilia
atgccaccgggccagcatagcggcatgcgcctcgctggtgacgccctcgccggtcacctgtgccgggttgagcatggtcgtcacgcctggcgcaggcacgcgcagggtctttgcctcccacgtggcacggtccaggtagctgtactcgatgccgtcggcgccgttggccagcgtgtactcgacctggaactgccccttcttgatcgtggccatgttgaccacgcccgacagcggctgctcatcggcggcccacaccacggccagacggcccttcggccatgcgatctggccgaagccggccagcgcgaccgcgtccatcaccgcctggtggttgcgcttctcggccacctggtagtcgtagctgaagccattggccgcgcagtgcagcatgaaggccttgagcgcctccacgtcgatctggctgtcgggcaggcccatgccggcaatccgaacgccctgcggcgacttgatgccgcgggcataggccaggatctgcgcgccggggttgctgctttcctcggtgacccagccgatggcgtcgcccttccacaccgggatcgggaaggaatgtgcaacacagcgcagctcgtcggggctgccgttgagctgcccggacgccttcatgcggatgccgatgcgcgggatgccgtcataactggccgtgtcaggcagcacactgaccaagttggtccagctgaagctggcctgcgcgttgttcccgtcggtgttcaggcccgcagtgcggacccgcacttcgtactggccggccggaacatcgaggccataggtcgcgcgccgggacttctgcgtccgaccggccacggtgtagttgccgaacacacgccagccgctctcgcccactgcgcggtactggatctggatctgctcgcggttctcgtagtcgcggcccttcttgtccgcatcgaagatgcggaaatccatgttcacctgcaggcggatcgcgccggcggagctggtgcgctgaacccagttgctgggcgtgtgcttggggtcgctgctggtgtccaggatcacaccaccgtcgacgctgccagagttgctgtacagcggaatggcctcatccggcatgctggggaagccgctgtgccagacctgcaccccctcatagctgctcagcagggcgtcaccgttgtacagctcgtccacgtgggccacgttgagccccggcgtcagcaccagcgacaggtactgctcgtcaccctcatagttcatgtagggcttgctggccacgtccggcgcgatgcgcaccgtaccgagcacgaacgacagcggctcataggcacgcatccgattccggggcgccgaaatggagaagagtgtgtcggccggagccgaggcggcagcgctgggcagcttgggaccgagaaccttgttgatcagcaggctgccggcggcgtagacagccgcgcgcgcaagcgtcgtacccaacaccgtggaggtgccgatgctgaaacctgcaatggctgcaccgcccaacgtgaagtaggccagtgcgacctgggccaccagccggatcgcgctcttaccgaccacgccccggatctcgatcacctggccatgcttagggtaaacgttgctccatag

SEQ ID NO: 528466 - DNA, 246 bp, Stenotrophomonas maltophilia
atgcgccaggtggccgagcgcgtggtggtcgaggcgacctgctccagctccgaattctggtccaggtccgacagcacgcggatctcgcccaccggcccggtgatatcgaacgaggcctgcagctcggagaacacggtgtcgccctgcaccacctggcgctcggtgatccgcaggttgctggcaaccggccgggtgcccagctgggagccgttttccggcgggatgtactcgccggtcttcacgtaa

SEQ ID NO: 528467 - DNA, 1110 bp, Stenotrophomonas maltophilia
atgaaaattcaatatctggaactgaatccgtggcacaagcgccaagccgccctcatccatcatttcacctcgatggagtacctgaagggcctgctgccgcagatcgacagcctgctagccatgaccgaccagatgctcaatgagcgatcgcatctggatacagctggcagagccttggcgggttggagctcgcagaatacggcctcgcacttcgcgacctacgcctttccggcactcatggagtttcgtgaaggcatcatcaaggacatagctctgcgctcaatcgagcggtatcgaggagcaggcgagcaccaatgtgctcgcatgctggaggagtacgcctaccagatggcctgggcgacgccggagcaggaaaaggtgttccgtgacaccaccgaaagcgtcttcaggtatgcacgggagctctcagggctagtcgaacgtccacccgtcaagaatgacttctcattctggctcctctggaacaagggcgtgatcgactcacatcgaattccaaaattccgtgtccgtacagattttgtagtgcgaaccaatcaggttcctccgcgcaccggcatctacgttgccaaagacgatcccatggccacactccagtttgcatggaccggtggatacggagagctgtgcccagccatcaccctcaatgaagttggaagaaccgttctgcggcagttcggtcgagagcgactgtggggcgatgcagaaggcctgtatcgcttcctcgatgcaaaccgacacctggatccctatggctggccctacatccaggccgatctggccaagctggcaccgtcaataattgcaggtgtgggcttcgatgatcaggattgcgactggtattttgtcgaacccatcgccgatgaattcgaggacatcgacggcagctacaccggcaccgatcagccggatctccggccggaccgagtcgccgccggcaagcgggtgcctgtggccggctggtggtacacccccgcgcaaggtggccggcgcttcttcaagcaaggcgatgtgttccccgccatcaacagcgactggggtgacaccttctggatctgggccgcagaccaggcgccgccgtcgatgcgctga

SEQ ID NO: 528468 - DNA, 1044 bp, Stenotrophomonas maltophilia
atggctgctgccatccgccacgactggcaacacgacgaactgcaggcgctgttcgatctgccgttccccgagctgctgttccgcgccgcagcggtccaccgtgagcatttcgacccatcgcaggtacaggtctccacgctgctgtcggtgaagaccggcgggtgcccggaggactgcgcgtactgcccgcaggcgcagcgctacagcaccggggtgaacgcacagaagttgatggacaccgacgcggtgctggccaaggcacgccaggccaaggccgccggtgcgtcgcgtttctgcatgggcgccgcatggcgttcgccgaaggaccgcgacatcccgaaggtggcggcgatgatcgccggggtgaaggcattgggcctggagacctgcgccacgctgggcatgctcagtggcgagcaggcgcgtgcgctgaaggatgccggcctggactactacaaccacaacctcgacaccgcgccggactactacgattcgatcatccacacgcgccagtaccaggaccgcctggatacgctggaacatgtgcgcgacgccggcctgaaaacctgctgcggcggcatcgtcggcatgggcgagacgcgcgcgcagcgggtcggcctgctgctggcgctggccacgctgccggcccatcccgattcagtgccgatcaacaagctggtgcaggtggcgggtacaccgctgcacggcagtgccgagctggacccgttcgagttcgtgcgcatgatcgccgtggcgcgcatcgccatgccgcgctcgatggtgcggctgtcggccgggcgtgaggccatgagcgacgaactgcaggcgctgtgcttcattgccggtgccaattcgatcttctacggcgacaagctgctgaccaccggcaacccggagagcgagcgcgacctggccctgttcgcgcggctggggctgcagccgatggcggtgcaggtggatgccgagggccacgaccacggtggcaccgtgcacgccgacatcagcgccgatgcggccggctgcggctgcgctcacgcggcctga

SEQ ID NO: 528469 - DNA, 492 bp, Stenotrophomonas maltophilia
atgaaaatgcgcttgatgcttgccggtggcctgatgctggccctgaccggctgcgccacctacgactatgtcggcggtggccgcggcggcggctactaccacggtgcgccgtcggtggagtaccgctacccggccggctatccctacaactatggttacccgtactacggcggctacggcggctattacggcggctatggcaatccgtactactcgcggccgatctaccggccgccgcacaaccatcggccgccgccgcgcccgcctggcaacggtggcgagaaccgcccgccgccgccgtcgcgtccgtcgtacaacggtggctcgccgtggcggaacatggactcgatgcgtcgcccgccgcagtccagcgtgcagccgtcggcgcccgcgccgccggcccggccagccccggcgccaagtgcgccgaggatgaacggctccccttggcgcaacatggatcgtgcgacgcagcgcacagttgagcgctga

SEQ ID NO: 528470 - DNA, 963 bp, Stenotrophomonas maltophilia
atgagcgattcactgttgccccgcgccgacgatgtcctgcttgctgccgcgaggatcgccccgcatgccagcgtgaccccggtgctgcgctcgcacacgcttgacgcgatggccggcgcaccgctggcgttcaaggccgagcacctgcagcgcggcggcgcattcaagttccgtggtgcctgcaacgcggtgtggtcgctcgatgccgatcgcgcccgtgccggcgtggtcacccattcctccggcaatcatggcgccgcgctggccctggccgcgcgcacccgtggcattccctgccacgtggtggtgcccgaaggtgcggtggcggccaagctggccaacatcgcccggcacggtgccacgctctggcgctgcccgccgaccatcgccgaccgtgaggccacctgcgccaaggtgcaggccgataccggcgcaaccctggtccacccctatgcagatccggcagtgatggcggggcagggcaccgcggccctggaactgctgcacagcgatggcccgttcgatgtgctggtggtaccggtgggcggcggtggcctggccagcggtaccgcgctggcgctgcagcatgccagcccgcagacccggctggtgctggccgaaccggccggcgccgatgacaccgcacgctcgctggccgcaggcgagcgccaggcggctttcaccccggacacgatctgcgatggcctgcgcaccctgatcggcgcgcccaacttcgagctgctgcgcgcggcgggtgcggaagtgatcgtggtcgatgacgcggccacgctggcggcgatgcgcctgctgtgggacgtgctcaagcaggtggtcgagccttcctcggcgaccgtgctggccgcggtgctggcgcagccgcagcggtttgccgggctgcgcgtgggcctggtgttgtccggcggcaatgtcgacctgccagcgctgcgctgggggacgccttga

SEQ ID NO: 528471 - DNA, 633 bp, Stenotrophomonas maltophilia
ttgagccgtgaccggcagcggcaccgcaccggcctgctgggctggttgtggcggctgttcgtggtgctggtgatctggctgctgggtgtgacagcctggatcgtctgggtgggtgagcgtgaccaggcggccaaggccgatgccatcatcgtgctcggtgcagcggcctatgacgccaagccgtcgccggtgttcgaagaacgcatccgccatggcttggatctctatgaggcccagtacgcgccactgctgatcttcactggtggctatggcggcaccggcgcgcgcttttccgaatcgcaggtggcgcggcgttatgcgctcaagcacggggtgccggacgacgcgatcctgatcgagaccgcctcgcgcaacaccgtgcagaacctggtcgaagccaagcggttgatggaccagcgcaacctgcaccgggtgatcatcgtcagtgacccgctgcacatggcgcgcgcgctgcgcctgagcaaggcgctgggtatcgatgcactggcctcgtccacgcccagcacgcgcttccgcagcttccataccagctggcgtttcctggtgcaggaaatctatttcttccaccgcgacctggtgcgcccgccgctgagttcgccggccaatacctga

SEQ ID NO: 528472 - DNA, 885 bp, Stenotrophomonas maltophilia
atgccgtcccacttcgatgcccgccacgtccgccgcgcgttcgcccgcgctgccaacagctacgacgccgccgccgccctgcagcgcgaggtgcagtcgcggctgatcgagtcgctggactacctggaggcacgcaagcccgaggtggtgctggacgtcggtgccggcaccggtcatgccagcgcgctgatgaagaagcgctggccgaaggcgcaggtgatcgcgctggacgtggcattgccgatgctggaccaggccaagcgccaggccggctggtggaagccgttccagcgcctgtgcggcgatgcggccgcgctgccgctggccgacaacagcgtggacgtgatcttcagcaacctgtgcctgcagtgggtggacgacctgcccgcggtgttcgccgggttccgccgcgtgctcaagcccggtggcctgctgctgtgctcgaccttcggcccggagacgctggtcgaactcaatgaagcctttgccgccgccgatgatcgcccgcacgtcagccgcttcgcgcagattgcccagttcggcgatgcgctgatgatggccggcttccgcgacccggtgctggaccgcgacctgttcaccctgacctacgacgatctgccctcgctgatgcgcgaactgcgcgcgatgggtgcgaccaacgcgaggacggaccgccgccacacgctgaccgggcgtggccgtttcgctgcggccgccgccgcgtacgagccgatgcgccgcgccgacggcaagctgccgagcagttgggaagtgatctatgcccacgcctgggcgccggacccgggtgccccgatccgcgaaggcgggcatgacgtggcttcggtaccggtgtcggcgattccgatccggcgcaagcagacctga

SEQ ID NO: 528473 - DNA, 780 bp, Stenotrophomonas maltophilia
atggatcttggtatcaacggccgctgggcactggtctgcggcgcaagcaaggggttgggcctgggctgcgcgcgtgcgctggtgcgcgagggcgtcaacgtggtgatcgtggcccgtggcgaggcggcgctgcagcacgcggccgaggaactgcgtgccctgcccggcgctgcggatgtccgcgcggtcgccgccgatgtcaccaccgaggccggtcgcgctgcggcactggccgcgtgcccgcaggtggacatcctggtcaccaacgccggtggcccgccgccgggcgatttccgcagcttcaagcgcgatgactggatcgccgcgctggacgccaacatgctggcgccgatcgcactgatccgcgccaccgtggacgcgatgatcgatcgcggcttcggccgcatcgtcaacatcacctcctcggcggtgaaggccccgatcgacatcctggcgctgtccaacggcgcgcgcagtggcctgaccggcttcgtcgccggcctgtcgcgccgcaccgtggcccacaacgtcaccatcaacaacctgctgcccggccagttcgacaccgaccgcctgcgcgccaacttcgcccacagtgcgggcaaggatggcgacgccggcgaagtggccgagcgccgccgccagcagattcccgccggccgcttcggcacgccggatgaattcggcgccgcctgcgccttcctgtgcagcgcacaggccggttacctcaccgggcagaacctgctgatcgacggcggcgcctaccccggtacgttctaa

SEQ ID NO: 528474 - DNA, 1224 bp, Stenotrophomonas maltophilia
atggcccgccccgacctgaccgctcgccttcatgcccagcgcgctctgcgcgatgcccaggggcgtcgccgcccgcgacgcacggtcagccgtcgtgatggtgtgcgcctggaagtggacggccagtggctgaccggcttctgcagcaacgactacctcggcctggcccagcagttcagcgtggtcaacgcgctgcaggatgccgccgcgcgcgagggcgctggcgccggtgcctcgcacctggtgtgcggccaccacgcaatgcacgatgcgctggagcgcgaggtggccgactggctcggctacccgcgtgcactgctgttcggcagtggcttcgccgccaacctggcggtgcagcaggcgctgctgagcgaagagaacgatgtgtgcgtgcaggacaggctcaaccatgccagcctgctggatgcgacccggcttgccggcgcgcgcctgcgccgctatccgcatctggatgcggaaggtgcgatgcgtcagctcaagcatgtgcccgatggcgcggcgatgctggccaccgatggtgtcttcagcatggatggcgacatcgccccattgcgtgcactgtcgctggtggcacgactgcagcaggcgctgttctacgtcgatgacgcgcacggcgtaggcgtggtcggtgatggccgtggcgcggtcgcggcggccggactgggcgtggacgatgtgccgctgcagctggtcacgctgggcaaggcgctgggtggttccggcgccctggtgctgggccgcgacgacctgatcgagcatctggccgaaaccgcacgcccctatatctacaccaccgccgtaccaccggcgatggcggcggcggcactggaagcggtgcgcctggcacgccgcgaccactggcgccgctccaaactggctgatctgatcgcgctgttccgcagcgaagcgcgtcgccacggactggacctgatggcctcggagaccccgatccaaccgttgctgtgtggcgacgaccactcggccgtggcgatgtcgcgggcgctggaacaggccggctggctggtcggcgcgatccgaccgccgacggtaccggagggcaaagcgcggctgcgcgtcaccctgtccgcactgcactcgccggaccaggtgcgcggcctggtcgacgcaatagccagcgcgcgcgaccacgtgaccctggccgcacgtgagagcgccccgccaccgctgcccgcctttgcctga

SEQ ID NO: 528475 - DNA, 1341 bp, Stenotrophomonas maltophilia
atgattgatctttatcgcctccgcggccgtatcactgcgctggtcctgagcgaggcctggcgccgccgcgccgcgctgtggggcggtgccgtggccgtagcgctggtggcgatcctgttcgccaaggccagtgatgcggccttccacctgttccagcgcatcacctcgcactcgccgtggtgggccctgctgctcacgccgggcatcttcgcgttgctggcctggctgaccagtggcgtgctgaagcccacgcgcggcagcggcattccgcaggtcattgctgccctggacaagccggacgcgtcgttccgggaggccaacctttcgcccgccgtttcggccggaaagctgctgctgacgtcgctgtcgctgctgggtggtgcgtcggtggggcgcgaaggccctaccgtgcatgtgggcgccagcctgatgtacctgttcggcagctggttcggtttcaaggacccgcgcgagctctcgcacttcctgctggcaggtggcgcagccggtatcgccgccgccttcaacaccccgctggccggcatcgtctttgccatcgaagagctcagcggccgtttcgagcatcgcttctccggcacgctgctgaccgccgtgattgtcggcggcgtggtgtcgctgggcctgctgggcaactacacctacttcggccatgtaagtgcgcggttgccgctgggccagggctggctggcgatcctgctgtgcagcgtggtggccgggttgctgggcggagtgttcgcgcgtgcggtgctggccagtgcggccggtcgtccgcgttggctgggccagctgcggcaacgtcatccggtgctgctggccgccggatgcggcctggtggtggtgctgctggcgctggtgttcggtgaaggtgcgttcggtaccggttatgagcaggcgcgcagcctggtgcagggccaggcgctggtgggccacgaattcgggctgatgaagctgctggccaatctggcgtcctatgtcgctggcatccccggcggcctgttctcgccggcgctggcggtcggagccggccttgggcataacctggcggtgttgatgccgggcgtggatccgcgtgcgttcgtgctgttgggcatgtgcgcctatctgaccggcgtcacccaggcaccgctgacctcggcggtgatctcgctggagctgaccgacagcggcgatctgctgctgccgatcctggccacggtgctgatcgcccgcggtgtgtccgggctggtgtgccgggtgccgatctatcgtgggctggcagagctgttgatgcccgcggttgctgcaccgcccgatcctgcgaaccgcgaacacacgcgatag

SEQ ID NO: 528476 - DNA, 732 bp, Stenotrophomonas maltophilia
atggcagcgctggcgctggtagagaaagcatggggcatgcccatccacctcctgcatgcggcaggtgccgcctcccatgcgttgctgcgcgtactgctgccgctgcgctgcctggtctgcaacgatcccggccacgatggcctggacctctgcgccgcctgtttcgcggaactaccgtggtccggccgcgcatgcctgcgctgcgcattgccgttgcccgacaccgcgctgatcgtctgcggcagttgccgcgaagaagcaccgccacaggcggctgcccatgccagcctgttgtacctgccaccggtcgaccagctgctggtgcgctacaagtttcatcaggacctggcggccggtcgcctgcttgcgcagctgatgcaacgcacacctccgccctggtcgtgcccgccattggtaccggtgccgctgcacaaccgccgcctgcgccagcgcggctacaatcaggccgccgagctgtgccggttgctgccaatgccggtctggcacggtgtgtaccggcgccgccacaccgcgccgcaatccgaacgcagcgccgaacagcgcagggagaatctgttcgatgcgttcgatgtgcgcgggccggtgccttcgcggctgaccgtggtcgatgacgtgatgaccaccggcagcacgctgatggagatcgccgaaacgctgcgctgcgtgggtgtggaagaagtgcgcgcgtgggtatgcgcgcgggtgccgtga

SEQ ID NO: 528477 - DNA, 465 bp, Stenotrophomonas maltophilia
gtggtgctgggcgcggcgatgatgctggccggatgcatgccgggtgccacgcccagtacgcgggtggaagcggaccgcccgccacttcccggtgtggatgtgcgcctgagcgcggtcgatgaggcgggcaagggcgtgccggtgaagtggcaggacgagacattgaccctgcgcgaacccccgcttgccagcagcgcagacatcgccgatgtgcgctcggtgctggatgacaatggtttcacggtgctgcagatccgctatcggcccgaagcacaacagcgcatccacgatggcacggcggcgatggtcggccagcgcatggcgatcagcgtggatggccgcgtgctgatggtggcgacggtgcagggaccgtttgctgaatcgatgaacctgagtgggttgaccggtagtgatgccgaggcactggagaaacacatcaccgggtctgtgccggtgaagccgtag

SEQ ID NO: 528478 - DNA, 1110 bp, Stenotrophomonas maltophilia; identical to SEQ ID NO: 528467

SEQ ID NO: 528479 - DNA, 1620 bp, Stenotrophomonas maltophilia
gtgggtgattcgcgcaccaatctccccaatcaggcaccccccgtcaccctgcagcagcttcgcgaagcgctcgccttcatcagcgagcagtacaggagtgctgtcgacggcggcaagaacgtcttcgcatggctgtgggagtcgatccagggggacttcaaccaggagcgcagcaccgggcaggtcgtattcgacaccgccatttcaatgatccccggcgtggaccaggtctgcgacgtccgagacatcattgccaactgcaagcagatcaacgacgacaagagcaattcctgggcctggatcgcgctggtcctgaccctgatcggcctgatccccacgctgggctcgctgttgaagggtgtattgaagatcttcttcctcttcatccgccgcttcggcttgaaccatcttgtgcgcgctgtggatgaggccatgagctgggtcatcacgctcctgcgccgacgtgaagtcgcccaatactggaaagcgctgcgctgggaccgcgtgttccatgagctggcgaagcagacccgcatcgtgcgtgcacgggtgacccaggcacagctgttgaaagccttcgatcgcgccgtgctgctgatgcgtagcctgctgggcaaggtggccgacatcccgatggtggggcgccgtgcccaggagaccatcgacctcgtcgttggcatccggaagatcgcagacaactacatcggaaaagtactggcgcccgtacagcgcatccttgacacgatcatcaagcgccttgaattcgaagacatggtgcagcggcgcggcatcgtcaacgccggcaatttccatttcaccggaacgctgcccgaggcacatgccgtcacgttgatgcggcggattgatccgccgccttcgtggcttgggagggggaggccgacgaagaacaagccgctcgatccctccgaccatcgtgaacatgtcgacaaaatggcagagagcggcttcccgaagcttagcgatgaccagatcaaaagcttcacccaaggcatgtgcaccgatacgatcaagggacctgcaaagctgtatcgcgtggtctcaccggcgaacttcagtgccggcgcggactgggttactgaagaagtcttcaatacgatcatgaagtcagccgacccgagggccacctggcgaaagcatctggccgtctggcctgactggaaccccaatggacagttcgtcgtctatgagctcaaggcaggagaagaactgaaggtatggcgcggcccggcctctgcccagaagaaagacactctgcccgatcaccaccttgaaggcggctacgagcagatcaagttcgatgccgcatttgaatacgacgctgccggcaaaccgggaaagagggcgttggccgatagttcggagtactacgcggtcaatgaggcaaccggcgccatgaccaggagcagcatgacctatgacaaatggaagctgcttcctccgcatgagcaggtgaaatacgtcagcctgcggaccaagatcaacaacccccgcattctcggcccgatggacaccggctgggggacaagcgactttggtactcaaatgaatgatgtaaagctgggtctgccgaacatctccggccagaaaatgaaccgctga

SEQ ID NO: 528480 - DNA, 315 bp, Stenotrophomonas maltophilia
atgggcggggagcacgctgtcccgttcatccctccgcttcctggagggcttcagcgcattcccgactggatcgcgttggactaccgcgatgtggaaacacaacaggccatggcaggcactccttacgaaatccacttcaggaacggctcggtcatcaagggaaagctggatgttgccggcaaggcccaccatgagcccatcccgaagcaggaggtagagaaggtcgtctatgaaccccgcagcgctgatacggaagacaactggcccgacctcgagctgatcgccaaccctcaacagggtgcgggccgtgggtga

SEQ ID NO: 528481 - DNA, 384 bp, Stenotrophomonas maltophilia
atgaccgattcagtcgttgtcgatttcttccatgaacccgagttccagaacaagctcggcggtgaaaggccgcgggtggagctgattcgcgagcagctggccaactacgtcgacggttaccagttgggcaagaactcccaacctccgcgcatcgtgctgcaggcgagcgatctcaagcactgcgtgcggcgaatcctcgcccgcatgcagaagccgcaccgcgaccgagcaaaggccgactgggaggaacggcgtaaggccggctcgcctgagctgtggcgcgatgccaagcccgaacctctcatcgacgctgccctgacctggcgaggtatccccatcgaaggcatgggctacagccgtcaccgcgcgatcgacaagcactga

SEQ ID NO: 528482 - DNA, 1041 bp, Stenotrophomonas maltophilia
atgagcaacgacaagacaaccctggcggacgcgcagcccggtgggagggtgaggctgggggatgggccgaccatcgagatgcgggcgcgggagctgctggctgcggagctgcgcgccaaggggcggctgacactggctgatgatgttgcttcgggtgaagaggatgactccgctgccatccgcgccatctccgccgccctctccgcccagccatccccgtgtgaaactctcccgcccgacatgcgtctcggctcggccgattacctcgactatctcgacagcaagccttccccgagtggtcagggggatacccgacacgtgctggtcaacgccgcacatttggagcgcgttctggtatgcgctgagggcaaccacttcgatgactgcatggcggaccggaccacgaccattacgcgggcaatcgagcagatgcgagaagccctcgccgcccgccagccggtaggcgaccagcacccggacgacctggccgttgacgccttcgccgccaccatgaaggccaagatggccgcagctcgcgcaaagggccgtggtggctgggaagaccccgcgcagtgcaccgccgatgacctgagccgcatgctgcgcgaccacgtggacaagggcgacccgcgcgacgtggccaacttctgcatgatgctgcaccagcgcggtgagagcatcgccgcccgccagccggtggggcaggagccggacgcctaccttgtgcaagcggtggtgggcgacgaaacctgggagcaccggtggtacgtccctcgcttcggcgaccctgatccgtccgcgttggatggcaccgtctaccggattcgcgggaaggagcaccctgagctgggcagataccgcgtcaatccattctacgccgccccgccctcgcaggccgtggacctgcggcagttccgggatgtggtggccgattggcgtgaccggtgctgccgtgctgcggacaaggacacgatcctcaacatggcgaaggccgaccacctgctggccctcatcgacagccaggcggtgggcaatggctaa

SEQ ID NO: 528483 - DNA, 210 bp, Stenotrophomonas maltophilia
atgagccgcgtcacctggggcgtgtgcaccaaggaacggaccgtctcggtgttctgcagcgcatgccgcgcagtgttcaaactgcacgcaccgatggtcgaggctctggagctgaagatgacagccgaggccagccatgtgtgccccggcacgccgatgccggtggctgctgatctgttcggattcccgttggagcaggcccatggctga

SEQ ID NO: 528484 - DNA, 225 bp, Stenotrophomonas maltophilia
atggctgaccagctgctcaccgctgcacctgtccgcaacgtcaccagcgcgaagtttgtcgcctctcccggggccagcgtcctgactggacgtttccagtgcctcctgtcctgcggccacatcgtcattcgccagggtgagcacgtccgcgggactaggttctctctgcgcgctccccacaccgctccctgcaaccagtgcccgaaggaaatcaccaatggctga

SEQ ID NO: 528485 - DNA, 585 bp, Stenotrophomonas maltophilia
atgaccgcagcattgcccgtttccccggccaccgttgtcgaggccaccaaggcatcgtcgcctgtcgccgcggtcgtctccgctatgcgccgcgtggatcctgccggcggcgccgttgccgcagatcaggtgcgcgcatgggccgacaccctgatgaccgccctctactccgcgcagcctgtccgctgggaataccggctaaaggacgacttcaagccgggttgctgggcccaggccgatgcagggcacgtgtatgccgcccaccagcgtggcctcgttgtccgtgccctgttcgagacaccgcgggtcgtccaaccggagaagctgcacgagttccgggagcgtgtgtgcgtccgctgcggcgacagcgaggattgggccgggccggattgtgagccgctgatccagaaagtcgacccgcgcaccctgctccccttcgatcccagctggctcatccagccactgcagtggctcatcgatgcgccggcccacctcaacacctacgaccgccgccaccgcgcggcgcaagccgccttcctgctggaaaagctcgaagcccacatccaggagtgcaacaagccatga

SEQ ID NO: 528486 - DNA, 135 bp, Stenotrophomonas maltophilia
atggacctggcctttgatgcagtggtgccggtgaaaggcactacggcacgtttcccgctcaatcccgatcacgcccgaatagttactatatccaacggattcagtagcttgcgcgcgctgtgcaaatcgctctaa

SEQ ID NO: 528487 - DNA, 1827 bp, Stenotrophomonas maltophilia
atgctcattccaggcttcacggcgggcgcgcaggcgccggccgagctgcatacccgttggtcgccgtggcgtgcgctgctgggcgcgctggccccgcagcagcgcacccgcaccgagccggcggcgacccaccgcgccgagctcgaagcccaggttgcggcgttgcaccgcgtgcaggcggtcatcgagttcgcactcgacggcaccatcctgcaggccaatgacaacttcctgcaggcgatgggctacaggctggatgagatccagggcaagcaccattcgctgttcgtcgatcccgaactggcacgcagcgcggaataccgtgatttctgggcgaggctcgggcgcggcgagtacgatgccgggcagtaccgtcgctttggcaagggccagcgcgagatctggatccaggcgtcgtacaacccggtgcttgaccagcaggggcggccgtacaaggtggtcaagttcgccaccgacatcacggcgcagaagctgcaggcggccgattccgcggggcagctggcggcgattgcaaagtcgcaggcggtgatcgagttcagcatggatggccgcatcctctcggccaacgacaacttcctcgccaccaccggctacagccttgatgaggtgcgtggccagcatcattcgctgttcgtcgagccggggcatcgcagcagcgatgaataccgccagttctgggaaaagctcgggcacggcgaatacgatgccgggcagtaccgccgcctcggcaagggcgggcgcgaagtctggatccaggcttcctacaatccgatcctcgacctcaacggcaagccgttcaaggtcgtcaagtacgccaccgacatcaccgcgcaggtccatgagaaccaggcgatgcagcgtgcggttgcgcagacccgcgaggtggtggccgcagccaagcagggcgatctgacccggcgcgtggccacggccgacaagcagggtgcgatcgccgaactgtgcgacggcgtgaactcactggtcgaagcgatggccgcgatcatcggccagatcaagttcgccgccgataccatcgcggtcggtgcgaccgagatcgcccagggcaacagcgacctgtcgcagcgcaccgagcaacaggcggcgtcgctggaggaaaccgcggtgtcgatgaaggggctggccgagacggtgcagcgcaccgccaccaacgcgcgccaggccagccagctggccggtggggcggccgatgtcgccgcacggggcggcagcgtggtgcacgaggtggtggagacgatggcggtgatcaatgcatcttcgcggcgcatcgtcgacatcatcggcgtgatcgatggcatcgccttccagaccaacatcctcgcactgaatgccgcggtggaggctgcgcgtgccggcgaacatggccgcggcttcgcggtggtcgccaccgagatccgcgagctgtcgcagcgctcggccagcgccgccaaggagatcaagcagctgatcgatgagtcggtggccaacgtcggggccggtaccgcccaggtcgagagtgccggccgcaccatggacgagatcgtgagcaacgtgcgccgggtcagcgatctgatgaccgagatcagcaccgcctcgcaacagcagagcgatgacatccagcagatgaaccatgcggtggacctgatcgaccagggcacccagcagaacgcggccctggtcgaagaggcttcggctgccgcgcgcagcatggaggagcagtcggcgcacctgttgcagaccgtggccagcttccgtgtccaggaaggtgctgggcatgcgcatggggtaccggcgctgcgcgcggtctag

SEQ ID NO: 528488 - DNA, 930 bp, Stenotrophomonas maltophilia
atgtcggttgaatcgttgtgcgaacagctgatcggtatcgatcgcagcagcgcagggcaatgccacctgctgatgcagccagcggtagagcgatgcgagatggacgaggctttcgatgcgctgctggactcggctgggatccaacccgttccgatcaccattcggcagataccggcagccatgtggccttccctgatcccgctcgacctgagcagaggcatgcattccctgctgtccggccaggcgatggcaatggcgatggagcagcgctccgtgacgtcgttactgaccgggcgcccgcaacgcgcgtgtgcctggctttggacgccattgctgccccggcatctgtccaaccagcttgccgcgcaagcgatcgctcactgcccgcacgcccaaggtcgaaagcggtggctacgctactacgatcccatggtgacggacctgttcctgcacacctcatcgcgttcgcaacgggcgtatcggtttgcgggcgccacaacgtggacattcctggatcgctgggggcaattgaccatcaacaacatggtcgcgcccgcgctgcccggcgacccgaccgtctcctggtcggaggtggaatgcatcggcgcattgaaccaggcctggatcggagcgctgcagaccggcgatctgcccgaccgttcgaccttcgcacacgtacaacgttgtgtagaggaagcgcaccgtcgcggcgtggccaatggacatgagctcgatctattcgcaaagcatgcgatctcctttggccctcatttccaccgccatcccatccttcaggcgctgctggcgcaggtggagcagggcgaacggtacgacgaactggcatggcgcattgaagacgcggagtggcaggacatacgcgcggcggcgtcgggacacgccgctgagaccaagggagggttgtacacatga

SEQ ID NO: 528489 - DNA, 750 bp, Stenotrophomonas maltophilia
atgaagattaacgtagatgtgtcgactgagaacggcccgcttgatttggaaatcggcatcgtgtccgacctgcgggttaagcacgttgtggaaaaggtattctggcgagaaggcgatcgaacaggcatggcggccactggcgccattgccgccgcaatggggcttagcgggcctgcagccgggatggcgatgatgtcagctgaggaaatggctgagccggttaccagagtggagttccgactaggcgaaatccaagtggaagggttgctttggaactggccattcagtgagggcgatcgagtaaagattgttggaagcaggatcgagggtggaaggttctttgctttgtcagtgctggatgaagataagagattgattgtgttgtacccccatgtgagctctggaagttgggcgcactggatcggtgttatgaagtacacgctgatgctgtcgttgccaatttcaatcttatctactgttgcaatcgggctagggtctctcgaattcatgagggatggctggatatttgtgcgatcgttactatcgatatttggcggccttatggtcgtttcgattttcgtggcattgcgcattggctggcgatttcggtgttacaccaagttggcagatgcgatatttgaatctcttggttgggctgatgggaagtatctgaatttaaggcgttccacaaaaatgaatgggggtggtggcgaccatgtggctctgggggatacctacttcaaatattga

SEQ ID NO: 528490 - DNA, 750 bp, Stenotrophomonas maltophilia
atgaaaactgaggtcgatgtgtcgtcagagaagaaatcgcttgatatcgaaatcggaatcatctccgatctgcgggtcaagcacgttgtggaaaatgtattctggcgggagggtgatccatcaggcatcgcggctacaggcgccattgccgccgcactggggctgagtggccctgcagctggaatggcgatgatgtctgctgaggaaatggctgagccagttaccagagtggagttccggcttggcgaaacccaagtggaagggttgctttggaattggccattcagtgaaggagatcgagtaaaaatcgttggaagcaggggcgataataaaaaattctttgctctgtcagtgctggatgaggataagagactgatcgtgtcatacccccatattagctctgggagtggcgcgcactggatcggcgtcttgaaatacacgcttatattcgcattgcctagtgctgcactatttactctctcgatcggagtggcgtcgattgacgaagcgccgttggactggttctttctgaaatggttgatatacacattttctggttgcatttttgtttcttgcataattggagctgggatcggttctcgctttgcgcgttatacaagaatggctgactcaattttcaagtctcttggttgggtcaacggaaaatatatcaatttaagacgtatcacgaagttgaataagagtgtggatgaccatcctgctttgggtgatacgtacttcaggtactga

SEQ ID NO: 528491 - DNA, 237 bp, Stenotrophomonas maltophilia
atgagcctgctggcctggatcgggatgttcgccgcctggagcctgctcgccacctgggtgctgcgctggggtggcgcggcctggatggaaggctggaagtcactggccttcgtcgacagctggggcagcctgtgggacgaagcgcagatcaagctgtacttcctctgcctgtggatcgtctacggcctgtggttcctggccggcctgttcgtgccggagtggcgcggccttccgtaa

SEQ ID NO: 528492 - DNA, 702 bp, Stenotrophomonas maltophilia
atgaaacttgagcagatcagtctgcgcaccggcttcctgctagcgttggcgggttgggcgccggcgctgccagccttggccgccgagcgcatggccagcgcagacagctacagcgcgatcggcgaacgcccgctgttcgccgaagaccgcaagccgcggccctacctgctcggtggcagcgagccggccgccagcgcggccctgcgcctgaccggcgtgctgttgaccggcaatttcagcatggccaccttcaccaccgaacagaaccgctcggtgcggctgcgcctcaacggtgacgccgtggatggctggcagctggtggcgctggaaccgcgcagggccacggtgatcggccccggtggcagccaggtgctggagctggccgtgttcaacggccagggcggtgaaccacccaccgtactgcgtggcgccaacggtgcgccgccggccggtgcgatcgtggtaccgccgccggccggtgccccgcccgcgccgcccccggctgcggcaagtgcgcagccagcgccacagccggccgtcaacgtgccgccaacggccgctacaccgcctgccaacaacaacggccccagcgaagcgcagatgcaggccatccgcgaacgcatccaggcccgtcgccgccagctgcagcaacaacagcagcaacaaccgtcgccgcccccaggcgatggcaccaaccgatag

SEQ ID NO: 528493 - DNA, 936 bp, Stenotrophomonas maltophilia
atgctgcttgaagcggaactgcagcagttcgtcgacgccgttgccgcgcatccgctgccggatgatctgcgagcgctgcgcgcgatcagcgagagcacactgccgcaactgcagggagcgccacaggcggtcgcacacgtgatcgaacacacattgaccacgcgcgacggtcatgccctggagctacgcctgtacacaccggatgggctgcccgatggaccggcacccgccctgctgttcgcccacggtggtggctggttccagtgttcgctggcggtctatgacggcccctgccgcgccttggccaatagcagtggctgcgtgatcgtcgccgtcggctatcggctcgcgccggaacactccttcccggttccgctgcatgacgttgccgacgcctggcagtggctgcaggccaatgccgggcgcctgggactggacccgcaacggctggcggtcggtggcgacagcgctggcggcaatctggcagccgcatgctgcctgctgctgcgcgatctcggcctgccgcagccgcatcaccagctgctgctgtacccggcactggatgccggcatgggcagcgactcctaccgcgagtacgccaccggcttctacctcagcgccgagttgatgcaacgctgctggcaggtctacctgggcgatctgggcgacctggatgcgccgccggcactggcctcgccggcccacgcggcggatctgcaggggctggccccggcctcggtgctcagctgcgagcacgacccgctgcgtgacgaggccgagcagtacgcgcggcgcctgcaagctgcgggcgtcgactgcacgctggaaaggctgcccggaatgatccatgcctgcgtccatcttggcggagtggctgcctccacccgggtggcagcgcagcgcgcgggcgtgatgctgcgccgggcgctgtcctga

SEQ ID NO: 528494 - DNA, 444 bp, Stenotrophomonas maltophilia
atggggcggagctgggtgttgtggtggaacggccgccagatcgccaatgtcagcctcagcaaggacggcggcgcgcgcgtccgcctcgacgcaaggaagatgtggcaggtcaaggaagcacgggctgccagcattgcccagggcaggcgctacgccgagcgctggtgcgcggccaggctgtacccggagatgcgccttcgcgcggctgttgcccgactgctggacaccacgccggccgaaccgctcgaaccgctgcccggtctgccaccgactcgagagcagcagcaacaggccatgcgcctggctgaggcaacgaccaccgccacggcgcgggtcaaggaggcgttggagccggccaagccgccagcgacgaagccccgcccgaaggacgcccgaaaggcgtgggtgagggcagggctgcagcagctgcgtcgcggcgtgtag

SEQ ID NO: 528495 - DNA, 666 bp, Stenotrophomonas maltophilia
atgtgcggccgattcgtccagctccccgtgatcgacttcggccagccggggctggctgaccttgcccacggcctggccgagatccagcccagctacaacctggcgccgacgcagcgcgcgtcggtgatcctggatcgcggcgaaggccggcaggtgacccgcctggcatggggcctgctgccgttctgggccaaggccaagggcctgcagggatcgacgatcaacgcccgcattgagacggtggccacgaagccggcattccggtcggcgttcaagaagcgccggtgcgtgatcccgatggccggctactacgagtggtcggtcagccccgaggacgggaagaaggatccgtggttcatccacgccaccgggccgctgctggccgccggcctatgggaggacaccagcccgctgctggccgacggcaacttgggcaccttcaccatcatcaccggcgacagcagcggcgtatcggccgacatccacgaccgcatgcctgtctggctgcgggccggccagatcgatgattggatgggcgccagcccggacgacgccatggcaatgctgctggccaacgagccgccgggcatggaggcctaccgcgtcagccgctcggtcaacacgccgcggaacaaccgcgaagatctgctgcaggcagttgcgtaa

SEQ ID NO: 528496 - DNA, 318 bp, Stenotrophomonas maltophilia
atgctggcgacccggatcgatgtgcaatgggacttccgggccaatgacggcccggtgctgttcttcttcgatcgcgtggactggaacccgggcactggtcaggtcaacacccggagctatgaccgcacggtgcgcgctccgatccgcgacctgctggcgggcgagtacaccttcgcccatccgctgaccggcgagcagatcaccgagcctggctggaagctgatggcgctgatcaaggccgcgacggatcgcgtgtggcaagcggagaacccgccggcaccggagatcgtcgcgccactggcgagcggtggggattga

SEQ ID NO: 528497 - DNA, 708 bp, Stenotrophomonas maltophilia
atgaagcaatccgtgaacccgcccgcacgcaagcggatccgcctgaagcccgaagtccggtcgcaacggattctcgacgccgcgctgatccagttctcgcggcatggcttcgccgcgagccggatcgaggacatcgcgcgcggcgccggactgtccaaggctggtgtctatgcgcacttcaccggcaaggaggagatcttcgaggcgctgctggcccggacactgaccccaccggtgtctacgctcgcgctcgtctcggtgctggaaggtgatctcgcgcccgagtcgatccgcgagcgcgtcgagcagttcatcgacgtcttctatgcgccgctgaccgatccggactttgtcgccatgctgcgcctgctgatcgccgaaagcgtgcgcgccccgcacctgatcgaggcttggcggcaggacatcttcctgccgtacctgcagcaggaggagcgggcggcggcggcgctggagaacggacggatcccgcgcaatgcattgaccgagaatttcgccacgctcgcctactcgccgggcgcgcatgcgatcctcaagctgatgctcggcgagggccagggcgaggtcgcggccatgaagcagatgcacaggcgcatgctgctggaatggctgcagatcgatccggtggcgagaccggatgccgccggaagaggcaccaatccacccgaaggcgacgatgcgagcggctga

SEQ ID NO: 528498 - DNA, 1083 bp, Stenotrophomonas maltophilia
atgccgccggaagaggcaccaatccacccgaaggcgacgatgcgagcggctgagcaggggcgcggcccggtccggaggcgccccgtcctggtctggttggccgcactgtgcgtggtctgcgcaagcctgtggggcgcattgctactgtggttccaggggccgggtacggacgggctgcgcatcgcgctcgccgccgcgtggtgcctgctcgggctgggcgcggccgtctgcctggcgggccgtggaccgcgcctgccggcactggcctggttgctgtgcctgctggcgctggtaggcggatggtcgacgctgcggccctcgcacgaacgcgactgggccgacgacgtcgcacagttgctgcaggccgagatcgacggcaaccggctcacccttcgcaacgtgcgcaatttcgactggcacagcgaagacgactacaccgtgcgctgggaaacccgcgagtacgacctcgaccgcttggccgacgccgacctggtcctgtcgtactggatgggtccgcacatcgcccacaccctggtctcgttcggcttcgacgacggccgccggctggtgttctcgctggagatccgcaaggagcgcggcgaggcgttctccgccctcggcggcttcttccgcgagttcgagagcgtgctgatcgccgccgacgagaacgacatcgtgcgcacccgcagcaatgcccgcggcgaggatgtctacctgtaccggctcgacgtgccgcgcgcggcgctgcggcagctgttcctcggctatctcgacgaggcccgccgcatccgcgaccggccgcgcttctacaacaccctgaccagcaactgcaccaccgtcgtgttcgacctggcccgacaggtgtcgcccggcctgccgctcgactaccggctgctgctgtccgggcatttcgccgaatacgtcggcgagcgcggcggcctgctgcccggctacggctatcccgaactgcagcgcgccggccgcatcagcgaacgcgcgcgcgccttcgacggcccgccacaggacttcccgcacgcgatccgcgccggcatgccgctcaccgcaaggaacgccccgccatga

SEQ ID NO: 528499 - DNA, 1977 bp, Stenotrophomonas maltophilia
atgaccgcgacccggcgcctgctggccgcctgcctgctgctgccgctgctcgccggctgcgcgatcctgcgcgagttcagcccggcggtggtgatggagccgatgtcgcccggcgagtacatcgccctgcagcgcggcgacatcctgaccagcggcaggctcagcgcgctgaccgcgcagagcatccgggtctcggggctggacgtggacggttgcgcgagctcgacgggcgcctgcgtcgacgcgatggacagggccgccggcgtggccgacgagcgccggctgtcggcgctggccgaactgtggctgcagcaggcgatggcgctggaccgcgccggcagcgaggcggacgcgcgcctgcgggcctggatggaagtggcgcggcatgcctacgcctacctgttcttcaccgggcgcacgcccggcgaacgcgtgttcgaggaccgccagacccaggtccgcgactggtacaactacgccgtgcaggaggcaatcgcgctgctgttcgaggagagccggcgcatccgcgacgatggcgccccacaggcagaggtcttcgagcgcgccggctggaccttccgcatcgacctcgccggtatccgcatgccggagggcgtgcacatgccgcaggaactgctgccggccgcatcgctgtcgttccagggcctgcgcagcacctggcggcgcgacggcttcggcgccgaactggtggcggtgatggtcgacgatccggtcgcggcggcgccggaaccgcggcccgatgccggggatgcgccgcgccgtccaccgggctggagcgaaatgccctcccccggcatgaccgtcctgttccgcttcgacggcgacggcctggacgcggtgctggcggcgcgcgaggtgctcgtgagcgcgcacgacccctacgacgaggacgacattgtgctgtacggccagcggctgccgctggcggccaacttcaccgccggctacggtctgtggctggcgcgctcggggttcaaccggcagtcgctgcggaccctgttcgggcgcggcaacggcatcgaccgtccgcacctgtacatgatgcagccctacgatccgcagcggcggatcatcctgatgctgcacggcctggccagcagcccggaggcctgggtcaacgtcgccaacgagatccagggcgacgacgacctgcgccgccattaccagatctggcaggtctactacccgaccaacgccccgatcgtgctcaaccatgccgcgatccggcgcctgctggcgcgcacccgccagcatttcgatccgcggggcgaggcgccggcgttcgaggacatggtgctggtcggccacagcatgggcggggtgatcggacggctgatggtgtccagcgccgacgaccagttatgggcatgggccgaggcggaacatgccgacgaactggaacggctgcgggcgctgcgcccgcggatggagcgggtgctgcggttcgagccggtgccgggcatcgggcgcgcggtgttcatcgccagcccgcaccgcggcactgatgtcgccggcggccgcctcgggcgctggatctcgcgcatggtgcggttgccgttgacgctgctggagggattcggcgacgccctgctcggcgaggtcgacgtggaatcggcaatcgcccgcggcggcgggacgatgcccaacagcatcgacaacctggatgctcgcgatccgttcgtgcgcgcggcggccgacctgccgatctcgccgcggctgcgctaccactcgatcgtcgccaggctcgatcccgacggcccgctggagcgttccggcgacggcctggtgccctaccccagcgcccacctgcccggcgcgctgtccgaagtcgtgatcacctcaggccacagcgtgcaggaaaccccggcggcgatcctcgaactgcgccgcatcctgcatctggacctgcgggaacacgcggcggcctcgcgcgatgccgcgcaggacagcccttga

SEQ ID NO: 528500 - DNA, 1254 bp, Stenotrophomonas maltophilia
atgccactccccgccatcgtgcaggagcacgtgctccgcggcaacgacgcgatgacggtcgatgccttcgtcagcttcaccctcgcgatcctgctgctgttcgtcggcaaggggctgtcggcgcgaatcggcgtgctgcgccgctacggcatccccgaaccggtggtcggcggcgtgctgtgcgcggcggtggtctgcgcgctgtactacggcatcggcctgcgggtggatttcgggctcggcgcgcgcgacctgctgctgctgtatttctttgccgcgctgggcctgaactccaacgtgcgcgcgctcgccagcggtggccgcctgctggtactgctggcggtgctggcctcgctgttcatgctgctgcagaacgggctcggcatggccatggccggactgttcggcatggatccgcgcgcgggcctgatggtcggctcggtctcgctgaccggcggcgtcggcaccaccctggcctggaccccgcacttcaccgaaaccctcggcattgccggtgccagcgaactcggcctggccgccaacatgatcggcctggtcgccgcctgcgtcatcggcggcccgatcgccggctggttgatccgccgccatccggtcatgccctcggccagtgccgaactggaggtgggcaccctgtatggcgacgattcgcgccagaccctggactaccacgcgctgctgctggcgctgttctggctcaacctggcgctgatgctgggccagggcatcggcagcctgatcgcccgcgccggcgtgaacctgccggatttcgtcggctgcctgctggcgggcatcgtgctgcgcgcgctcggcgacctgttcgcgcccaacggcaagcgcatgtggcaataccggcagatgcagccgggcctggcgctgatctcggacatctgcctcggcctgttcctgaccatggcgctgatgggcctgcagttctgggtactgcagccgatgctggccttcatcaccgtgaccatggccctgcagatcacgatggtggtggtgttcaccgtgttcgtggtgttccgcgcgatgggacgcgattacgaggcggtggtgatgtgctcggccttcggcggcatcaccctcggctcgaccgccaccgccgtggccaacatgagcgcggtcacccgcgagtacggcgccgcgcccagggccttcctgatcgtgccgctggtgtgcggcttcttcatcgacctggtcaacgcgctggtgatcgggctgatggcgggctga

SEQ ID NO: 528501 - DNA, 282 bp, Stenotrophomonas maltophilia
atgctgcatgttcgtgtcgatgaacgactgaaagcggaagcgacggaaaccctggccaacgtcggcctgacggtttccgatgcggtgcgcatcctgctgacgcgcgtcaccaaggaaggcggcatgccggcgggtcttgtcgccgacccgcaagtgcacgacgcatggttccgtgacaaggttcaggaagccttggccgacgctcgcccggccgtcccgcatcaacaggtcatggatgaagcccaggccctgatcgacagaaaacgccgtgcccgttcttga

SEQ ID NO: 528502 - DNA, 486 bp, Stenotrophomonas maltophilia
atgcgcctccactggtccggatggtcaagctcatcggtgcccgcacgggatgaatcgagaacgatcgactgcctgatcccgtctgcaaacctcctgcactcgttgctgtcgcagccgatcaccgtgatgaagctgcagctcgcgcgctggccggtcgatgacgacgctccggccaagccgttgcccgtactgaccaacgcctcgacgcatgaccacgccgggttcgagctttactacctgccgctggacatctgcccggtggaagacacctacatgggcatcctcgagctggtcgaaaccatcgacacgccgccgctgcaccggatgctctggcggatcttccgcgagcgggaggtcgttgcccgtttctggacgatgccggcatccgcgcgccaccaccacgccttccccggaggcttggcgatccacagcctcgagtggaccacccagagtttcatagacactcatcggccgctttgcgcgtag

SEQ ID NO: 528503 - DNA, 282 bp, Stenotrophomonas maltophilia
atgagcagcaagcgatacacggatgagttcagggccgaggcggtgaagcaggtgctcgagcggggcttcacggtggtggatgtggccgcgcgcatcgggatccccaagcacacgctgtacgactgggtgcagaaggcgaagaaggccgggaaggcagccgcaggctctgcgttggtggggaccgactcggcggagatacgccgcttcaaggccgagctccggcgcgtgaccgaggagcgcgacattctaaaaaaagccgccgcgtactttgccaaggggtaa

SEQ ID NO: 528504 - DNA, 1272 bp, Stenotrophomonas maltophilia
atgcatagcgtcgccgtgcctccgtcctccgtggacggcatcaagcgtctcgccaaaacactcaagcgcgagcgcttcattccccaccaccaagcccttgaagaagctgcgcgcattgccggcttcgagaacctgcgtcatgcgcagcgccaacttgaacgtggagttcgtccaaccctgcaccccgtttttctcactgcctactggcgtgagaagggtcgcggagggcgggaaaccctgcggatcgagctggcaaagcccttgctccagatcgtccgccggaaccagctaaacgccgtgcgccaacttgctggcttccggctcgacgcagatgaccatctcgagcgggagctcgacgttgagcgtcaggacgcagcccagctctatctgcatgccgccgccgatgccttgcggttcatggtcgccacggggctcgttcccgtgaccacccaggccatgcatcgcaagttgcgtttcttgcaggagatgccgggccgcgaccatccgagcgagtggctcgacccggcaagcgggtcgtggctctacatggacgagccctacgatcaccacggcccggaactgctggatcgccggcggttctggctgcgcgattcgaacgtgtccgtagtcgcgccggagtggaaaggcctctacgtccccgggcgctcggtcccgtatttcgtctccgccgatgcagcgctcctggcgcacctctcgcgccaagtagctaccttgtcgggagaagcaccgccacaaccctggaccggcgagtcggaccgttacggcacggctttcctgagcccggcgcgggaggccgcgggcctcaagccgcggcggcgtccgatgcccgcgtggcggggtgaggtacgtcgtggtgccacgccctacagcaggcccattggcggcgccgcctcgcggtggcgcccggcggtcgcgatgcccatcgaaatgcacctgaaggtggggccgttgctacacggtctgtgtaattcgaggctgcccaagcgcgtgcatgacgcgctcggtgtcgtacggtccgagctggacagctgggtgatggcggagtatccgggcgatgccatgagccaggagcagttcctggccatgtactacggcgagtatgtcggtcctatcgaaggtgccgccgcgcaactccggaccatctgcgaggtgtacgccctgctcaggcaaggatatgcggattgcccacccctgaactcgctgctcaagcacttggagaaggccaggatcgggctcgagaagtcgggctga

SEQ ID NO: 528505 - DNA, 861 bp, Stenotrophomonas maltophilia
atggtcgccgctagtccgacgcagacccgttccaccgtgccaggcaagcaatctgaaagacgagagccccgcagtatgacgacattctcgaccaggcatggcctctcccgccccgacgcggagatcaccatccgacaggacgcccccagcgaagtgcgggacgcgcttgccaccatcgcctatcaatgcggattcaggccaagcgctttgcgcgaagtattgtgccaaatcctgtaccgcgcgcccgacaggggaaactggtcggagttcccgaacatcgacgaagaggttcgaggcctgctggcggattgcgagtggtttgaggtctacgacttcgttgaagcgatcgcttcccgccttgcagggacatcggcgtcgttcggcgaagaggtcaaccgctacttccgggtggcaggggtcgggtggcagctcgtccatggccggctcgagatgcgcggtgccgaggtgttcgagcaggcgattcgccagggacagcaagagttgcatcgccaaggcaagctcacggcggccggcgaactgcacgaggccatccaggatctttcccgacgtccggttcccgagattacgggtgcgatacagcacgcaatggccgcgctcgagtgtgtggcgcgcgacgcctgtgcaagcaaagacaccttgggggacctgattcggcggaatccggatatcttccccaagccggtcgaccagatcgtcgacaaggcttggggctatacgtccaacttcggtcgtcacctgcaagagggaaaaccgccggagttcgaagaggccgagttgatggtgggcatcagcggcgtgctatgccgctatctcgccaggcgcacagccggccgcggctag

SEQ ID NO: 528506 - DNA, 258 bp, Stenotrophomonas maltophilia
atgcttcgcttcgacaaccagcgtcagcgaatcggtggcgaccaggaaatcaatctgacggccaccgatgtgaacattggcgaagatggtcgcccatccgccgatattcgaaaggtgctcgacgagcgtggccagcacgtcccgctccgacgcgtgctctatggcattgccgacatagagttcgatcgtggcggcgtccgtcatcttcattccatcctagccgcggccggctgtgcgcctggcgagatagcggcatag

SEQ ID NO: 528507 - DNA, 918 bp, Stenotrophomonas maltophilia
atgccccgcctgaccggcggtcgattccgcaatcgccagcttcaacgccttgtcaggctcgcttacgacgacacggctggcatcaatgagatctggacgaacaatgtcggtctgcgcgctcacgatcagccgcgcatggtagcgccgcgcagccgccgccaagctcctggtgagcaccagttgctcggccgcgggacattcgttgtatccgtccaggatcagcaccagcgggcggccgttcgcattggccgccgagatcaggcgagtcgccgagggtgcaccgagcaggccggcttcccgctcgatgctctcgcccagttttccggcgaagtacttcccctgcaggaatatcggaacgtggccatgctccaggcagtggatggcgattttctttgcgagcaaggttttcccgcagccggatggcccgagaatcagcaggtcgtcatcatcatgcgcaacgcggtctgccacgccagtcgcatcgagctcttctgccccgagctcatagcggtcactcttcagcgacccgacgtctggagcgtaggtacggaggaactccgacgcgtaggccgtcagcagctcttcctgttccagcaacttgggatcgcacgcggcgcccagcgtttgcacacgctgaagacggagctcctgcgcaaaggccgcccagtgctccctggaaagcagcagcccggaccgcttcgctgtgacgtccgcaagagcgtctgcgcctataatcgagaccttgaagtcggacgccggcacatccgattccgctggcaacgccggggcgaagacaacacaagcatccggatagccagtaagctcgccgtgaaacgcgcagagctggtccctcaacgcattctttgcctccaatgcctggccgtatgggtttccaacatttctccaaatgcctcctga

SEQ ID NO: 528508 - DNA, 144 bp, Stenotrophomonas maltophilia
atgggtggccgcgccgccagcctggccctgaggaaggggttcggccgggttgcacccggcacccgcagaggcaacggccagagcccaagcaacagcaacagcaacagcaacagcatacttactgagggaggcggggcggtgtag

SEQ ID NO: 528509 - DNA, 648 bp, Stenotrophomonas maltophilia
atgccggcgagcccggcggcgcggacttcggcacgcataccctggtgctggccgaccatagcaacgacaccaccgaactgggccgcgtgcgcttccatcgccgcgacgagagcgagcgcagcgacagcgtgcagcagtggtccaccgcgcaccgctggcggccgggcaaggtcgaacgtacgacctgggactaccgcaccctggagcgtcgccaggccagcgccgaggccgagcagggcaacgacctgggcattgtcgaccgtgatacctgcggcccgtatggctggcaggacaacgcacgcggccagcgccgcgcgcagcagcatctggacgcgctgcgcgtgcgcacccataccatcgacggcgccggccaatggcgggcattggcaccgggcgcgcgctttggcctgtcgcagcatccgcaggtgggcgaggacgcacagttcctgtgcctgtcggtgctgcaccaggcgcgcaacaacctcgatgccgacgtgttcgacgctctggaacagaccctgggtccgtccagcgtggcggtgccggcgctgccggatgcgctgtccgggctggcctacggccaggcgccgggcgaggtgtccaccgcgttctacgataaccgcttcgtcgccatccccgccgaagtga

SEQ ID NO: 528510 - DNA, 1638 bp, Stenotrophomonas maltophilia
gtggccagcgagcagcaggcacgcgccgatgctgactcggccttgggccagcgcctcgacagcaccagcgccgcgctggacggcaaggcgagcacggccagcgtgaatgcagtcgagcaggccagtgtcagtcgcgacagtgcattgggcgagcggatcaacacgaccaatgcggcgttggagggaaaggcgtcggctgcgggattgcagcagctggcaagccaggtcaacgacctcggggactcggtggaggccaacagttccgccatcacccacctttcggtggggatgaaccccacccctaacatgatgaggaacccgactttcgctgacccgtcgcagtggaacgcgggatggactgcttcagcggggacgttccaaggctacagcgcctgggacggctactacggtgtgatgcgtccgattgccaacgactaccgctacttcattcaggcgttcagcatcatcggtgcgcgaggtaagcagatcagtgcaggtgtggatgtgtaccgcaacggtactcagggcattgtcttcatgcgctttgagtactacgacgcaggcggcaacttcattcactcgaatgatcgcgttgacgtcgatccttccagcccgttgtccgtttggcttcgaatcgggttgaccggcactgtgccgttgaatgcgagtgaggtccgtgtggccatctactcgttcaacaccgaccagaacatgtcgttccgccgggtaaagctggaagttggtgctgtggcaacggcgttcagcgatgaatccacaaccgccctcacggccaatgcgatgcagtcgatgcaggtgcgggcgacgacgctggagaacggccaggcgactttgctcgccagttacacctgggcgctggacgtcaacggtcgggccattggcatgacgtcggtcaacaacggcaccatcggtcggatcgacttcgttgctgatcgattcggcatcgttgatcccaacaacactggtagcacaacgttcgaaggcggccgttggatcacccgttccggtgcctacatgatggtgcacggcaagccgttcggcgtgtccggagacctgatgatgtggttcggtgtgggttccaacccggccaatgccagcaaggcgaatgccctgttctggatcgacaaccagggcagtggctacttcggcggcagcctgtcggccggcgtgctcaagaacgccgtgcagaccacctcgaccaacggcaacgccgagatcatcaacgggccgttctcgaccctggggcgcgccaagaacgtcgtggtcagctacgacatgaccaagaccgacacggcgaacacggggcggtggaccggggtttccgggccggtgaacgccaccatcgcgatctatcgccgggtgggcaatggtgccgagcagttcatcaccaacttcaacgtcacgggcaactatgaggtgctgaacgagcagggtgggccgtcgcagctgacctcgcgcatggcgggctcgcacaccttcaccgacaacacccctggcaccgagcagttcacctaccgggccatcatcgtcacccgcaacgtggcaaccggcacggcgagcggcggtacggtcggtgtggtgatcaatcagacgctgggcatcatttccgtggagcaatga

SEQ ID NO: 528511 - DNA, 324 bp, Stenotrophomonas maltophilia
atgagtagaggatcgaagtattccccggaagtgcgtgagcgcgcggtgcgaatggtgctggagcaccaggacacgcacagttcgcagtgggcggcgatcgagtcgattgccggcaagatcggctgcacgtccgagtcgttgcgcaactgggtacggcgtgccgagcgtgatcagggcctgcggcctggcctgacgagcgaggagcaggcccggatcaaggcgctggaacgcgaagtgcgcgagctgcggcaggccaacgagatcctgcgcaaggcgtctgcgtattttgcccaggcggagctcgaccgccgattcaagccgtga

SEQ ID NO: 528512 - DNA, 894 bp, Stenotrophomonas maltophilia
gtgaaggcgttcatcgacacacaccgcgatgtctacggggtcgagccgatctgcaaggtgctgccgatcgccccgtcgacgtactacctgcatgcagcccgcagtgccgacccgctgaaggcctcggcacgtgcgcgacgcgatgcgcggttgctgccgcacatcgaacgggtctggcacgagaactggtgcgtctatggcgcgcagaagatctggcgtcagctgcggcgagagcgggagtacgtggcgcggtgcacggtcgagcgcctgatgcgcaagctcggcatcgccggcgttatccgcggcaaaccggtgcgcaccacggtgcccgatccggctcgcccgtgtccgcgtgacctggtgaaccggaaattccgcgccgaacgcccggaccagttgtgggtcagcgactacacctacgtttcgacctggcagggctttgcctacgtggccttcgtcatcgacgtgtacgcacgccggatcgtcggttggaagctgtcctcgcaccagcagacgcagttcgtgctcgacgcactcgagcaggcgttgcatgcacgtcgtccgcacgatcgccttgtgcaccacagcgatcgcggcacccagtatgtctcgatccgctataccgagcgcctcgccgaggcaggccttgaaccctctgtcggcagcgtgggtgacagttacgacaatgcattggccgagaccatcaacggcctgtacaaggccgaagtcgtgcatcgccgatcctggccgacccgcgaggcactcgaactggccacgctgcgttgggtcgactggttcaaccatcgccgcctgctggggccgatcggccacatcccgccagcggaagccgaacgcaactactatcaacaacgtgagtccgccaccacggcgtga

SEQ ID NO: 528513 - DNA, 270 bp, Stenotrophomonas maltophilia
gtgcacatcggcgaaagcgagccgttccatccagccagcctcttgaacgcagacgcgttcatcgactgggcgcagacgcagatgtacgacgaactgggcgaagcatcggaagacttcctgggctcggtcaccgccgagcagcagcaggaactgatcaacttcctggcggactggataggccgcgccgacgccggcagcaactactggaagatcgtcaacagctcgttccaccgcttcgccgactacggcctcagccaggacgccgagtga

SEQ ID NO: 528514 - DNA, 711 bp, Stenotrophomonas maltophilia
atgccccgcgatggccgaactgcgcaccacgccgctggccccggcgggaatcttctcgtggaacgcccatgcgcccagatgcaacgtggcaccagcagtgtccagtggattccagtgcacgcgcgtggcccaggtctggctgtcgttgtcggtgccggcgttgttgagatcgttgccggccaccgacaggctggcgtgccagccctttccgtacacccgctcggtcagctcgacaccgaacaggccgcgctgcggcagcatcaacgtgccgaccacgttgcgttcctggaacggcgtgttggaggtgctgctggagccatcgataccgcgatcgttcaagcggttgcccatcgtgagatcggccggcaggccgaacagggtgtggtccagcgtggcgtagaccgacttccaggccaccgcgttgtcggcgaagtcaccctccaccacccagcccagtgtgccgtagcgtccctcggcccccaggcgcaccgaacggacctcggtgcccgaaacgttgcgatcaccgaccgccgaaccgtccgtactggaggcatcgacgaacaggcggccgcggggacggaacaccgtagtgccgtcggcgctgctgaactcgggtgcgcccttggcccaggagaccttgggctgcctggactggccggattccagtgcggccacccgcgtttccagcgcgggcgcaggcggcgcggatag

SEQ ID NO: 528515 - DNA, 849 bp, Stenotrophomonas maltophilia
atgttcaaccctcagacctcgccggataccggcaatgccacttcttcgccggcatcgccggctggtcccttgcagctcgacttgctgggtggcccgacgaccgggaactgtggaccggcagcgccccgtgccagccgttttccgtcgcgggtaaaggaaaagcccaggatgacgatcggcacctgtggccccacttccttcgcctcatccgtgcccgacggcccgctgtcgtcatgggagagcaggttgcggcggcggttggcaagaactggctcgacggagtgtctgctgacctggaaggaatcgactacgcctgcagggcgaccgttgtcccggcttgtgccgtcgacgcgccccaccgccgggaccggctctggtttgtggcccactccggcagccagggactggcgcagcgagaaggcgacggacgagttctaccaggcgtgggcggcgagtccgaaggggaagacgctgcctatgacgatcgcgctcgctatgtgggcaacgccgacgtcgctggcgcctgcgaagaacggcaacaacgaagcgggcaactctgcggggctggtagcgatccgagcgcatgcaatggcggcaatgtggccgactgcaaccgcgacggatgcaagccgcggcatgttgccacccaggccgcaggacaccggcgttccattgaatcaggcagtagcgttggccactggagtgaatgcggatggctcatcggccacgacggaaaagcccggcgctttgaacccagcattcgtctgctggctcatggggttcccggccgcgtgggacgcctgcgcgcctatggcaatgccatcgtcccgcaagtcgcggcggaagtga

SEQ ID NO: 528516 - DNA, 837 bp, Stenotrophomonas maltophilia
atgaccaccgacaacaagaccctggcggacgagtgcaactgtccgaatggccgcgccgagcacttgccaacctgcgcatcgttgcgagcgaccctggcggacgtgcagcccggtgggagggtgaggctgggggatgggccctggccagagatcgacgccatcctggctgatgcatattccgcaggcgcggaaggtctgccgttcgaaggcatcgcccgccgcgcggccgtgcgcaaggcagtcgccgccctctccgcccagccctccccgggtggtcagggggattgtttgcgtcactcgccggaagattaccgggacgcacgcatgattcttgcccggaacatgaagcgggtagcggaaaagtacaacgtgccggacctcgccgccgatgctgatgttgtaaggagcggggaagaatatgacttctggatggacgccgctcacgaagcagtgcgcgaagccctcgccgcccgccagccggtggggcaggacgatcaagaatatctggagagtttggatcgcgccctggaaggtgtcatcgaccagcgcgaccgataccacgaaatcgccgacgacctcgccggccacatcgcagccattactggcgtggatatcggcgaacacagcagcgccaactgcccttggcagaacgccattgaggcggccgaagtgtaccggcccgcgcaggccgtggacctgcccaatgtgatcgaccagatcgcccagcagtgggacggatgcaactacgacgccgttggcgaaaccatcgacgttgggcaggcaatccgggcggcagggaaacggctgatcaacggcaaggcggtgggcaatggctga

SEQ ID NO: 528517 - DNA, 357 bp, Stenotrophomonas maltophilia
atgagtaagcacacgcaggggccgtggaagtggaagtccgatctggatatgggcggcttccatatctatatggacacggccatcagcaatcgcagcggctatcagtgccatcaccaccttgagttggatttcacgctctatcccgaagacggcgaccagtgggaagaagccaaggccaacgcccgcctgatcgccgcggcgccggagctgctcgatgcactaatcgaagcggtggagtgcggcatggttccgatcagtagcgccaaagacggcggcgcttcgacccattcgcgacaggttcgttgcgccgacatgatccgcgccgccatcgcgaaggccacgggcggtgcgcaatga

SEQ ID NO: 528518 - DNA, 204 bp, Stenotrophomonas maltophilia
atgaacccgtttgaccaactggacgcggccttcgctgaccagttttcagaccgcaatggcctgacgcctaagcaggagtggtgggctggctatagggcaggtaaaggctgtccgcctaatacgcctcgcacagaggccatcagttggccgaacccgccggattcgacccagaagcagcaaggagagcccgatgttcaggtatga

SEQ ID NO: 528519 - DNA, 723 bp, Stenotrophomonas maltophilia
atggagacggcacgaaaagctaagcccaccaagcgcgatgaggccgcagccgccaagttgaaggcggaatggaccgcgcgcgcccgggggctgggactcacccaagagaagatggccgacgaactggggatcacccagggcgccgtgagccagtacctcaatgggcggatcccgatgaactacaggacgctgaaggctttcagtgcggcccttggcatcgaggacacggacatccgcgacgatctgcccgagcagcagtacaactcccctaccccgttggacgatgactacacggacgtgaccggttactcccaggctgccgggctaggcgccggcgctgaggctgaggagtatgccgagacgcacagcctcaagttcaagaagaccagcctgcgccgccgcggcatctacaaccgccccttggccatctactacggcaagggcgattccatggagccgaccatcgaggacggcgacgccatcatgtttgatacctcagacacgcgggtgatggacggcgcgctctatgtcattcaagtggacggcatggccaggccggagtacttcgtgaagcgcgccatgctgctggatggtgcagtgttcttcacaagcgataacccccgcggtgaccatcagtggcagaagccaaagcgcatggactcgaagcgggagccgatcacggtcattggccgtgtccactggattggtggttgggctgattag

SEQ ID NO: 528520 - DNA, 303 bp, Stenotrophomonas maltophilia
atgcgttcatactttgccagcagtgccactattgacgaaaatatcagtggcacttatctttgcggcatggacatacccacctaccgaaaagagaagggcctgtctcaggcggcgttcgccgcgctgctgaccaagtcgggctcccccgccacccagagcctggtctcccaatgggagagcggtgacacatcgatcactgccgatcgtgcggtccagatcgagcgggcaacccggaaggcggtcagccgcagcgaccttcggcccgacctgttcgctccccgtcgccggcgcgccgccgcctga

SEQ ID NO: 528521 - DNA, 366 bp, Stenotrophomonas maltophilia
atgaaaagcctgcaaatcaccttcgaagacggccttacccgcagcaagacgctgcgggagcatatcgcctcccaggtctacagcggcgccggcgttacgacaatcgccggccgcctcgacatggctccttccaagctcagcgaaaagctggccgggtgcgacagcgggggcaagccgcgcggcctgtcgatcgatgacctggagcgctacatcgccgagacgcgcgatgtgtcgccggttcactacctgatcgagcgctacctgatctctccggaggcggccacggccgaggcgctggcagagctgcaacagcagctggccggcctgaccaacaccctcaacaagctgggggtccgctggccatga

SEQ ID NO: 528522 - DNA, 387 bp, Stenotrophomonas maltophilia
atgaacggccatttgtgggaatccgatcaccactactactgcaacttaggcaactaccacagcagcgaatgcggcgctgagtacaagtcatggcatgagttcatggagtctgagggcgactcagatatggactacagccttctgtttcgttgggattggcgagaaggccaggacaacgacttgccggacttcaatggcgacgtgtactaccgcaacgggtcgctggaactgttctacatggggcagcgaaaaggcctttatcgatacgtagaagtatcggtttgtcgagccgatgaggatgccatccgcgagtggctgatgccccgatgggagcatttgaagtctctgtggcagcctccccccgctccgccggaggaaaggtcatga

SEQ ID NO: 528523 - DNA, 492 bp, Stenotrophomonas maltophilia
atggacgcgatcgagaagcgggcgcgggagccaaacccgaacgtggccgtaatccacgaagccatgcagcacttccccgaaggaagttggatgcgcggcgctctggatcatgccgctgcggaattggccgttctccacgggcgttgtcagcgcaccgccctcacgccgcccgagggtgagcagttgagtgaatcagataaggatgttgcgcttgctcaggcggttgagcttgccgagtacgtcgagcgtcaggctaagggcgccatggtcgacgccgctaaacgattcctgtcgctgccgtatgcgcaagagctgggaaagcgcctcgcgccgcccgggggctacgttcctgagcgcagcgttctggtggctgcgacgcggcttcggaagttggccagtgcggctacaccgatggcgcgaccagcctacatcaaggctgccgagctgattgagttggcggtgatcgccgctcgcccggaggtgaagccgtga

SEQ ID NO: 528524 - DNA, 183 bp, Stenotrophomonas maltophilia
gtgaggcgccgctactccgtctactcgatcttcattctggatggtgaccggcgattggtcacgcgccactggtggcgttggacggcaacgctatgggcttgcgatctggctcgcatctggaacggcatctacgtgttcgaggtcgttgaagacagcgattcttctagcctggaggtgaagtga

SEQ ID NO: 528525 - DNA, 141 bp, Stenotrophomonas maltophilia
atgggcagctcactggaccgcgttctggcccagctttgcttcctcggccgctcgagagacgttgcccgcatcaggctgggggtgaccgtctctctagaccgcgccagggctcggttgcagcacctggagcgccgccgatga

SEQ ID NO: 528526 - DNA, 174 bp, Stenotrophomonas maltophilia
atgaatgagctgctcagcgtctttctccacgcgggattcttgaagcgtgtagtggctgagctcggggtcgattacgacagcctgcctgcgcagaacggtcagaagtactacgactgggttgggggcggcattcgctattgggatggctggcgggagatgccccttggccggtaa

SEQ ID NO: 528527 - DNA, 258 bp, Stenotrophomonas maltophilia
atggaaaaccagcaccgcaagatcaccggctaccgggaactgacgcaggccgaaatcgacctgatgaacgacatcaaggccaagggcgtggagttggacacgctggtcaagcgcctcgaagacaaccaggcgcgcgtcactgcagagcatggcagtggtgatgctgagccgttccggtggatctccattggcaagactcatttgcagcagggcctgatggcgctgacccgcgccgtggccaagccggagagcttctga

SEQ ID NO: 528528 - DNA, 1152 bp, Stenotrophomonas maltophilia
atgagcgttgaagcagacaccccggcaactgcgccggacaccaccccgaccgaccagccggccgacgtgatggcggcgctggatgccggcatcgctgctgctgatgctgaaacggcgcctgccgctgagcctgcgccggtcgaaacacctccggcagatgcagccacgccgccggcagacgacccggccgcagctccgcccgctgacggccagcccccggcccagccgcaggaaggtgcaccgccggccgatggtcagccgcccgctgccgctgaaggtgagcagcagccagatgccgacaccgaggcggagatcaccgcccttggcctgaaggagaagtccgccgaacggttccgcggcatggccgccgagatcaaggagctggcgccgctgcgcgaggcgatgaaggccgctggcatcgaggacgtggccaagttgcccgacgtggtcaagcgagccgaggcgggagatttcctgttcgaggagatcagcaagacggggaccagccccgagcaatacgggatggcactcgaataccttggcctgattgcgaaggccgggcggggcgacctggtggcagccgacaaggcctacaccacgatggctgctgagatggcagttctggcgaagatgctcggcaaggaagtcccgggtgtccacgacccgctcgccaaccaccaggatctgcgtgctgaggtcgaggctggcgacctgccgcgcgcccgtgccgtcgagatcgccggccagcgtgaccgcgccgcctatacgggcagcgtcgagcgccagcgcaccgagagccagcaggcggcagagcaggccgaacagcgcggcatcgactggctgaagcgcttcgacgccgagatggcacaggaagacccgagctatgcggccaagcgcccgcagctgagtgaggccgtccgtcagatccgcgagcagtaccacccgagcgaatgggctcagcgcaccgctctggcgtatgcccgcatccaggcaccggtggctgcggcagctccggcagcgcccgcggctccatcgcagccgcgccctggtccgatgcgtcctggcggtcccggcccggcgatggtgccgactaccttcgccagcccgatggacgcgctggagtacggcatccagcaggcgaacaacggctga

SEQ ID NO: 528529 - DNA, 972 bp, Stenotrophomonas maltophilia
atgagcagcaacactctcaacgccagcagcggtttcgccggttggttcaagatcgaagcgttccgcacggacgaggatggccaggagatccccggcagccgacgcatcgccgccgactggttcccgaacctgatcaccaacgccggcctggatctgctcggtaccactgactccaccgacgtgttcacgttctgccgcgtgggatcggggaacacagccccagctgtgaccgatacagcgcttgtttcacaggttgcggtcacctccagtgagcaggcaatcaccaacggagtagatcgttctggcgcgttctacgcgtggcggcgcaggaccttgcgatttgccaatggtgcagcagcaggaacgctggcagaggttggcgtttcgccgacgaatgctggcgcgttgttcagccgtgcgctcattctggactctggcggcagcccgaccacgatcactgtgctgtcggacgagacgctcgatgtgacctatgagcttcgtctgtatccggtgctgacggacgccaccggcacggtcgacatctcgggaacgacctacaactggaccgccaggccgctgatcccagcttcctacgacgtgttctggtcgacatacctcggtcgagggatcatcccgtactcagttgcgggtaatccggccaatggccccgctgttgcagcagcccttcccactcaggggagcgcactatcgagccctgtcgcgtccggcatcatcactgcgctggcgtacacgaatggcagctatcagcgctcattccggttcgactgcgacctcaacaatgccaacgtcgctggcggcatcgggtgcttctttgcgaccgctggaacgaccaaccttgaagcaaaaaccttcggcgtctgggcatggggcctgtccccgaagctgcctaagaccgcctcgttcaaggcgacgttcaccatccgcatgagctggggtcgctacacgccatga

SEQ ID NO: 528530 - DNA, 492 bp, Stenotrophomonas maltophilia
atgaagcacattaaggctgagcatgttcgcgaaaagtacgacttcgatgctgagaacggcgtcctgatcttccgcgccggcaagaagaagggtcttccttgcattgcctacaaccactgcggctacctgatggccgctgtgaaagttcagaacaagcactacaccgttctggtgcaccggcttatctggatgcacgttcatggcgagtggccgaatggcgaaatcgaccatatcaacggtgttcgcgacgacaaccgcctgagcaaccttcgaattactacccgtcgtggcaacatgcgcaacctgcatacgcccaagagcacgtctcgctgctcgtccatcggcgtgagctatcggccgaagactggtcagtacatcgccagaatccagacagataagggtcgcctttacttggggtgcttccgcaacgaagtggatgcagcaaacgcctatcaagtggccaagaagattcaccaccaggtggccgcatga

SEQ ID NO: 528531 - DNA, 1209 bp, Stenotrophomonas maltophilia
atggatccgtatctggcagggcagactctcggcagcctgtttggcgctaaggaccgcgcctacagcgctgagatggatcgccagcagaagctcgaagctgcaaaggctgaagctcgatacaagcgagcgcaggctgtcttggctgagggcaacgtatcccagcggggtgtcatgaacgaccctgcactggtggggcgctttctcgcgggagacactgatgctcggaacgagtacctgacggcggccacgctggcgaaccccaacgtcgacatcaagacgctaggggaagggctacaggtcctgtaccgacaggctgcccgagacaaggcggtgctgggtgacgcggataatccgaatgcggagctgttcggtgtcgcgaatgggccggtcgaaacgacgaagatctctgacggggtggcttacagccccctgggctcgtcgtctcagtcgctgaacgtaacgcctcttggcgaggccgcgatcgggcagcgtcgcgcgtctgctgcggccagctacgccagtgccgacaattcccgtgcctctgctgcccggacccggcaggcgatgagcctcgaccgcgccgatgtgcttggcggtggcggcggaaagcctgccagcaaggctccaagcggctaccgctgggccgcaaatggaaccttggaggccatccccggcggccccgccgacaagccgttggggagcggcgcaacggaagacgaacgcaaagccgctggctggctgggccaggcgacgcgggcgctctcgaacatggagcaggcgctctacaagaaggacgacaaaggcgccttcgtgctggacgcgcgtggacagcgcatcccaacgggagctgatacgcccgggttcatcgagacgtattcgtggagcccagagcttggcaatcgcagcatgagcccggatcggcagcgctattcgaacgctgcgtcgtcgctgtccgaagcgctgttgcgcgccgctaccggcgccggcgtcaacgagtccgaggcaaagcagaagatcgcagagttgaccccgcagcgcggtgattcggaggaagtgaagaagcagaagctggctggcgctgccggctacatcgaagacctgcgcgcccgagcaggtcgcgcgcttcccgctgcatcgcggaccctgggtgaccctccttcgggaggtattcgcaagcgctacaacccggctacggggagggttgaataa

SEQ ID NO: 528532 - DNA, 2718 bp, Stenotrophomonas maltophilia
atgccgatcgaagtcgaactgccggatggcagcatcgccgagtttcccgatggcatgtccgacgacgccatcagcagcgtgctgcggaagcagtttggaaccggtggccctccgatcaccgacctgcctgccgtccaggcactgccgccggacttctccggcgttgaggccacagtcgacagcacggccgacggccggcaggctgatggctggagggctggcatccagcgcgatctggcgttcggcgcgaggtcggttattcaaggcatcggcagcctccttggcgcggtcggcggcgatgcgctcggcgcgttggaaacgaaggtcaccggccggcctgtggccagcttccgcgacaacgctgcggcactcggcgacacgctcggcctgcccaaggcgcagaccagcggcgaccgggtgctcggcgacatcggcgaggcgctgaccggtacggggctgacgttgggcgctggtggcgcgctcggcgcgagccgtgccgtggctccgaccttggctcgtgttgcgcctgcgccacagcttgcgccgactctgggcgagcgggcggccgaggtgctgaccgcccagccggtgctgcaggcggtgagtgctgcaactggctcagcagcatccggcgcaacgcgcgagtcgggtgggggagctggtgcgcagatcgctgctggcttgctcggcggcctcggcccgtcgctggttacctccggcaccccggcggcactgcgtggcgcccttcgcggcggtgagtcaaaccggcagaacctagcccgcgccatcgatgacttcggagtgcttggcgctacgccgtcagtggggcagggcactggcgcatggtcgcggcagggcgccgagacgctactgggttctggcccgaccagcgcgggggtcatggcccgtttcgcggaccagcaggccaacgccatcggagctggcctgcagcgacaggctgatgacctgttccgcaatccgagcgccgagcgtgctggtcgcgcgatcgagcaaggtatccggggcgatgacggtttcatccaaaccacccgcgagcgcggcaaccagctctacaaccgcctggacgaactgctgccgcaggacgagcgcgtgggcatcgacaacgtgcgcgccgccttggccagcctcaacgaggagatcccgggcgctccgagcgtgtctcggttcttccagaacgcacgactggaaggcatcgagagcgcgttgtccaaggatgctggtggaatcgagggcgtcctgtcacgaccgggcatgcgagaccagatcgaccagatgcgagccgacctgaccaatcaggcccagcttcgccgcgccgagctggcgcaggaatccaacctgcagcgccagaacctcgtggctgaggcaggtgatcagcgcaatgcgctggtggccgagcaggaccggctacgcgagcgcatgaccagcatgatcgaggggcgccggaaccagctctatcaggaggccgacgagctgcagttggagctgcgcgcgcagcagcaggccgccattgccgagaatcagaggcgctcgatgtacccagagacgcgaaacagcctcgtgccggtgatgactgacgaggaaatcgcccgccaggtgccgacccgggccagcatcgacgcccgtctccccacgcaggctgacatcgaggcacagatgatgtcgcgcgcagatcttgatgcacaggtgatgtcgccgcaggagatcaaccagcgcgtcaccccggattcggccatcaatcagcagaacttcggcgccgattacgtcgagaagcagatcaacgactacctgaccagccaggtggacgggaaactgccctacgaggccctgcgcaagctgcgcacgctggtcggcggcgagctggaaaacacctcgctcgtgtcggacgtgccacggagcaagtggaaggccgtctatgcggccctgagccgggatatggaggccgcagcgaccacgcccgaggcaaaacaggcgctcgaccgggcgaatcgctacttcaacgcccgcgccaagcgtattgatgagatcgaccgcgtgatcgaccgcaatggcggtgccgagaaaatctatcaggccgtcatgggaggcgtgaaggacggcggctcaaccctgcgcgcagtgatgcagtcgctgccggaagaaggccagaaagcagtcaccgccgcggcattgcgccggatgggcctggccaatcccggagcgcaggacgcagccggcgaggcattcagtgcggccaccttcctgaccaactggaacaaggccagcccggaggcccgccgcgcgctgtttgatcggtacgggccgagcttcagccgggatatggaccgcatcgcgtcggtggcggagcgtatccgcgacggtgggcaggccatcgccaatccgtcaggcacggtccggcagggtgcacagttcgcctactggggcggcttgctcggttccctgttcagcggcaaccttggcatggccacgcttatcggcgccggcggctctggagcaaatatcttggctcggtccatgacgaacccgcgcatcgtcaagtggatggcgcgtaacacagagacaccagttggagcccttccggcacagatcaacgtgcttaagaggatgggctcagagaatgacgaccaggatgcaatcgatctggcgcaggccctatctgaacagctcaatcagagcccagatcagcaggaagggcagtga

SEQ ID NO: 528533 - DNA, 210 bp, Stenotrophomonas maltophilia
atgaccgacgatcgattcaaagacgcagggcagttccagcctgagaaggcctgggcgaagatcaaaacagctgacttccaccggcgcctcgaagccgccgaaacatggcaggaccgcctctatgtccgtgccatgctcgggttgctcgcgctcatcgccgtgtcactgcccttcctgctgatctgggctctgattgagctgttcagatag

SEQ ID NO: 528534 - DNA, 771 bp, Stenotrophomonas maltophilia
atgagcgagatgatgatcgccggagtgcaaatccatcgggacgcgggaggccgctacagtctcaatgatcttcaccgcgccgctggcggggaagtcaggcacaggcccgccacctggcttcagaatcagcagaccaaagacttggtcacggagattgagaaagacggaattccgtctatccaagcaaaacaagggcttgggacatatgtggcgaaagaactcgtctatgcctacgccatgtggatcagcccggcattccacctgaaagtcattcgtgcctacgatgccgcattgatctcccccgcaatcagccaggggtttgtcggcgatggttgtgcgctgattgagtctgcagcaaaggttttgcggctggcgccatcggtgacattggggatgtaccagcggcttggcggaaaggtcggtcatcaggacctcttgccgagctatacggtagatgccccggctgacactgttggcagtagcgagccgacgctcccgatgagcagcttactgaagatggtcggcgccccgatgagcgctcagaaagccaatcagctgctcaagtctattggcctccttgagcagcgtgaacgcccgtccagtggcaaccgggtcaagaagtactggacgttgacggatgcggggctgcaatacgggaagaacctcacttctcccgagaatccccgcgagacgcagcctcactactacgtcgcgcgattcggtgagctcatggacctgatgtctggtggtctgcacgaggctgcagcgtga

SEQ ID NO: 528535 - DNA, 228 bp, Stenotrophomonas maltophilia
atgaagcagaaggacaaatggattgttgctgcaaggatcggggacgaaatcaggcgctgcgatatggtctatatcgagggcgtgccgcacgtggtatggcaatggcatcaggacgcagcgaacgaataccctggggtcaccacagctttagatgctaggcacctgcaggacatgaagggcgctggaggccttgattttgcgtacacccagccgcttcaagagccctga

SEQ ID NO: 528536 - DNA, 225 bp, Stenotrophomonas maltophilia
gtgaaggtcgaactgatcgacggatggcgccgcgcttggaagctggcctcggtctgggtattcggcctggtgtgcctgttcccggacatgtacgacgcgatcgccgccatgggctggatggatgaactgccagagccggcgaagtggtcgatccgcgcgcttggagcggtcggcgtggtggcccgcgtgctgaaggctcggaggcgccctgatgcaactccctga

SEQ ID NO: 528537 - DNA, 501 bp, Stenotrophomonas maltophilia
atgaacaactcacttttggatcacccactccccgtaaggatcagcgccgcctcacttctgatgcctttggagccgggcgaacaaccccagttggatctcaagggcgagcttgataacggccgtacactgaccggtgaatcgggcgaggatctgacccagctgccatgggacatcactatcgagcgcctggatgaagatgaaagtcgcaggcagatcgatgacccaccagcgcaccgtggttcggcaggcagccatccgcatgctgggaaaccggagtgcgtggctgtgacgtactctgcttcggcacaggcctttgaccgcctcgccgcgatgcttgcagatggcacagtcggtattcgactcgtcctccgcgtggcaggcgtgaagcatgatccgaaaaggatcgagctgaagtggcccgacgctagggtctggacggcggtgacatccgtgaatgttgaagtcgagtacgacgtcgctgatcagtcactcactgcgtaa

SEQ ID NO: 528538 - DNA, 276 bp, Stenotrophomonas maltophilia
atgccggatgggatctcgttaggaatctggaccgccatcggcgccggctttggcgtcgcgatcacgttcgcgagctttggtctggtcaggcttggtggctacatggacggcaagaaagtgcgcccacgtccattcaaggcttggtgcatcatgatggccatcgctggtgccattgccggtactttgtggcagagcatcgggtactccgagtgtcgggaggcgggcaatatcgcgctccagtgcctgggcctgccaatcggcctgacgccacagtag

SEQ ID NO: 528539 - DNA, 273 bp, Stenotrophomonas maltophilia
atgacgcagcagcagaagactccgccccgtgtccttccggcatgcccgtcaggccatcccgcccgctacatcctcgacggtcggcggctgggagcacgtggtggtcatttcattgaatgtcgctgcagcgcaaccgcgaagcacccgtccttcgatctggcgtgggcgcactggcacaagcagcacgggctgcagcccgtggtttcatcggctcctaccgtctgcagcaatgtggtgcagctggggctgcggtgggcaggtggtgacgtatga

SEQ ID NO: 528540 - DNA, 789 bp, Stenotrophomonas maltophilia
atgcaagcatgcttacgcgaagaaatccatcatctttggcgcggtttcactggcgctttggctcggagccattgctacttttgtgggggaatgatgacctttgaaaccgacctagcccaacgcgtggctgctattgcaacggaagactggacagtcacccctgggcgagtagtgccagatgtggcaggccttccttttgcaaatcaaggaaaaaccctttctgcatgcatcatgtatgcggatctgagcaactccacaactatggtggacaatacgcctcgggaaagagctgctgagtactacaaagcttttctctattgcgcatcacgcatcatagaaaagaacggtggaaccattgaagcttacgatggggaccgagtgatgggcgtcttcttgggggttggcaaagaagacaatgcggtgagagcctcgctgcagttaacaagggcaatgacaaccattgtcaaccccgcattcctcaatgagtacccgctggagcatgcaaatctgcagttcacggtaggcattgactccggtgacgtaatggcgtgcaaagctggtgtgaggggtacatcagaactcgtttgggttggacccgcagcaaactacgccgccaagctcaatagctttcccgagctcaaccatgattacccgacacgaatcacggaggcggtgcattcacagttaacagcgtggacgttcatccaaagcggcctcacgatctgggaggggccatgggagagatcggggaagctgcactaccggacgaaggcgataaccgacttctag

SEQ ID NO: 528541 - DNA, 288 bp, Stenotrophomonas maltophilia; identical to SEQ ID NO: 351542

SEQ ID NO: 528542 - DNA, 219 bp, Stenotrophomonas maltophilia
atgtcgaaagacgattccatcgagttcgagggcaccgtcagcgagacgctgccgaacaccactttccgcgttcgcctggaaaatgggcacgaaatcctcgcccatatctccggccgcatgcgcaagaactacatccgcatcctcaccggtgaccgggtcaaggttgaaatgaccccgtacgacctgaccaagggccgtatcacctaccgcatgaagtaa

SEQ ID NO: 528543 - DNA, 675 bp, Stenotrophomonas maltophilia
atgctgcgagctcatcgagggagagcttaccgcgtcgaacctgactggaacgtcacgaagtctaatgacgatcggttgcatggagatgacggcgggatcgcagcagaatgcttacggatctttaacctccggctaacgaatcgcggggattctagccaacggcgcagcccctcgtgggtggtttggttggtcgcggaaagccggtttcctgggggctggccggtaaggtgggtaggccggggacgccgtgaacccgtccctgggggcttggccgcggcatccatgccgcggacaccccgcaaacccacagtcccccgccttcgacagtttcccggtgacggatgggcgcgcttcgtagagtcgagcttgctcgactggcagctcaggagctgtggcaggaacgggaaaagaagatggattactgcgagagcgcgcagcgcgcgacccgcttttgattttctttttcttctccgtggctggccgcacacggaaattgtcagaggtcgggcggggtgggttcgcgggggtgtccgcggcatggatgccgcggccaagcccccatggatgggttcacggcgtcccccgcgaacccaccccgcccggccaagcgcggcttttgcttcacgcggccaaacagccagccacgaggggctgcgccgttggcaggaaacctag

SEQ ID NO: 528544 - DNA, 984 bp, Stenotrophomonas maltophilia
atggcgcccatgaggtctcacttcaccaaacgaggcagaaggaaggtcacccgtcgggttctgacgcccccgcctgtgatggacttggaagacaactatctggcgaccatcgagttcttcaaggcggtgcgactgatcacgtcaacgaagggcaatcacctaatcgatctggcggcggtgaaggacattactccggccgcagcgctgctgctggtcgccgagtgtgatcgatggcgcgaacacacacagcacaagtggctaagagcctttgatattaacaattggacgcccagcgtccgaaggcgcctgaaggagatgggctttttcgaggtcctcggcacccgacggatacccgatgatcaggcgcttccggatgaagaccgttacgtccccttccagacgggccatcggaatccaggggagcctgccaggaccttgcgctcaaggattgaagaactcgggccgacggtcgccgaccgagaagcgctgtacgaagggctcgtcgaggcaatgaccaatgtgtcacagcacgcataccctgacgaacgtgaacgagggcagaagcggtggtggatttcagcttccgtgaacgctgctcgacgtaccatgacagtcatggtggttgaccatggtgtgggcatcgcccgaacgctgcctaggagcaagggctgggaggcgatcaggcaggccgtcccgcttgccttattgaaagatgatgcccgtatcgttcgagcagcatttgcaaaagatggcgaaaacaagtcgcagactggagacgggcaccgaggcaaggggcttcgggagaacatcaagggctacgtggattctcacaattctcggggccaacttcgcgtaattgcaaatcgcgcgtcttatgtgtacatccgtgaaaatgaaatagaagtcgaagattcgtccgccgttccatcccccttcgacggaacatttatcgagtgggttattgaagattatggtcaagaatga

SEQ ID NO: 528545 - DNA, 345 bp, Stenotrophomonas maltophilia
atggtcaagaatgaaatgaagatcatcgacatcagccgagacttctcaaacgtgcctgctggcaggcacgaagcggacggcgatttcagcggagaggcgttccgcgacaagatacttgcgcccgcgcttaggcagtatgaccgtgtccaagttattttagataacaccgagggcttcggttcgtcgttcctcgaagaagctttcgggggcctggtacgctattgcgggtttactcaagattatctaggaaagcacctatcgctgatcgcaaattcagcaggagccatgcgatatccggctcgcattgccgcttatatcgaaaaggcgcgcccttcacgcaagtga

SEQ ID NO: 528546 - DNA, 1275 bp, Stenotrophomonas maltophilia
atgccgcagaaactcatcgatcaaaccaccatccagccggatggccgcccaggcgacgacgcgttcaccgcctttgcaacctgcaacgacaacttcgcggatgccgagggacgcctttcggcgttggaaggtgggtcatcgaacatcggccaggacgtggccgaccttaaaacgggcttgcagcaggaggcgctgctgcgcacggacgccgataccgaactatcgcaggcaatcgcagcagaagtgactgcacgccaggacgcagatactgcacttggtgcgcgcttcattgggaggaacgtacttatcaatggcgattttcgtatccctcagcgcggaaccagttttcctcttgcggctaccgcaaggtactcgcttgactgttggtttttatggggtgctggttctcagatcggtggtaatcaacagaacgcggacggaactgcgcttcccggcacactgcaaaataggccgcgtaacgcgttccaagtgacagtagcgagtgtggctggtgccaacaattttgcgcttttgcaacaacggatcgaagacgttcgtaccttgtctggtggcaaagttacgttcagcggatggatgtgggcggactccgcgagaacaatttccgtcaatttctatcagcttttcggatccacgggtgcgtcggcgactgtcaaagtaaatgcgcaaaaaattaacttgccgtcgcaggtgtggacgtatgcgacgttgacctttgaccttcccagcgttgctgggaagaccatcacggccaacaatacgctttggttgaacatctggcttgacgcaggtgctggtagtgatgcagcacccgacgccgggggtatcgggcagaagtctggaacatactggttcagtcagttgcagctggaagcgggcgctgtggccaccactttcgagcacaggccagatgcaacggaattcgttctttgtcggcgctactaccgcaaaagctacctgcaaagcgacgcgcccggcacttacaccaatgctggacggttcacagcaggtaacggtgcaaacaccaatcagatcaatcggttctgcgtgttgatgggcgacccgatgcgtgcgccaccttcggttgtcatctacggcgcaccgtctggcactccaggagttgtatcgcaggccgacggctcaaacatcacagcggttgttgaggctattggtgacgcatccttcaatgtcggctggaacaacaccaacggacaatggggcggttggtttcaatggacagcagacgcggggctttaa

SEQ ID NO: 528547 - DNA, 210 bp, Stenotrophomonas maltophilia
atggcaggtaatcccgagcagttcgtcgtctataaggacagtgctggtgagttccgttggcgcctcttcgctcagaacggcaaggtgatcgcagacagcggtgagggctacaagaaccgaggcgactgcgttcatggaacaaggctggtcgcttcgattgctgcggtcgccgctatctgggatgcagacaacgagaaatggattgaatga

SEQ ID NO: 528548 - DNA, 315 bp, Stenotrophomonas maltophilia
atggacgtcatcgagaagcgggcgcgggagctgctggctgcggagtacgcgaatcgcggttccccgcgctatgccgacgaaatccgcgataccgaactggccgactttggcgacgacgacatagccatggctatccgcgccatcatcgccgccctcacgccgcccgagggctacgtactggtgccggtggaactgaccgtggagatggagatcgccttcatggagacgtgggtcctcaagcgtcgatgcattgatgattccgagatgcaggacgcgtgggcagccgcgcttgccgctcgcccggaggtgccctga

SEQ ID NO: 528549 - DNA, 462 bp, Stenotrophomonas maltophilia
atgatgtggttcgaccccagcgaccagcgcggcctgttcggcgaccagcggcacgaaaccatcacggtgatcgaccgcacgcatcgcgccgacggcacgcgcgtcctgtccatccatccggactgcctgctggacttccgcgccctgcccttcgcagacggatcgttcccgctggtggtgttcgatccaccgcacctggtgcgcgcaggcaaggacagctggctggcggcgaagtacgggaagctgagcaaggactggcgcgcggacctccgcgccgggttcgccgagtgcttccgcgtcctgcgccccgagggcgtgctgatattcaaatggtcagaggtgcaggtggccacgcgcgacgtgctggcgctcaccgatgctcgcccgctcttcgggcatccgtccggcaagcgcgccggcacgcactggatctgcttcatgaaggatcccgcccatggctga

SEQ ID NO: 528550 - DNA, 423 bp, Stenotrophomonas maltophilia
atgaacccgctcgacactatttctcccccaagcagaaccgtggaatttcgcggtgaagagttgcatgtttcaccgctgcgtctgtaccaggtcggcccatttatcacggccagccgcacccttatcgcccggctggcgatgatggctggtgcggttgatggctcggagcgcgttgctgtcggcgccattctgctcgatctactggagcaggacggagccgagattgcctctgcgctgggagttgcggtcgaccgcgaggctgattggatcgcaggggcgaccttggacgagatcgctgacctgctcgatgcggtgatcgggctcaaccgggattttttcgcccatcgcctgcggcggctactgctgcgggccaagctccaggccgacgagagtgcgggctcgccgacatcgtccagtacctga

SEQ ID NO: 528551 - DNA, 2832 bp, Stenotrophomonas maltophilia
atggctgaaccatctgcaaatctacgtgtccgcatcagcgcggatctggccgacatcaggcagggcctgggcgtgctcactcgccagctgcgcgacgtgcgcacggaggcggccaggccgctgcctacgaagaacaacatcacggagctgggggtctctgcggggcagaccgcccaggcgatgcgccagctaccggcgcagttcaccgacatcttcaccagcctgcagggcggcatgcccttcttcacagtgctggtgcagcagggtggccagatcaaggacagcttcggcggcgtggagccggcattgaaaggcgtctcgtcggcgctgctgggaatggtgaatccatacaccgtggccgcagcggctgtcggtttggtggtctacgcctggtatgacgccgagcagcaggcccaggcctacacaaaggcgctggtcctgtcgcgcaacgaggcggccgcgacgactctgacgctcgtcaccatggctcagaagaccagcgacgcgctgcaggttaccgccggcgtcggtgccgaggcggctcaggccgtcggtgcgaacgggaaaattgccgcccagaaccttcaggacgtggccaacgcggccgtggccatgaaggaagtcagcgggcaggcgctcgatgaaaccatcgccctgtacgcgaagctggcggaagacccggtcaaaggcgcgcagaagcttaacgagcaggtcaacttcatgaccctggcgctctacgagcaggtgaaggcgttgcaggaacagggccggaaccaggacgccgtgaccgtgattacccgcgcggcagcggacgaaacagtcatggcgctcgcgcgggtccgagccagccagaatccggtgatccggggattcaaggacctgtgggcggaggccacgaaggcgtggtcggcaatgcaggcaaacgtgggccttggccccgcagctgcgcagatgcagcatctgctggcggagaaccagcgcgatctgaagaagttgaacgaccttgccaatggcactcagcgtggcctgccgctggcccgaaatccgatcgctctggcggggttgcaagactcaatcaagaaccgatcagagaagatcaaggcattggccgctgatctgatcaaagagcgtaaagatgcagaagtgaaggctgcacaggatgccagcgcagagtacgtgcagcagcaggatgcgatcatcgaggcccaagccacgaaggagcagaagaagaagagggaaattgcccagattaacgggcaggccgaggtcgtccggcgtaaagcggaagcggccgggctcgtggaagaagtacgtgccattgaagaacgccgttccgcagccgtcgctgctatcgagaagaagtacgcggagaagccgaaggcctccagcgggcctgcttcgcgtgctgcagggttgcaggggtacaaggacgatcttgtcgccgaacaagcacagatcacggcgaacacccagatgctgcgtgcgcagtactcagcccgtgaaatcagtgctgccgagtactacagcaggatgcgggacctgcttcagcaagggacccaagcccaatcgcggtcacttcaacagcagatcgaattcctacagaagcaaggtgccagcgggaaagacgcaatcaacgtgaatcggcaaatcggcgagctggaagcacggctggcaaaactgcgcatagaaggcgccgctgcactggaggtactggcgaaagaggaacagtcggctgccaaggcacgcgagaacgcagtgaaggcctacgccagtgcactggatgccagtaatgaggcgctgcagcgtcagctcactacgcaagcacagcgcgttggcatgggcgaccgtgagtacgaagtgcagcagcgaatcaacgaagcgattgcagacgaggcggaaaagcttcgggaactgagcctgcagcggaatgcggaacagatcgaccagatcacgttcgaagaagaaagggcgttgctgcatgccaagacgctagaccggcttcagatcatcaagagcggctacgccgagctccagcaggctgagggaaactggctatcaggcgccagcgctgcctgggcgaactatcagcaggaggccggcaacgcggcgcggcaaatgggtaatgtggtcggcacggccatcggcggcttcgaagacgcctgggtcaagttcaccaccacgggcaaactgagcttctccgacctcaccaagtcagttctggcagatctggcgcgaatcgctgccaaacaagcagccgtgggtatcgccaatgcgttcgctagcatttggggcggcggagcaggcgcatacactggaaatggcacgggcgccggatcgctcggtggattcggcaactacctgagcggctttgctaccagcagcgtcaacaaccaacagttcgagaacatgcggcttggcggtagctactctaccggcgggtacaccgggtccggtggcgtgaacgaacctgccggcatcgtgcacaaaggggaggtggtctggtcgcagcgggatgttgcgcgcgctggcggagtggaaattgtcgaggcaatgcgacgaggcttggccgggtatgccgatggtggcattggtggccaggttccggcccgcgtcgggccaagcatgcatgtcggtggccagggcaaccttgttgtggagatcaacaacagcaccagcggcagggtgcaggcacgcgagcaacgacagacagctcccgacggttccgagatccggagactcatcatcgacgtcgtggcagatgacattgccaacggtggagcggtgagcatggccggccgcgcgcggcacggatggacggatgtggtcggttga

SEQ ID NO: 528552 - DNA, 282 bp, Stenotrophomonas maltophilia
atggcaatgcgtgacgaaacggcagcgggggaaatcttggcgctgaagctgatgctgggcgtggcgttttcgatggcggcccgcgacaaggatgacgctcgctccgctttggacggagttctgcgagcttgcgcggaacagattcaggagggcattgctggtgcagaggctcgattgcaggccgatgagcttgacacgtcaaaggtgtcggatgccgcgttggagacggtcgatttcgttgccggcgtagccgacagtctgcttagggcaatggggcgctaa

SEQ ID NO: 528553 - DNA, 933 bp, Stenotrophomonas maltophilia
atgtgctattccgcccagatcaccgccgcctatcagaaactggtccgcatgaccggcgccaccctgtcgctgcaggagttcgccgcgctctacgcacacgacccgggcaagaagcggcccaagacgccgaaggccatggatgacgccttccgggccggcgcgagcccggcagagctggcggtgtgggccgagatcgagcagtggaacagggccgaggccaccatcctggagcaggagctgttcgccaaccgcaagcggctggccgacgccgagcgggcgctccaggtgaaggagacgaagaaggcgcgggaggacgttcggattgccggcaacaagattgagcgggccaaggcgcggctggcggacctgcagcgcgtcgagccgaaggatcgcgacagccgtatcttccccggcgtctacgccccggtgatcgtctccgaggccgggaggttggtcatcaagccgatgcgctaccagtgccgcctggccgggaagccggccaactacgaccagcgcttccccggcacgtataacgcccgtcgcgacagcctggagaagttctgggcgccggcgttcgggcacacccacggcctgatggtggtcgacaccttctacgagaacgtcgaaggcccggacgggaagaaccaggtggtgcagttcaccccgcgcacgggcgagccgatgctggttgcgtgcctgtggtcgcactggaaggatccggccggcaaagagccggatctgctgtcgttcgctgccatcaccgacgagccggagcccgaggtggccgccgccggccacgaccgtaccatcatcaacatcaagcccgagcacgtcgaagcgtggctcaacccggaccccgctgacctggtcagcctgtaccggatctttgacgacaagcggcacccgttctacgagcaccggctggcggcgtag

SEQ ID NO: 528554 - DNA, 1260 bp, Stenotrophomonas maltophilia
atgaacagcaccggcatcctcgatgattacctggacgaactgctgggggaggccattgtcgcgccgccctctgccgagctgtcgccggctggcgccgggccaagcccggcgatcgaagcagtcgccgaacgcgaaccgacctgggacgacctgccggccgaagtgatctacgaaaccgaaaccatcgccgccgcgccgagcggggacagcgctgcgctggaagccgccttcgagagcgccgcaccacccacgcgcgaacccacctgggatgacctgcccgccgaggtgatctatgaaacagaatccgtcgccgccgcgccaagcccggacgacgcggtgctggaagcggccttcgagagcgctgccgcctccgctagcgctgggccgggtccggcgggagaagcggtttccgaacgcgagccgacctgggatgacctgcctgaggaagtcatccacgaaaccgcgccggcacccgccgtcgttgcaaacgccggtccggaacctacctgggacgacctgccggacgaggtgatctacgaaaccgatccggccgacagccatcgcctcgcccacaccgacagccccggcctgcaggccgcgttcgaggcggccgccggtggcgaagacgtagccacgccaccgcccgccgtggtcgcagcaccggtggccccgacggttgcacctgcagccccggccccggcggcgcgcaccgccactctgccgccgcgcgtcggcgtcgatgccccggcaggcaaccgtcccggcacctggcaggagctgcaggcgcaggcccaccaaccggctcgcagcccgcacccgcagaaccgacgcgccggcgaacgcacttcgcgctggctgcgccttcgctgcggcacccaggcctatgcgctggaactgctgaaggtgcaggaagtggtgctgccggtgcccctgctgccgctgcgtggcactgcagcggccatgctcggcatcatgaacctgcgcggccaggtggtaccggtgatggatctgggcctgcacctcggcgcggccgccgccgaggacgacgcgcagacccgcatcgtggtgctggaagaagacggcgagaccatcggcctgcgcgtgtcagcggtcgaagatgtcgccaacctcaccgattcgcagatcgaaccgccggataccgcgcgcatctgccagatctcaaacgacctgttccgtggcgtggcccgggtcagccagcgcccgatgatcctgctcgacgccacccggctgttgagctga

SEQ ID NO: 528555 - DNA, 366 bp, Stenotrophomonas maltophilia
atgagcgcacgtatcttggtggtggacgattcggcgtcgatgcgccagatggtgtccttcgccctcacctcggccggttttgccgtcgaagaagctgaagacggcgcggtcgcgctcggtcgcgccaagggccagcgcttcaatgcggtggtgaccgacgtcaacatgccgaacatggacggcatcgcgctgatccgcgaactgcgccagctgccggactacaagttcaccccgctgctgatgctgaccaccgaatcggccgccgacaagaagtccgaaggcaaggccgccggtgccaccggctggctggtcaagccgttcaatcccgaacagctggtcgccaccgtgcagaaagtgctgggctga

SEQ ID NO: 528556 - DNA, 729 bp, Stenotrophomonas maltophilia
atgtccgcctcccacaaggcgttgcgcccgcgtccgctggtgctcgcgctgtcgtccctgatgctggtctcgctgccggccttcgcgcaggaaagcgcacccaccacattgcaggaagtgaaggtcaccggctcgcgcattccccgtgccagtgtcgaggggccctcgccggtgacggtgatcagccgcgagcagatcgatgcgcagggctaccgcaacgccttcgacgcgctgagcgcgctgaccgagaacaccggcaacgtgcagggcgaggacttcggcaatacgttcacgccggccgccaacaccatcaacctgcgcggactgggtccgaaccgcacgctggtgctggtcaacggccgccgccaggccgactacccgctggcctacgagggctcggtgaatgtggtcaacctggccaacattcccagcgccctgatcgagcgcatcgaggtgctcgctgcgggtgcgtcggcggtgtatggctccgatgccatcgccggcgtggtcaacatcatcctcaaggaccgttttgaaggcgtggacgtgaacgtgcgcgccggcggcacccagcagggcgggggtgacaaccagcgcgcgcaggtggtcggtggcagttccggcgagcgttgggatgcgctgttcggcttcgagttcgacgtgcgcaaggcgatccacgcgcgccaacgcgacttcatggattcactggacgatgatccggccggctag

SEQ ID NO: 528557 - DNA, 654 bp, Stenotrophomonas maltophilia
atgactgagtcccctgccccgatcggcgtgctggtggtcgacgaccacccgctgctgcgtgatggactggcggcactgctgggcgctcatgccgacctgcgcctgctcggcgaggccgccgatggcgaggaagccatcgcacgctaccagcagctgcagcccgacgtcgtgctgatggacctgcagatgccccgcctggatggtgtggaagccatcgtgcggatccgcgcgctggacccacgcgcgcgcatcatcgtgctgaccacttaccgcggtgacgtacgtgcggtgcgggcgctgcaggccggcgccagcgcgtacctgctgaaggacatgctgcggcatgaactggtcgacaccatccgcatggtcgccggcggccggcgcgcaccgattcccccggcggtggcagccagcatcgccgcgcacgtggtggaagatcgcttgtcgccccgcgagaccgaggtactgcggcacgtggccggagggctgtcgaacaagcgcatcggcgagcgcatgcagatttccgagcagacggtgaaggcgcacatgaaaagcctgatggacaagctcggcgtgggtgatcgcacgcatgcggtaacccaggcgctgcggcgcggcatcatcagcctggacgacagcggtcacgattag

SEQ ID NO: 528558 - DNA, 129 bp, Stenotrophomonas maltophilia
atgcgcgccgatggcgagctggttggcctggcgggcgtgctcggcgttctggcgcacggtggaggtcagttcctccatcgaggccgcggtttcctcgaggttggcggcctgctgctcggtgcggcgtga

SEQ ID NO: 528559 - DNA, 222 bp, Stenotrophomonas maltophilia
gtggcaactaaggcgcaactgaaaaagctgctgaacaggatcagcgccgacagccgcaaggcgcatgccatggcggtcgagctgtatgggcctgaggcttggatttacgtcgagtcggaaggcggaatccacgccatgagcggagacgacctgggcaaccgacagcggtttatcgaggtggagtcggacgggatccaccagttcggagtcggcgcatggtag

SEQ ID NO: 528560 - DNA, 1005 bp, Stenotrophomonas maltophilia
atgaataccaacgacaagaccctggcggacgtgcagcccggtgggagggtgaggctgggggatgggctgcgctctgaactactggatcaggccgaacgcctggagcgcatggacgctcaggatcgcgagactggcgagagcatcgaacaggccctcgaagctggagaggaatacacccccgacgacgctccagacgttgccgctggcctccagcatgacgccaacaggtccgaagaaatcgcagccctgctgcgcaaggctgctgccgccctcgccacccagccctccccgggtggtcagggggaggatgcacgtgttcagttcgatgcattgatggaagccaattcgattgacaccacccgttggggcgatggcgagtacacagacccggccgcccacaactactggcgggcctggcaagcagccctcgccgcccgccagccggtgtatgtgcaaggctccgatgagctgcgtgcgcggaccgagggcgagcgcgccgcttacatggaaggcttggaggaaggcaagaagatcgccgcccgccagccggtgggggagccggtggcgtggtactacggtttctctgacaccggcgaggctgggccggtcacattcggcgggaacccgggcgcggaagcaatcgcgtgggcagagcgccacggtcacacgctgcactacctctacgccgccccgcccgcgcaggccgtggacctggggcagttccggggctggctgtgcaccacgaccgatggcgtagctactgactggactttggaagacgactcgcgcctgcggtttgagcgtatgggccgcaccatcgagccgatctatgctgccagcaccgataagccaagaactttggcagatgcgctgcagggtcgccgcaaccggctgatgaacagctatggaaacggtgcccgagaagatgccgctattgatacgcagatcgctgagattgacgcagagcttgccaaggtcgacagccaggcggtgggcaatggctaa

SEQ ID NO: 528561 - DNA, 360 bp, Stenotrophomonas maltophilia
atgagcagtaagcacacgccggggccctggacccacagcaaaggtgaacggcacgacttcttctacatcgattcgccagatggcgatgtggtgtatgtcacgggatctctacagccggaccatgtggaagccaacgcccgcctgatcgccgccgcgccggagctgctggaggcgctgaccaagaaagtccaggacgccgagcaacggatgttcgaagactggctggagttcaacagcccgagtggcgaccacgaagcaatccagcgccagtggctggagagcgacgactaccgcggcttcatcggtgaatggcgagagcaactggacgccatcgccaaggccacagggggtgcgcaatga

SEQ ID NO: 528562 - DNA, 270 bp, Stenotrophomonas maltophilia
atggattcttttatcgatttcatgatgggcaagattattggcccagcctccgtcacgctcgtggcgctgggaattttcatcggtctgccattggggatatgggcaaccatccaggatgcgaagtcccccacattcgcgctcaggaaggaccagtggtcttgcagtcaaagcgtcgagcgcgcgactacgacctacatcaagagcggtgacgttctcgtcccggtgaccagctaccagaagcactgcacgcagtggagtgagcgcccatga

SEQ ID NO: 528563 - DNA, 963 bp, Stenotrophomonas maltophilia
atgaacaatgtcctgcacgcgcacaacggcgtggccggttggtacaagatcgaggcgttccgagtggatgcccagggcgaggaggtacccggcagccgtcgaatcgccgctgactggttccccaacctgatcaccaatgccggtctggatctgcttgggacgacagggtcgacgccggtccagagcttttgccgggtcggctctggcaacacggcgccagcattcacggataccgcactggtttcccaggtggcagtgagcagcacagtccagtccgacaccagcggtgttgacaggactggcgcgttctacggctggcgccgtcgcacgatccgctttgccgcgggtacggccgccggaactctggccgaagtaggcgtgtcggctacgaacgcagggccgctgttcagccgcgcgctgattctcgacggtggcggaaacccgaccaccattactgtcctatccgacgaggttctcgacgtcacctacgagctgcgcatctacccggccatggcggatgcaacaggcactgttgtgattgctggtgtcacctatacatggaccgcgcgtcccctgaacaacgcgacatatgactctcgctggggtgggcagtacctgggctgcggggttggctttaacaccacatccgggaacgtttccgtttatggcccgcttgtgatggcgaccatccctgctcagggttcaactccaacctcaccagtgaatggcaccagcatgaaccctcagccatatacggccgggagctaccagcgttccttccgcatggacttcgatctgaatgatgggaacgtggccggcggtattggcgcgtacttcgcagcgtccgagacaaaccagaccggaggcgcatgggcctggggcatctccccgaagctcccgaagaccaattcgttcaaggcaaccttcaccgtgcgcatgacctggggacgatacaccccatga

SEQ ID NO: 528564 - DNA, 216 bp, Stenotrophomonas maltophilia
atgactgacgatcgattcatcttgaccaagcaaccggtgagtgcagaggccaaagcgctggtggcgaaggccagcgcagcacagcggctgaggaagttcagggccgaggcgaccccggccgaccgccgttatgtgcgctggatgcttagtctgttggtcgtcttagggctggctctgcccatcctgctggtattcgccgttctggagctgttctga

SEQ ID NO: 528565 - DNA, 132 bp, Stenotrophomonas maltophilia
atgctggcgatcgccgggctcacggcctattgctgtacagttcagacgcagatgcatggttgttcgatcgaggcttgcaagccagtggagctggggctgaagttcatggaaagcttgccgataaacctgtaa

SEQ ID NO: 528566 - DNA, 363 bp, Stenotrophomonas maltophilia
atgatggtccccctaatccaatcactgctgcaggacgccgcgactgtccggcaggtgctcggcgatcccgtccggatatggccgggcagcgcgccccaggatacggcgctcccctatgcgatctgggaggtcgtcggcggttcgcccaccgcgatgttgtccgagccgccgccggccgacggctggcgggtccgcttgaccgtatggggcgagaacctcagccaagccaacggcgttgccgtcgccatccgcgatgtggtggagcgcgtgggcagcgtcgagtcgtacaacccgacgcccgacagcgacggcacggatgcgatgggcatttcgttcgacgcgcggctgctgcagctgcgctga

SEQ ID NO: 528567 - DNA, 504 bp, Stenotrophomonas maltophilia
atgtctgagcaggtgaagatcgatggcctggacggcctcctgcgttcactacgggaggcgcccaaggcgatccaggggcgagccgtgcaagccggtatgcgcaagggtggcaacgtcatccgggacgacgccaggcgccgggccccgagagcatcggggttcatggcatcgcagatcgttacccgcagggccaatgccaggagtcggcagcgtgcaggggtaggccaaggcggtgagtatttcaccgtaggggttaagaccggtcgccgtcgaaaatactcgaacaccaagcgcaaccgtaggcgcggccgcgtcgggaaggtctacgatgaggcgggctgggcctattactggcgcttcttggagttcggcacgaagaacatgcgggcttcgccgttcctgacgcccgccggcgaggccaaagggccggaggcggctcaggtggtcatcgatgagacatgggcagcgctggacaagcaattgaagaaggatggctggagatga

SEQ ID NO: 528568 - DNA, 477 bp, Stenotrophomonas maltophilia
gtgaaccgcatcgtcatcacggtcgccgccttcaccctgtggtcggcttgtatgttcggggctggctggacctggcgcggtgatcgggcagagggcagggaagccgaccggcgcgccgccggcgccgaggcagtggcggaccaggtgaaccagacccgcgccgtcgagcaccgccaggccaacagcctggccaccatcggagccaagcatgaagaagaccgcactgcggccgcgaccgtccctgctgctgttgtggctgacctgcgcgctggtcgtctccagctgcgcgacgacctcgccacctgcaataccgctcgcctgtccgaagccgtcgccggcgccgtcgaacgtgatgcgcatgcccaactacgagcagaggtcgcgggagatcttgttcagatcgggcgcgatgccgacgaccaggtccgagcctgccaagcagtgattgccgctgaccgcatgcaggccgggcgatga

SEQ ID NO: 528569 - DNA, 303 bp, Stenotrophomonas maltophilia
atggacgaaaaagtgcgtgcagaactggacgaactcggaagagtcttggattcaaacaacgacgtcatgaggcagatgctggggcgaacgtttgctctggacaccggactgcaagtcatatgtcggtcgtggggacggtccgcggaagatgtaatggctttgctgaaaggcgagctcgacgcaggagcaaaagagataagggccaggggcgcagacgctataaccgtgcggagtttcaatgcactcgcgacgagcctcatgaacgccctccagaccgccgcaaaaaacgaacgcggcggctaa

SEQ ID NO: 528570 - DNA, 228 bp, Stenotrophomonas maltophilia
atgagcaagcgcgcgctgcgctcccggctgggcctgagcagcgatgcgcacttggccaaggtgctgggtctgccggtggagcaggtcagcggctgggctgatgaagacatggtcccggcgctgccgcaggtggtgaagctgctgggctacaccgagcagcgggggccggcgaagccggcgaacgaagaccccgatgcagaccgcatcgccccaattgaggtggcctga

SEQ ID NO: 528571 - DNA, 198 bp, Stenotrophomonas maltophilia
atggctaagtacctcgtggaaatgccgttccaagctgtgcagttcttccacgtcgaagcacgtagcgctgccgaagccaagcgcctggcgcgggaaggagaaggcgggccggtcgaagcgatcgactggcgcgttaccaagcacttcgcaccgaaccatgcacgccaggtagacagcgaggtggagggcaatggctaa

SEQ ID NO: 528572 - DNA, 297 bp, Stenotrophomonas maltophilia
atggctaagccagtccacaccatcggcccgtggcgctacgccggcgcagagacggctggcgctggcggaatgctgctcggccggaatggcgagcccattgccgtgttctatggcgcgaagaccaatcccaactccgactcggatgcccgggcagctgctgcagcgcccgacatgctcaacacgctgcgcctggtactggagttcctgatccagcgcgggcaccgccatggcgacgtgccgctggccgtgcgcgaggcaatcaggttggctgagggaaaggagcccgcccatggctga

SEQ ID NO: 528573 - DNA, 207 bp, Stenotrophomonas maltophilia
atggctgaccagccgctcaccaccacacaggcgatctgcaccgcccgggtgttcctgagcgagtgccgggcgcgccgacacggcctcggcttctggttcgtcttcaacgctgcacagcgcgcgcgcaagcgcgctactgcccccgccccgctgccggcaccgccgcgcgcaccggcactgccggcccaactggacctgttcgcatga

SEQ ID NO: 528574 - DNA, 177 bp, Stenotrophomonas maltophilia
atggcgactgactccaaggccctgcaggccgtgcctgcggcacccgccgttgatccctcagccaccgcacggcgtgagatcgaccagctcttttttttcatggcgcttccgatcctgattgctgccttcgtggcgtcggttaagcgcgacgtaacccaccgcacgcgcaatcgatag

SEQ ID NO: 528575 - DNA, 261 bp, Stenotrophomonas maltophilia
gtgaaccagaacaccaacgtcgctgttcgtccgtccctgaagtcccgcgccaagtccgtcgccaccaagctgtcttcggtggtcgttggctcgctggtgtcggcatcggccttcgcgcaggccaccgacaccccggggaccatcgagggtgcagcagcctttatgaccaccaagggcggtatcgccatcgcggttgctgcggccatcacgctgatcatgctgggcatcacggcggccaagctgccgcgtaagggcagctga

SEQ ID NO: 528576 - DNA, 132 bp, Stenotrophomonas maltophilia
atgaccgctgagattgctgagttcctccgcgatccgttcgttgtggcgattgctggcggcgtgctggtgacggtcgtgtattggacgattgtgctcgcgctgcgcgggaaggggcagagcaatggccggtga

SEQ ID NO: 528577 - DNA, 177 bp, Stenotrophomonas maltophilia
atgagtaggtatccctcattcgcccaactggcggagttcgatatgggcctcgcagcagtcgctgtgtttctgtcgctcgttgtcggtggggccatcgtctccatcgtcatcgagcaggcatggctggggcttcgtcgcctgtggacgttgcggaaggatcgctccaatgaccgctga

SEQ ID NO: 528578 - DNA, 228 bp, Stenotrophomonas maltophilia
atgccgaaccggacgacctacggggccaccatgaaggacgaaatcattggcactgccgctggtgctgtagcgaaggctgctccaccggtgacggtagccggcgcggtcgccgcaggagcgaacctcgatcgcgtggtggtagtcctgacaatcatctacctggtgggccagatcagctacctgggctggcgctgggttcgcgagtggcggcagagggcgcgagcatga

SEQ ID NO: 528579 - DNA, 366 bp, Stenotrophomonas maltophilia
atgtggtcgaaggcaccgccgccgacgcaggaagagcgagcccggatccagttggccaagacggggccgtgcatggcctgcctggtgcgttactcgcaagggctgatggcgcagcgttatgtggtctacggctgcgagtacaaccacgccaaatcgggcgaccggcggcgcggccacttcttcggctacgcgctgtgtcagtggcaccaccagcgctatctgagagagggcatgaccgagcagcagatggtggagcgctggggcccgccgttgcattactcgaagaagttccacgaggcgtttgggtcggacgacgacctgatcgcacagcaaacctacatcaacgaactgagggcggcagcatga

SEQ ID NO: 528580 - DNA, 195 bp, Stenotrophomonas maltophilia
atgagccccgatcacttcaacgtcgaagtacgtcctgtgagcgagccggtggccgaggcgggctggtatctggcctacggctacgggatcaagccgatggtggtctacgcgacgcgcgggatgactgtctggcgcgacggcatgcggcgtatcccgatcacccgctacgccggcccgatcccggagctgcgctga

SEQ ID NO: 528581 - DNA, 312 bp, Stenotrophomonas maltophilia
atgaaccacccggctcgcgcaactgatctcagcaccagccacgaggctgcccggtacgttgttcaatccggcttgcagggtgaccagcaggccgcagcagcgtctgcagtgaagcgccatcctggcctgaccagccttgagctggcccaggaaaccagcttgtgccgctatgtgctggcacgtcgtcttcccgaactggcagaaaccggccgtgtttggcgcggcccgaagaagccctgttccgtgtcgggtcgcagtgcctgcacctggtggccggttgcgccgggcgaaaacatgacgctggggctctga

SEQ ID NO: 528582 - DNA, 429 bp, Stenotrophomonas maltophilia
atggacaaccttaccgcttccgagatcatcgatcgcttgggtggcaccaccgaggtggcccgcatttgtcagattaagccgccgtctgtgagcgagtggcgctccagcggtatccccccggcccggcggcagttcctggaactgctgcggcccgacgccttcggggttggtggagccgctgcttaccaagcgagcagtgttcacgtgacgaagagcgcgctgcgcgcccgccttggtatggccagtgacaagcacctggccatcttgctgcagctccctgcagatgaggtcgaggcttggtcggaggagggcgcgctgcccgcactgccgcagattcagcgccttctcggtggcgagccgaaggcagctgctgagccagcgacggaggatcccgatgccggccgcatcggccccgtcgacaccgcctga

SEQ ID NO: 528583 - DNA, 582 bp, Stenotrophomonas maltophilia
atgccatacagggatttgtacgcgtatgctcaggagcttgagccggtagtcagtcgaaatgcgattcgcgataagattatcgaactaacggaagcctctggcttccgtttttttcgcgaccatgatttgaatccggaagagctgtgcggctactacttgtcgccaggtaacgatgcacaccagttcgcgaggcaggcaggcggcaagcatgtcgtggcgtttgccgcaggactcaaccggtgttgggagagattcgtcgtcctgaaggagatgatgcatctgttcgacagcccgttggagatgaccaatacggccgacgatttggagtccatcttcgttggtatgctggatccggatttcgatgggaaggtgtcgccacagtgcatgtctgaattccgctgcttctggatggcgttgggcgtggtctgccccgagcgcatccgcgctcagctgcagcagaagcgcgatgcgggaacgatgaccgaactcgagatcgcaacctaccttcgtatccctgaggcctatgtcggtcgattgtgccatccgaacttcaagcacatgatggcgcgtctgtccgagtga

SEQ ID NO: 528584 - DNA, 186 bp, Stenotrophomonas maltophilia
atgcacgcacagcatgccgccaaagaaaaactgttcggcgcaaatggtctgcgcgcgtcgaacttcaagatgttccctggcacgtcgcgcgagacgacggcggagcagattgctactcagctcttgggctcgatcgagcgcattgaggctggtcaactggaaattgtcgaagacttcgcggactga

SEQ ID NO: 528585 - DNA, 231 bp, Stenotrophomonas maltophilia
atgcgcatcgttcagttcaacaccggaaagaccgtgcgccccggcgccttcaagacgaagttcggcgactggcagccgaccgtcgcagtcatccagaaaagtggagcgctctgcgtcacccagcgtgttgatgcccgtggaatggggcggagggagagcaagtgggccgctctcactgaggcatgcagaatggcgcggaggcttcgccgggagcttgaagctggcaaatga

SEQ ID NO: 528586 - DNA, 222 bp, Stenotrophomonas maltophilia
atgccaaccatttacgcctgtcgcgggggcacgtcaatcgcgcaagccaagcacagcgcgtgcgtgttcccctcggaatgccgcgcacgacggaacggccacggcttctggttcgccttcaacgctgcacagcacgcgcgcattcgcgccaccgatcccgccccgctgccggcaccgccgcgcgcaccggcaatgccggcccaactggacctgttcgcatga

SEQ ID NO: 528587 - DNA, 273 bp, Stenotrophomonas maltophilia
atgatgatgcgcagcttcccgaccatgcgtctcgcttttacatcaaccagcatgctcatggtcgaagcggagcaatggccggaagtctcacagctgctcagctcaggaggggtgcagggaaccacgtcagagcagacgtgcacggtctacccggagtcaatccagcccccatcggccggtcagcctggatactcagagacgctgatttggtttctggcatccgacgccgaaaacgcgcggcgcgggcaggagcttctagattcagccgcctga

SEQ ID NO: 528588 - DNA, 588 bp, Stenotrophomonas maltophilia
ttggggggtccacacttcgcgctggccttcttccagccgcggcaggccgtagcgcaggtcggcctggcgccaggccagggcgaaagcggcctcatcggcttcattgccggccgcgaacgcgtcggcgctgccaacgcgcagggtgcgcggcagggcatcgctgcccaggtccagctcccagccgtcgcctgcggtctgcgcaatcgccgcgccgctggcggcctcgggcgcggtgaacgcgccagccgccgccagatcgctgcgcacctgcaccttcaccttgcggcggaacacgaagcgctgcagttgcgacgcaatcgcatcggcatcgccgtcagccagcaccagcatcacgtggtcttcggccagccgaagcagctggaacaccgccagggtgcggcccttggcgctcagccaggcactccactgccagtgctgcaggggcagggcggtgacatcgctgctgaactgggcgtgggcaaagacagccgcatccgggccctgcaggctcagcagctggtggccgggcaggcgaggatatccgacgaaagcagggggcaggttgtcaggcacgtgaacgaggtctaa

SEQ ID NO: 528589 - DNA, 540 bp, Stenotrophomonas maltophilia
atgccgaggccgtctaagcgtacggatttcgatccgaccgagtatttctcgcttaatgagatatatctttggtcgtgctccttgtctcgtgacgggagctatgatccctctgctcacaaagggcgtttagtcgcacagtcgttccagcgcgccaccccggatgtgttcaaggtggacgtggagggtgaggatgagtcgtcggtgcttcttagagttctggtgaatttgggcgtccggtccgttcttcaggccgacccgcacagcgtcgctgagcatgaagatgatgatgcacacgaggaagtaattttcactcttgaagctacctttgcggtggagtacttcgtccttgataacccctctaaggaagattttctggggtttgtggattttaattgcgtccataatgtatggccgttctggagagagcacgttctgtctactcttagacaggcctccttgcccataccggccgtaccgctttttgctgggcgcggatcagctaaaaagaagaagatcgccaagatcggcgccgttgaatag

SEQ ID NO: 528590 - DNA, 186 bp, Stenotrophomonas maltophilia
atgggcgtggcctcgcagctgcagcaggcccggcgcctggccgaggccggggcgaaggaggtggagcgggtgaaggaagcgctggaaccacgccggccgcccaaggagatcaagccaagggcgaggtatcccatgaaggcgtcggtcagggcaggtagagagcagctgtccagcgctcgaatctga

SEQ ID NO: 528591 - DNA, 462 bp, Stenotrophomonas maltophilia
atgttctcgctggcggtgctgtcggcaatggtgtccattgcattggatatggtgatccgtgtgtcttcctcgttctgggcgacggcgctgctaaacaggttcctgcttgacggggcttccagcgacggtatgaccagtcaggcgatgcagcagggcggcatgggcctgattctgacgaccttgattctgactgcgcccccaatggcagccatgttcttccaaggcaccttgggtagcttcatggcatattcgcagataggtggcagcccggtggcacaggcgccggggccgagtgggcagccgccaggtagctacttcacgcctccggctccagagaagggcgggacgcatagtgccactaccgagcaggttgttggttcgcgagtgactggcggtagttcatctccgggttcggcggtggtggactcagggcgtcttggtcttgcaaagaacaacggctga

SEQ ID NO: 528592 - DNA, 918 bp, Stenotrophomonas maltophilia
atgtttgtggctgatgcgccgatctatgcggacacggtgatggaccgaggcgacacattagagccgggaacgttcagcgtctcgccggatgggcagcaattgctgatgaaatcgccaccggtaacccctgtggtggcagacctgtccagcatcggcccggggcagcagcctgccacactgcggcaggctatggccgatatcatgggaaggctgggcaaaacagcgtgggtagcggctgactgtgcagcgatcgatggcgaaaccgggtatgccggcattggctactacgccggcagcgcggtcaccggtcgagatgcaatgaacgcgatcctccccagctacggcgcgggttgctaccaggacccgagcgggccgctacgattcacgcgggtgattgcgccggagacctcgggggcagcgccagcgtttgatctgagcgaggcggacatggctgaggacctgctttgtgtccccgatgacgcgccgaatctgacccgccggatggcgtatcggccgaacgcccaggcgctgtcggcatcggacctggtgacagacgtagtggatgtgcctcaatggcgccgcgacgaactggtgggcctgttcagggcgcaggtatatggagccggggcgctccatcctcactatcgcagagctgacgcagccgacccggtcgtgtcgctgttctggcgctcggtggacgcacaagcagagatcgaccgcgtagtgggcatctaccgcgaccaacgcttcttctatcaggtcaccgtccggggcgatcaacagttggccccgcttccgggacagattggccggctgacttacagccgttatggcctggccgacggtaagccggtgttggtgcggcgcgtggagcgcaaccctgccacgggggacgtggtgctcaccctgtggggatga

SEQ ID NO: 528593 - DNA, 1602 bp, Stenotrophomonas maltophilia
gtgctcggtggcctcggccagtgggccggccatcgtcgcagccgccattgccgcctgctcgttgtagcgcttgatcgcctccgcgtccgccttgcgatctttggcgccggcacgctcagccgccgcggaagccttgcgcgactccgtgaagttcttctgcgcggcagccagctcggtctggagccggatgtactgtgcgccctgctcgatgtactgcttgaccttggggtcgtcgcgcttggaaaagtcgacgccgctggcctgtgcctccttgaaccagtcgtttacgtccagctttgcgacttcggccgcgctcttgccgacgcgggcgagctggcccggcagcgactgcattgccgacgcaatgcgcttgcctgccgcccctgccgagtcccccaggacattgaacgatcccgacagcgcgtcggtcgcgctcttggcctgggtgctgctcccggtgaacgcctccaagattgcccgcttgcgatcaacctcccggccagcagtggccgcggctgcggtttcctcagtcaggctctttgccactgcggcggcggctggcgagccatcgatcattgccttccaggcggcgtccagcccgctggcgaagtcgtcggcagagatcttgccagctttgaacgcagcatccagccgctccgtttccttgatgaaatccgaggcttgcgcgacggtggcaaagtttgtggctgcggccaccatttccgtcatcgaatcggtgatgttccgatagttggcgtcaatctctttctgcaggcgcaggatctcgccggcctgctgctgtcgattcagctcgcggaacttctcgatggccgtgtcggcagcgccaccgaagtcgatcaaagctgcagctgcggtgttagtgttgtcgcggaacagcagccagccagccgcagcggttgccagcattgtgacaatgccggctgggccgcccagcatcgccaaggtggacgcccccgccctcgcggcccagcttgcgctagcggccgccgactgggtctgcgcctgagcaagcaacagggtcgcctgccgatgctcaagcgtcgcggcagcagccttggagcttacagagacgctgccgccgatcacttccattcggcggacttcggcctgcgcatcaagcatggccgcacgtgcgcgcagttcaagctgctgcgcggcggccagattctgagcagccgcagccctgtctgctgttatggccgcgttggcagccgcgactcgagcgaggagagccttcaccaaggggccggatgcaagtgcggcggaagcaacagctaccgtctggagattgtttccgaggatgccaatccctgcagcgagagcttgggacgcgccagttgcgtcatctgcacggccgatcatctcggacaggttggtgttaagcagcgtcagcgactgccccactgtcgcgtccatctttccgaacgcttcatcgacagcgcccgcctgtcgctggagcgcggtaatgacttggtctgccgtgagcttcccagcctggccaagctcgcgcagcttgcccatcggaacgttgagccccttggcaatttcttgcgccagcgcgggtgcaccttccagtactga

SEQ ID NO: 528594 - DNA, 654 bp, Stenotrophomonas maltophilia
atgaaggaatcaaggcgtcgagatctgctcagtcggtatcgaattcggtctcactctgaacacttgtggaagaagtggggcctgtggaaggcgtggtggtgttggtttctgttttttctactgctagtgatgctgggtttcgcctcccctggagcaaggaggatggttgagagcgcagctgaaggtgcgacttcttacgcgtttacttatctcgcggttgtgcttctatttttggcgctaatttgcgcgatgtttttgcggtctgaaaaggcaagtaaacttggaaaaaagctgggtggtgcggctcaagttgctgctatcggtgcggtcgggatggtggcgtttggcactgtaagggtgctggaatctcttgtctctagtcaattggcatgtgtcagtctgcatggcgttctctggctggttcttatgccgctattgctggtttttttcgcaattttttccagtgtgatgtttcccgcggcgcgacgagtgggaatgggggatcagcgatctgattcgatgccgaggattgccgcttggatcttgctagtcatcatttcgttatcgttcttttttgtcggagatccgtacaggattgctggcgtcgatggctacaacaatgcgcttagatcattagagtgtctgtcgaactag

SEQ ID NO: 528595 - DNA, 138 bp, Stenotrophomonas maltophilia
atgatcagcaaggcgttcgacccgctgctggcggcgcggtcggcgctctatgggtatccgacacagctgccgtcggcggagaacatcagccggcagtacttcaccgggtacatggagtttgaagaggtgcctgcctga

SEQ ID NO: 528596 - DNA, 534 bp, Stenotrophomonas maltophilia
atgaacatgggcaagctgcaggcgcagatcgacaaggacaagaaggccatgcagtacggcctgtcgatcagcgacctgtctccgctgacggaccaggagaagctgggcgaggcggtgaaggagctgcagcgggcggtggccggtggggacaccagcgccgcgcagtcagcggctcaggcggcgctgggcttcggccggaacctctacgccagtggcaaggactacaacgggctgtacgaccaggtgaccgggctcatcgacggcatgaaggtgggcaacctggacaaggatgacggcaccagcatgggccaactggcggacgctatcgaggccctgccggacaacttcagccgtgccgtgttcgacctggtggtggacaacaaggctcaggcggagacgacggcagcagtacgggaaaccaatgcacttctgaccgatgcccgctcattgctgcaggacctggtctccgtgacgacgcaaggggtgcgcaccagcaccagctcggccattcgcgcggctctcaacgcaaggtaa

SEQ ID NO: 528597 - DNA, 750 bp, Stenotrophomonas maltophilia
atgcgcagggattggtggtctgcggactggttccctgtcggggggcacacgattggctcagccgccaacggtggggccgcgagctacaacatcctgcgcaacggagccaacgtgtcgtgcaagcctggggagaggttctgcgcctcgaccaagttcctggcacatcgatgcgatatcgccttcggcatgattttctacgatgccgatggcattcagatcggggagccgcaagcggcagcgtccgcacgcaatccgcagggtggttcggtgtacgccaactatgccacctctacacgattcgccactgcgcctgctggtgccgcatctgtgcgtcctgtgctgttcgtttggaccacgaccgaaaccagctgcaacttctggctgcttgagccgatctttgcccgcgtgacggcgcagcaaacggtgccgcctccctaccagctcggcgttcgcggcatggattacaaatatgcttcggtcacccaagcgattgaggcgcgaacgacgatcaatgagaacgggattgccgagtatcgagccagctggaccatgtcgcttgacgccaatggtcgggtggccggtatacgttcggtgaacaacggcacgacgagcacgattgatttcctgttcgacaaggtgcgatttgtgtcccctggcaacggccggcggatggaatacagcgatgggcacttcaccggatacgacgagaacaacaagcggcgcatccgtcttggaacatggagcagctga

SEQ ID NO: 528598 - DNA, 363 bp, Stenotrophomonas maltophilia
atgatggttcccctgatccagtccctgctgcagggtgatgcagcggttcggcacgcgctgggcgacccgatccgattgtggccgggaaccgcgccacaggatgcagcactgccctacgcgacgtgggaggtggtcggcggttcgcccaccgcgatgctgtccgaggcgccgccggccgacggctggcgagtccgattgaccgtgtggggcaaagccctgacgcaggccaacggcgcggccgtcgccatccgcgacgcgatcgagcgcgtaggcagcatcgaatcgtacaacccgacgcctgacagcgacggcgcggacgcctttggcatcgccttcgacgccaggctcctgcaactgcgctga

SEQ ID NO: 528599 - DNA, 399 bp, Stenotrophomonas maltophilia
gtgtttgaccgacctcccgtccggtccggcccgggcttcggattgcaggtgttcgacgcccaggaacgcgttgtgttcgactcgcagaaccggtacatgcgcgtggtggatgctcgcaccttggtgggctctacgccgtccgcagacgtgaacttaggtccaggcacctacgcgcagatcatcaccgtgccgggctttcgctggaccggcgtgcaagcctcgccgagcgcggattggcagtgggcttgcttcgcaggcttgcttacatcaaacggaaacggctacacggtcgcccaagggacgactggggaggggacatatgcattctttggcaatccggcgccccgggcgattagcagccagatgcacatcatgaccgtaaacgtggcggggtactga

SEQ ID NO: 528600 - DNA, 672 bp, Stenotrophomonas maltophilia
atgcatgcgccctgcccacgcccactgccccgtcggcccccgcccagcgcggggcgttcacctgaccgaactgctggtggtggtcgtggtgctggcggtgcttgtcagcctggcacttcccgccctgggaaccgcactggagcaactccagtcggatcgcctgcgcatgcagttgcacagcgccctgaaccaggcacgggcagctgcactcagccggcgcaggaccatcggcatctgtcccagcccagacgggctgacctgcggcgacgattggagccatggctggttgctgtaccagcctggacacgatggctcgactgcccctttcctgcatcaggcgctgaccccgcgcaggcgattggccgcccgcagcacgaccgggcgcccagcactggaattccgcgcgaacgggcgcagtcatggccgcaacgcgagaatcctgatatgccagcacggccgtgcccaggccgaggtcgtcgtcagcaatactggacgagtccgctcccaacgattggatggagactctggttgctgaaggcctgcctgcagacgctgcaaactgcaaaaaaaaagccgcgagtcatcgcggctttttttgcatcttgcgcccgaagttggactcgaaccaacgaccccctgattaacagacggcacgaatgggctttgccgtga

SEQ ID NO: 528601 - DNA, 837 bp, Stenotrophomonas maltophilia
atgagcactgacaagaccctggcggacgtgcagcccggtgggagggtgaggctgggggatcaggccctcagcaccagcgaaggtgcgcgcaggtacgtcgccgactacttcgccgtgcagctgagccgccacgacttcggcgactacatcttgaccgagctggccgctgacttcgcatgtgcgctggctaagcacgtctccgcccggccctccccgggtggtcaggaggatgcgctggaattgctggaagcgtatgaccaagccgtcgaagaactctcggcggaacgctccgaaggttggaacgaggacaaccgacgccctcagttggaagcggatgtcgccgagctgcgcgcagagttgatagccgccctcgccgcccgccagccggtggcatcaaatcaggtagtcgaagatatcgagcagctgccttttgatacctcggctcagccgtccggaaattccggagcactggccgttgatggcgcccgccagtcggtgggggagaacgaggaagattacgtcgagtttcttgaccgccaaaacgactcattgcgcagggccatacacgcaatcatggcgaaactcgcgttcttgcttgacgaagatcaatttgcggatgtggatgctattgccctatccgctggtgtatccccgcccgcgcaggccgtggacctggggcagttccgccccgctgttgaatgttggcggtggacaaaagccgtagccgtgaacagcggagagctagacactgaaatgaaacggtcagcgctatttgaagtgaacgaggccgaccgactgctggccctgatcgacagccaggaccgacccaatggctga

SEQ ID NO: 528602 - DNA, 228 bp, Stenotrophomonas maltophilia
atgaccaccgacaacaagactatggctgtcgatgtgctggcggcgctgcggcagatcgctgatggcgaaggagacgcccaggttctcgctatgcgagcccgtgcggcagtcgccgagctgatcgaggcggcaggcgcgtatcacaaggcgcgaaacattcagcagcgcgtcgattcatcggctcaactcgtcgccgcactcgcccgcgtcaaaggagaatcagcatga

SEQ ID NO: 528603 - DNA, 231 bp, Stenotrophomonas maltophilia
atgccgtacatcagcgttgaagtcgatctcgatgagttcgatgacgatgacattcgtgacgagtacaacgcccgaaagttggggcagctgtccgagacgaacgtagatgccgtggaccacggatctgacctgatagtggagcgcgcttttcttgtggcccgctctatgagccagctgcccagcgagatcaaggacttgttctggaaggttcatgggcgggctatcccatga

SEQ ID NO: 528604 - DNA, 162 bp, Stenotrophomonas maltophilia
atgaacccgtttgaccaactggacgcagcgtttgccgcgcagttcggagcgctgccgccgatcaccccgccggtgtcgttggccgacgccgccatgaaccagcaggaggccattgaaggcgtctgcgttgaaggagattgcgatgccgtacatcagcgttga

SEQ ID NO: 528605 - DNA, 483 bp, Stenotrophomonas maltophilia
atggccgccatcgcatttggactgccccgctcgaccacccggaccggctatgcgtcggtccgcgaccacaagcgttccagcgagcttgcccgggaagagcgcggcctgccgctgcacccggccaacggcttcatcgcctgcccgtcgtgcgatggcactggtgagatctaccgcaacgacagcgccgtcggcgatccgcagtgcgagtacggcgtggcctgcggccgctgcggcggcgaaggcgagattgccgacggcctgatcgacccgctggtgctggtggcgaagtaccgcaagggccgcttcacctgggcgatgagcgagcgccgggcggctgaccgccggcattcctacagcctgtaccggatgcgcgccatgcgccactgcgccgggttggaccaggtcgacatgctgttccagctgcaccagtgcgggaacgagctggaacgctcgatcgccagctggaaggcggtggcagcatga

SEQ ID NO: 528606 - DNA, 252 bp, Stenotrophomonas maltophilia
atgtgcaccatggttgctgtgcgaacgggcgtcgaggaattggagtgcaacaccattggcgagctcgctgaagctctgggggttcggccgcgtgaactgtacccaatcatcaacgcagacgccgacgcgatcctcgcagacgagtgcctttgcaatgttgatgtggagaagctcggtgggcgaaaggcaacccacgcggagggtttccctttcccggagttcatcatcgaaatgacggaagtgccggcatga

SEQ ID NO: 528607 - DNA, 255 bp, Stenotrophomonas maltophilia
atgagtattcaagagacgcacggtgagtcggtagccgatatgctgtaccggcagaggctagaagctatcaagtggactggaaaggagccatccgagctggtcattaccagttttcaggagaagcagctgcgcgcggagatggagccgctcttggtcccctacgacgcgggcgagacgcccgctgatggcatttacttctgcgggatcccggttcgggtaatcccgatgtgggagaaccatggcagcgccacgtaa

SEQ ID NO: 528608 - DNA, 348 bp, Stenotrophomonas maltophilia
atgaatagccacgcaaactacgcaaacggtccgcgcgagcagtacgaccccaagttcggctgcaccggccagaccttcatcgagccggaaaagggcgcctcccaggtggacgagctcctcaccgagcacgcgcgcctgttgagcgatttgtcagatgaaattgtccgcgcccgtcattgcttcgacgcagtgctgctgccggagccgccgaccggcaactcagactccccgaatgtggatcccagcccggcgcgctcagcgctcggctacgcgatcaaagaccagagcgatcgcgtcaggtcgatgctggccagcctgcgcagcatcaatagccgcagcacggtctga

SEQ ID NO: 528609 - DNA, 363 bp, Stenotrophomonas maltophilia
atgaactacgagaccattgagcaagagatcaaagccaagggcctgaatgccccgcgcgtgacgccggacgccatcgaggcggagatcacccactgctactacatcaacgcgggcgaagcacaccgcgccaattggccggatctcaacgccaaggacgaagaacacccgtccatcaacctgctgaccttctgcgtactggttctgcgaaacggctttaccgtcaccggtgaatcggcctgcgccagcccggagaacttcgacgccgagatcggacgcaagatcgcgcgccagaacgcagttcagaagatctggccgctgctgggcttccgcctgcgagaccaactggcccagaaggagggctga

SEQ ID NO: 528610 - DNA, 189 bp, Stenotrophomonas maltophilia
atgaaaggctggaaaaccaacgactacttcagctggaagtcctggtcgcgtatccaagaagaaaagcgcgacgaggagctggccaagaacagcgccagcccgttgccgatgctggctcttgccggcgccttggggctggtcgctgtgacttgccttattggccttctggtgtttgcgtttgggcgatga

SEQ ID NO: 528611 - DNA, 213 bp, Stenotrophomonas maltophilia
atgagcaacacgttcaaaaccacgaccggcgccgacaagacttgcgccagttgcggctccatctacagcaccaagatcttcaccgcgcccttcaaggacaacgatgcggtcaactgcagcgtgtgcgggaatgtgctggatagttggcggtcaacatcgatccccacctacacgctgaaacagcgcggccctggcgcaccgccagtggaatga

SEQ ID NO: 528612 - DNA, 369 bp, Stenotrophomonas maltophilia
gtgaacctgtatctgatcacgctggtcaccgcgctgggcgatgccgtgcgctttgccgaggtccacggcattgccctggagcgctttgccgaagtgctcaacgccgggccgatggccagcgacgtatcgcggatcaagctggacaagatgctcagggaagacttcgccgtacaggcctcgatcaccgacgtgctgaagaacagcgggctggtggctgcggcggcgcgcgaggcaggcatgcaggcccccctgatcgacgccagcgatgcgctgttcgcccgggcacagcagatgggcctgggaggccaggacatggcggcggtcctgcaggcgatccggggcaccccgccggctgccggcggtgcctga

SEQ ID NO: 528613 - DNA, 219 bp, Stenotrophomonas maltophilia
gtggcccaggcagccaaggacctggacgttcacgagaacgtgctgcgcaagtgggttcgtgagttgcgagaggagccccaggaggcgttccctggcaacggcaagcagaaggcccaggacgcggagatagcgcgactgcgcaaggaggttgccaagctcaaggtggagcgcgacatcctaaaaaaagccgcggcctacttcgcgaaggagtcgatgtga

SEQ ID NO: 528614 - DNA, 528 bp, Stenotrophomonas maltophilia
atgaaccgtcaagaagccctgattcagcgggcactgcgtggctccggtctcggcagctacggagctctggcaaagaagatgggggtctctgccgcaaccatgtcccagtggcggagctacacaagcaagctgtctgacgagcgcgtaactcagctatcggaactggccggagacgatccgggcgtctggctgatcaccatgatggccgaggaatgcaacatcgtgccgctgcgcaagtccctgcacgacatcgtggcaaaggtcgggaaagggatgtccatggcacttgccatcggaatcgcaagcctgccctgggcgggaggtgcgaaagcatctgattttaaaggcttttcggagcaggtgcaggcgcgttctgtatattatgttacagccagactgaccaaggcgaccgccgcccgggcccaacccgcgctgcaggctcccccttcaaatggccgccccaacaccggcagaaccgcgccccacaggccgaaccctctcacccggcatccaaacgccctcgtgtag

SEQ ID NO: 528615 - DNA, 282 bp, Stenotrophomonas maltophilia
atgatcgatccactcgttaccttcgcgctgctggcggccatcgcggtcgtctccatcggtgccgctcgcatcgtgtcgtggctgctggaccggcgtgaatacaccgccagctcacagatccgcgagcaggcattcgtcgcccaggcatctgccgatctggccgctaccggctggaccgcgtatcacgaatcgctctatcaggccgagcttgaagcatcgcgccgcggcgatcttctcgcagctgcacgcttcgctgagcagcaggaggccgcaagtgcataa

SEQ ID NO: 528616 - DNA, 240 bp, Stenotrophomonas maltophilia
atgaagtacatgaacgttgctcgccgtttcgccaacaataccgccgccaagatcagtgccggcactgctgcactggttgcatccggtgcagccctggcatcaggcagcacctcgcccggtgcagccatcgctggtgaagtcagcggcggcaaggccgacatgggactggtcatcggtgcgtgcgcggttctgctcggcatcctgatcgtgtgggcctacacccgtcgggccggcaagtaa

SEQ ID NO: 528617 - DNA, 441 bp, Stenotrophomonas maltophilia
atgccggtgtgcaccggcgagaagtgcaacgcaatggagtatgccgcgcttctgatgcagtggcgatcaacttgcgcgctggaaaagatggccggcgagaagaccgaggcgccaggcaccagcaaaaccgacgctaacgggaacggcgtgcccgacgtattggagggcaggggggacgtgacgccgatcggtgatggcgcggctgacattgccggcgccaagaagtggggtattcccctttctaccgacaggctcgataccagcaacatgttcggtggtggtggctcctgtccgcagcccccggctatcacgatcatgggcaaaaccattagcgcggcggatgtcccctacttctgcaggattgcggcaatccttcgcgggctgatcctcatttttggtgcgtacacggcgattcgaattctgatgggagcattcttctaa

SEQ ID NO: 528618 - DNA, 321 bp, Stenotrophomonas maltophilia
atgggtatggtttccgactggatcacagatgccacaacgtcgcttgtaggcaagttgaaggatgcggcagctggcatgcttggcaagatgcttgccaccttcggcctgacgacagtcacctttaacgcgctgcttccgaagctgaaagagttcgttcttcagttcatcggggggattgatgggcaggcaatggagatgctttcgtacctcggcgtgggcacgtgcttctccatgatcctgtccgcactgacggttcgtatggcttggaggatgttcattgttcccaagtccgtagccgatcagatgggagcaggctcatga

SEQ ID NO: 528619 - DNA, 1191 bp, Stenotrophomonas maltophilia
atgatttattggtacaccgggcagcctggacacgggaaaacccttcacggcatcgagcggcttcttgagttcaaagatcagggtcgcatcgtgtacgcctgcaatatccgcgaattcgactacgcgaaaacgggcgttctagagatgacgccagaacagttcaaagactggcccaacttccttcctgatggcgcggttgcgctggtggatgaagcttacgagcacggcatgcttcccaagcgtccgccgggatcgaaggtgccatttcacgtcgagcagttggcaaagcaccgccacaggggcttggatttcatcttcatcagccagtccccggacaagcaatgtgaccagttcgtgcatgaccttattgagcgtcatgtgcatgtgcgtcggcgcttcggcacgaaattcgtacaccttcgcgagtttgacaagttcgaagcgcgtgcagagaaagccactccgcttgtgacgaagcgaaaggcgcttcccaagcgtccgatgggtacgtataagtccaccgaactcgacacgaccgagcgcagaatcccttggttctatatcgcgcttccgatcctgctagttgcgggcgttgtcatgatgtacctggcgttcgggcgattggataagcgggtggctggtgaagacgccgccgtggtgggcacaaaggcaggggctgctgcactgcacgacggagcgtcagcgacggcgggcggtgcagctgcgcccaagtcctcaacgccaatcaaggattacgtcgacaagttcctcccgcgcatcccatcgcaaccgtggagcgctccggtctatgacagcgcactcaacgtgccggcagaacctccacgtttgttctgcatgtcttcgcttggcggcgagaacggtcttggtcagcacgacgatcccagttgcacctgtgtgacggagcagggaacgcggtatgagcttgcggacgagccgacgtgtcgaatgcttgctcgccacggtcagtacgagccgtatctgccaaagcgcgaggaccggcttgtagacggtcctactcagatcaaccgggcaatgcaggaaatcaaccagcgccagattgagggcgcggcgatttcgagaggacagcgcgccatgggcagcttccccgagtctccgccgattcctacaagctcgtatatgaccactccggctggggagaaccggctatga

SEQ ID NO: 528620 - DNA, 627 bp, Stenotrophomonas maltophilia
atgaccagcggcgggcgtgagctgctcaaatggctggcgcttgtgctgatgaccggcgaccacgttgtgaccgtcttcggcctcacctatgtgcctgtcgtttccgagcttggccgggtggcatttccgcttttcgcgatggtgatggccttcaatctggctcagtcaggcgcggacgcgtcgaagtctgcccggcgtttggcagcttggggcatcgccgcaacgccggttgctgtcctggcattcggccaactggtgccgctgaatgtgctgctgacgttcgctgcggccgctaccggtgtatgggccattcaacggcgatactggtcgcttacggcgcttctagctgtgatcgttccggtgtggctggattacgcttggcccggcgtgtggctcgttcttgctggatggcggtggtatagagggcagggcactcgaccttggctggtgtgggcctgcatgggattgctgtgcgtgtacaacggcaatgcttgggcgctgctcgccattcccttactgcggctcggccatctcaatgcaccagtgccgcgcactggaagactcttctactgctactacgtggggcacttggctgtgctggtgttgctcgcgctgtcagtcgcttag

SEQ ID NO: 528621 - DNA, 219 bp, Stenotrophomonas maltophilia
atgcggaactggcacgacgcggtcaagttggattgttcgtcgcacctgagccatttctgccgcagtctcggcctcaagcttccgttgccattcggctgcctgccgatccagcatggcctgttcttctggtgttgctggccgcatcagctcgcgggtcatggctgctgcttggcgccgggcgttccactcaatgaggcccattccaatggctacgagtag

SEQ ID NO: 528622 - DNA, 324 bp, Stenotrophomonas maltophilia
atgcaccagcgccgacgcctgcaggtgatggtggcgatcccggcgagggcggcggaggtgacggcggcggcaccgatccgggcggtggagatggcggtggtgacaacggcggtggagacggcgacggggggagtggcaaccccggaggtggggatggtggtagcggtggtggtgatggtgacggggatggcggcggtgatggtgacggcgatggcggcggcagcggtcccgggccgggcccaggcccgggagagggagacggagacggcccgggcgaagtcggtagcgatggcggccccctgtacgagcgggacaagaacctga

SEQ ID NO: 528623 - DNA, 606 bp, Stenotrophomonas maltophilia
gtgcataagcccatgcgtgccctcgttgcctgcgagtattccggccgcgttcgcgatgctctgcgtagccgcggcgtcgatgctatgtcctgtgatctgctgcccaccgaagttgcaggcccgcactaccagggcgacgtgcgtgacgttctgcacgatggctgggacctgctgattgcacacccgccgtgcacccatctggcggtgtccggcgctcgctggttcaagcacaagcagcaggaacaggcagacgccttggacttcgtgcgcttgctgctcaatgcgcccattccgcgcatcgcgctggagcagcccatttccatagtcgccagtcgtatcgccccgacctcacaggtgatccacccgtggcagttcgggcatggcgagcgcaagacgacctgcctgtggctgatcaacctgcctcacctggtgcctaccaacatcgtcgccggtcgcgaagagcgcgtgcatcgcatggcgccgggtccggatcgctggaaagagcgttcccgcaccttccagggcatcgctgatgcgatggctgagcagtggagcaatgtcgagcagctgccgctgatgctgcctttggcggtggccaatggctga

SEQ ID NO: 528624 - DNA, 282 bp, Stenotrophomonas maltophilia
atgatcgatccgttcattgccttcgtgctgctggcggtcatcgtggccgtatccattggcagcgccaaactcgtttcgtggtgcctcgaccggcgtgatcgtgccgccgtccagcgcgccaaggaagcggccatcgtcgcccaggcacgcgccgaactggccgcaaccggctggaccccgagccacgaggcgctctatcaggccgaaatcgcggccaccaagcgcggtgatcttctggccgctgctcgctacgccgagcagcaggaggccgcaagtgcataa

SEQ ID NO: 528625 - DNA, 246 bp, Stenotrophomonas maltophilia; identical to SEQ ID NO: 516609

SEQ ID NO: 528626 - DNA, 570 bp, Stenotrophomonas maltophilia
atggcggacaaagactactccctgcaggcactcaacgagttcatcgactatctggccaataagcaccttctgaacaagaacacggcgcagagccggaagggagccgcgaacaagatccttggcgtgcttgacgaccaggaggcctccgacctcaggaccatcgacctggacttggtattcactcggttcgctaacaaggcaggcaaggactacaagccggacagcctgatggtctatcggagccgactcagttccgctctcaccgacttcttctcgtatgtcgagaatccggcccagttccggcccgccgtcaaaagcaatgggactgggtccgcgaagaagccagcaaaaagcgtacgaaaaacagatgagcgtcccgcagaaagtaagcctgccgtggactttcagagcccaccccagacagcacaatcaagtgctcccggcagcgtcaacgttccagtaccactcagggaaggaatcacggtgcagatcaccgggttgccggcagaccttaccgaggccgaggcctcccgcctcgccgcaatcatcaaggcgtatgccatgacttga

SEQ ID NO: 528627 - DNA, 210 bp, Stenotrophomonas maltophilia
atgagcaccacccaaatcggcgtcaagtgttcctgtggaagcaacaagttcgagacgcccacgaacccaaaggcgtcggacaggatcaagtgctccaggtgcggcgcgagcggtacctacggcgaggtgatgcgccgggccacctcgcaagccaagaccgcagttgagaaacagctcaaggacatgctccgcagggcgggattcaagtga

SEQ ID NO: 528628 - DNA, 405 bp, Stenotrophomonas maltophilia
gtggaggtggacggggtccggtacccatcctccaggaaagctgccaaggcgctcggcctgagcgtcacggcggtgaacggccgctgccactcgcccaagtggcccggctacctgtggctcggcgcaaccccgggccgacgcgaggtgcacgacccgtcgacggttcggatgggtagggagctgatcgagccctcccgctggccggacgacggcggcgcgctgcgcgtcaccgtgctggaccccaactgcgatccgcccaggctcgtgcgccgggtcggctggctccgctgcatgtgctgcgggcgctcgcacttctcggaggacgtggcgcgcgcccgcatgtgcctagactgcggcggcgctggaggcatgcccaagggcgcgcgcccaaccgactgggactga

SEQ ID NO: 528629 - DNA, 246 bp, Stenotrophomonas maltophilia
atgagtgagaagctgacggtggctgaggtggtgcagcgagcggcccagattaacgccatgctggacgcgatccacggcacggcgcccgatgcggtccgggcgatgggcgggcgcgacgccatggcccggcgcagcgagatgacctgcatcggcccggtgccgcgactggacgcggacgagtgggagcgcatgtcgcttgagtacgagaaccggcgcgagcatggcagcgtcaaccggggccactaa

SEQ ID NO: 528630 - DNA, 2379 bp, Stenotrophomonas maltophilia
atggccgcaaaagaaaacgcccgcgtgcaaggcgggcgcaaggttacaactgaccaggagatggagcttgccgaagctcacgggatcaatgatgccgcccgtcgccccgccgataagccatcgttcgagtacaacgtcggaccgtacatccgcgccggcctgacgctgatcccgctgcacaggcacgacgccaccgacgcgaggggcaggcagcgcgggaagtcgccgcgcgacggcgcctggcaggcgaaggactacgactcccgcgccgtagtcgagcgggcggcccgagacgggacgaacgtcggcgtgcgcctgtcgccagggtggctggtgctcgacgtggacccccgcaacttccccgagggccgcgacccgctggccgagctggtgcgggacctgaggctcgacctcgcgcaggcaccgcacaccgtgacggggtcgggcgggcaccactactggttcaccaagcccgccgacgtgcagctgctcgacagcctggaggactaccccggcgtggagttcaagagccacggccgccaggtcgtggccgcaggctccgtgcacccgtgcggccgccgttacgagtgggacgacctgtcgcccgacctggaggacgccccggacctgcccgccaccctgctgcgcatggcgcgccgcccggtccgcgcgcacggcgacgccgccggcctgggcgagctcacgcctgagatgctcgcgacctccctggagcacctggacccgtgtgacttccaggaccacgactcgcagtggctgccgctgatgatggcctgccaccacgcgaccaacggcgaggggcggcaggagttcatcgactggtccacgcaggacccgcgctactcggacgacgcctggacgatcggccgtcggtgggactcgctccacgccagcccgtccggagggcgtcgcggtcgccctgtgaccgtgaagttcctgcacaaggtcgtgcaggaggcaggcggcgaggtggcgcgcaccgaggcggaggacgacttcgacgcgtgggaagaccccgccgagctcggtcagggcgtggacgacgcagcgctgcgcgagccgccaagggccgagggcatcgcggccgtcatcgaggagatgaacgcccggcactacgtcgcgctggacaatgggttccaggtcgtcaccgaggagccggacccgatcttcaacggccgcgtgcgctaccagcgcatgtcgaagagcgacttccgctcggcctacgagaaccagctcgtcgagcacaacgacaagctgatgagcagggccgacctgtggctcaggagcccgcaccgtcgcacctacaagggcatcatcttcgacccggcgcgcgagctggagcacgagggctggctcaacatgtggaagggctggtccgtcgagccggcgcccggcgactggtcgctgctgcgcgagctcatccgcgacgtgctcaccgacggcgacccggcctcgttcgagtacgtgctgaactggatggccttcatgttccagcaccccgagaaggtcgcggaggtcgccgtcgccttcaggggcgcgaagggcacgggcaagagcacgctgggccgtacgctcgccaagatcgccggggccagcggcctgcacatcgccaacccgtcgcagctcgtggggcggttcaactctcacctccagaactgcatcctgctgttcgccgacgaggcgttctgggccggcgacaaggcgggcgagtcggtactgaaggcgctcgtgacggagccaacgatgacctacgagggaaaggggcgcgacaccgtgaccgggcggaaccacgtccacatcgtcatggcgtccaacaacgagtgggtcgtgccggccggcatggacggcgagcgaaggttcgcggtgttcaacgtcaacgagcggcggcgcggcgacaaggagttcttcgacgccctcaaccgccagctcaacgggggcggcctggctggcctgctccacgagatgctgagccgcgacctgggcgactggcacccgcgcgacagcgtgccgcagaccgaggcgctggccgaacagaagctcatgagccagagtcccgaggagtcctggtgggacggcctcctggatgccgggcgtctgcccaacttcctgggcgacctgccctgggacgcggaggccgtcgaggtggacaaggacgagctccacgccgactacgtcgcgcacgccaggatgctcggcgtcaggccgaagacgaaggcggggctcggcatggtcatcaagaataaggcggggttcgatgacaggcaggtcgtcacccacgactgccgcaagacctggcggtgggtgctgcccaagctggcggacgcgcgcgccatctgggcgaggcgcgtgggccgcggctga

SEQ ID NO: 528631 - DNA, 1725 bp, Stenotrophomonas maltophilia
atgccgctcgaacagtgcttcgtgggactgtgctttgcaccgttggatcccgctgctcaaaagatcttcggattctcagagttcctcgcgggtctcgcgctcatgatcttggcatggacgattgctgacgtccgctatcgctttcgcgttagaacagcgccaattccattgcaaggtttgacttttggggtcgtggtcgtagttggcacccttgctctattgacggacctatggcgtgctgaaggatggatggtgccgcgaggcaatttactttcgcccgcgtcatggcaggcgatcttggcgggattgttcctgctgaccttcctgacttggacgtggtttgccttcatccgaccgcccatatacggaaagcgaaacgcaaagcgattcgctcaaacgctgtataggttcgttctcaaaggctctccatcggaccttgcagtggttgccgacgagcttgcgtactccgcgaaaccgctcattcgccatgcgacgaacatagatcgtttcgagcgtttcagaagagggaaaggagagggcgatcgaaggcccgagcccccgacggtagaggcattcgcaaatgacattcttcttctgattgcggataagaggctttgccgagcaatcgttgaatcctcgccggccaccgctttagccttcttccaagaagttggtgggacgaaaaagtacggcgtccaaataggcacctttggcaagaacatcgtcaatgaggcactgatcaataaggagtcgtttttgtaccatgaggctgagggctatgagtctggcctaatcggctacataaagcctctgagtcaagccatgttctccaaccatgaaatggtagagacgatcgacactctgctcgatcccgacatcatgggaaaatcgaagtgggatgcgggccagtgggggggctattgtcgaatcgtgctaatgacattccgagactatgtcgagaatggtcacggaaatcactcattcgccttgtatcgggctaagggctacatcgagcacgcggcgatggatctttacaagttgaatggcgttgcgaacagcgcttgggatgacgaccttcaggctaggctccgagtaattatcgagttcatcaaggatgcggtagagctgcttgataagaaagacgttccagattacgtccgaatggaaaggcgcaaaagggatcggaactcggttggcaccttctatgaccacctcgctgacatgatcttcgaagtgttattcgctgcttcaacggttcgatctccagtggatttgtgctggtggattcagcacaactcggtatggggaaaacttttcaacttccacaatcttgacggaaaggctgccgccgtcgtgaagttcaaagtccgtaggctcatctacaaagaagtcgccgaaatgaaccgctttccaaacttcaagggcgcaagagtccttggattttgcctgaacgtcatggggatacggcccggcgatcgacgttacaacaaggacagccatgctctgcataaagcgatccttgcctggacgaagaagaactacgcatggctacatggttaccatcccaaggtcgcagaggcctgccttgttgatggcattacttatgatgcggaaaacttgaggatagttaagacatatccagcgaacggattaaggcgagagcccgcgtatgtgtaccttgacgttgatccggcagaacctgggcgcgggccggacgacgagtaa

SEQ ID NO: 528632 - DNA, 294 bp, Stenotrophomonas maltophilia; identical to SEQ ID NO: 503047

SEQ ID NO: 528633 - DNA, 807 bp, Stenotrophomonas maltophilia
atgacagtgaacgagttttcagaacaggacaacgagatgccatctttcaaccatcaggacggccgtcatgtcgaaatagacggcgcgaacatctactacgaagtccaagggaatccggatggccctgctctggtgttcctgcatggtggtttcggcaatatcgagaccttcaatgcagttgcgccacacctcggcgacaactatcggctgataggcatcgacagccgtggtcagggtaaatcgacactgggcactctgccgctgacctatcggcgcatcgagcaggacgtggcagcggtgctggcgcatctggccatagagcgatgcaacgtcatcggtcatagcgatggaggcatcgcggcgctgcggctcgcggccaccgataccgtaaaaatcgacaggcttgtgacgatcggtgcgcattggacactggcggcagatgatccgacccgtgcgatctatgagggcgtcacggcggcgagctggcaggagatgttcccgcagagtttcgacagctaccaagcacagaaccctgaacccgatttcgagaagctggcctcggcgctcgtggcaatgtggctcgcttccgattcagatggctaccccggagagcctatccggaaggttgcttgcgacttgctggtcattcggggcgacgaagacccgctggtctcccgcgagcatgccgtcgaactggctgaccgggtgcaaggtgcccgtctggcgaatctgcctttcgctggccactccccacacgaagagaagccggcgtgggtgctttccttgctcgacgccttctttgcatga

SEQ ID NO: 528634 - DNA, 771 bp, Stenotrophomonas maltophilia
atgtcgatacgcgcggcatgcctggccttccggatcagccaggcttgctaccggtacgaagccaagcaccaggccgagaacgatgagatcgccgactggctgctacgcctgacggacaacaaccgcaactggggctttgggctgtgcttcctgtacttgcgcaacgtcaaaggctttggctggaaccacaagcgcgtgtaccgcatctacagggagctggagttgaacctgcgcatcaagccacgcaaacgcctggtgcgcgagaagccccagccgctatcggtaccagaggccatcaatcaggtgtggtcgatggacttcatgcatgaccagttggaggacggcagaagcttcaggctgctcaacatcatcgatgacttcaaccgcgaagcactgggcatcgaggtcgacttctcgctgcccacgctgcgggtgatccgcacgctcacacaggtcatagcctggcgtggcaagccgcaggtcattcgctgcgacaacggcccggagtacatcagcgcggccatcgaggcctgggccaagtcgtggggcattcgctttgagcacatcgaaccgggcaagccacaacagaacgcctatgttgaacgcttcaaccgaacggtgcgctacgaatggctctcgcagtaccattggacagaccttgatgaggtcaggctgtgcgccacccaatggatgtggatgtacaaccatgaacgcccaaacatggccttgggcggcatcacccccaagcagcggttggccatggccgcatag

SEQ ID NO: 528635 - DNA, 267 bp, Stenotrophomonas maltophilia
atgaagaagtcccgattcaccgacagccagatcatcgaggcgctcaagcgcgtagaggctggtcttgccgtgcccgagctgtgccgcgagatgggcgtcagcacggccacgttctacaagtggcgctcgaagttcggtggcatggatgcctcgctgatggcgcgcatgaaggagctggaggaagaaaaccgccgactccgcaagatgtacgtcgaagaaaagctcaaggccgaagtggtctcggaggcactcgcaaaaaagtggtga

SEQ ID NO: 528636 - DNA, 393 bp, Stenotrophomonas maltophilia
atgcgtgaaaacgatcacctggcgatgctcggccagatccaccagtcgtttggcgaccgcctcctcaaagcgctggtccagggaggaaatggggtcgtcgaagatcacgggcatgccccgttcaaggcccgtcgcgtcggccaggaaggccgccaacgccacaatgcgttgctccccctcgctcaggatttcacgattcttctgggcaccttgcgcgtccttcagctcaacgtagaaggtgaacgcccctttaccttgggatcgatacgacatgcggacgggcagcgaatggccccccagcgcccgcaactcggcattgaagcggtcgcaatagcccttggccaactccgattcgccgatgtcattgcttttggtcgtcaactggctggttga

SEQ ID NO: 528637 - DNA, 837 bp, Stenotrophomonas maltophilia
atggatggcctcaagcagctcagcggcttggggggcttccaagccaatagcagcgcactgggcctgccaggcgacatcggtgagaggactgggcaatgccttcttcagcgtcgtcagcgcgtcttccgcgctcttggcttctgtctgcagggtgtcgttgagatagctctcgaagctggccaagcgggccttgccgtcgtctcccaacggttgctggcagaggacacaacgggattcgtccccaacatgggggaaagggtggtcacggtaggcaagacctgtcgaatacgcctttgcagcgtcccaaagggttcgccacacggcgtctccgatgcccttgagcggcaacccgttgaggaatgccgtggcataggcggtggcggcctggcgcttgacctctgcattgctgcgggcatccaagagggcttgggccttctcgtcgctcaagctctccctcaacgccgagacgcttgtggccatctgcgacaagcgttccagctctccgacggccttggcgtgggccacttcagggttcgcctgggccagcgcggcctccagcgccaaacgttcatcgttcagtgcagcggggaaggcgcaacgctggttgatctcctcttcggtcagtttcgccgtcaacttccggaggaccgttgcagcgctgctctgcgcatggtcttccgggatgatgggcagtttgctggtgagcttggccgcgcgggccttcaactgggtggccaagtcatcggagatcttgatgagcatcccgacgaaccgcatcgcccggggaagatgggtggcggtggtggcgctgtctccgagctccagcgctgtggctga

SEQ ID NO: 528638 - DNA, 588 bp, Stenotrophomonas maltophilia
atgcgtctcgttgtctgttgctttaaagggggcgtggggcgcaccacgctttcgctcaacctcgccgccgcgtttgccggccaatcccgcgtgctcgtcaacgaccgcgaccctcagtgcggttccgtggcgtggtcagcgatgagcgacggggagaccccgttcaccgtgagccgtgcctcatccccaggcttcgacctggagattcaagacctgccgcccagcgccccagtgaaagaccagctgccggacgcggacctctacatcgtcccaacgctgctcgacgggggcagttacgtcgtctacctgcggaccatcgacacgctgcgacgtcagggcaagcccttcctgccggtcgccaatcgggtcaacgtgaagcgggcggagcaccgccgccggctggaagatcccagcctggcaggcgccatcgtcattcccgaacgcgcagcactggccagctattacgaactgggggaaaccgtgttctccatgcgaggagctggcgtggacaaggcccgagaggatattttgcgggtaggtcaggctatccaaacaaggttggccaacccggctcgggggcatgcatga

SEQ ID NO: 528639 - DNA, 684 bp, Stenotrophomonas maltophilia
atgaggaggcgttgcccccgtctacgcccgcgcttcgtgtcgcggacgcggcagcggttcaaccggagccctcgccagcgcatgtcgcccatgctggctcgacctcaacaacggccagccgcaagaagggttggtcaatcgtcgttgtggccagcgtcgcctgcttggtgctgggtgggggcattgcttggtgggtcactcgcgacaccgggaaaaacgaacccgctcccacggcggctcctgcgtctgccgtggctgcgcctgtttcaactctggaagtgccgggcccgggggttaagcaagcgccccctgtttcggctcctgaacccgagcaagcgccggttgcggccgaagcgccgcccgcgttgccggttgagaagggcgccgtgcctgctctcgcagaagcgcccagggcggcggcacgggccgaggttcaaccggtggagaaaggcgacaagcacgctccagacgcagttcgaaagccggcccgggtgggttccaaagcgatgcctgccgcggaagccagagcaaagcccatggctaggaaatcggcagcggaaacgccgcgggatgaaccgcagtggcaggagaaggcagacagcgacatggacgcctgggcaaagaaggctggaatcaactaacccccttgcgcaaacaagatggtcggttacaagtaaatggtag

SEQ ID NO: 528640 - DNA, 387 bp, Stenotrophomonas maltophilia
atggcactgacgcttgaacaaatccgaaagaaaaaggccgaggccgaggctttgctggccgaaatggaaaaggccgaaggcgatgcgcttgcggccgaagccggggccagctttgcaggagtctacgagaccttgcagcagttcgggcagcattacacgacaaagcagaagaacgatctgaaggcgctgcttgagccacgcaagccgtcttccgcaagcaccggcatcagtcgcgccccgaagttccagatcccggatgggaccacgtgggctggcactggacgtcagccgaaggcattccttgcatgggccgaaactgctgaaggtaaagcgtggaaaaagaaacacccggaccaggaatggccggcgcacccgttcaaggcctga

SEQ ID NO: 528641 - DNA, 657 bp, Stenotrophomonas maltophilia
atggaaatcggcgtatggaagaccaagaagggacttgctcttggcgctgcgggagttttcgccgctggcgccgtatgtgcttggacgctgattggcgctgagcccggcagtagagccgattgggttgcggcagctggcacttgggtgatcggtgcagcagcgtgcgtactggctcgtcagaacaacctgcgtgaagatagggccgaccgcgagcagaagaatgctcggctgattgaacgacgcaagaatgcgcgccggatgatcgcattggccaagtcgtgccgcgagtttgcgctcaaagtagacgcaatgagcgtttcgtccaataagccttcgctggcaaacgctaaggcagttgcgcaagcggcttatgtgcgctgcaaggctgcaaacttcgatctggccatcttcgacgtcgaggaagaaagtgtcgaattgatcagtgaactggagagagacatgctcgctctcactacgcttattgagaatttccaagcccatattgctgaagagctggtcgcggatgtgaccgagagctacaacttcaaacacatggtgcaagctgcgtcttgggttgctcgagatgcagaggctcttgtaaagcacctcgaggaggtgctttcggtgagacttgctcaagatgctcatgacaactga

SEQ ID NO: 528642 - DNA, 282 bp, Stenotrophomonas maltophilia
atgaccgcgcccgctttggcattcactctgctaggggccgctgtggccacttccatcggctgcgctcgcgttgtttcgtggctgctcgaccggcgtgattacaccgcctcgcagcagtcccgcgaagccgtcttcgtagcccaggcacgcgccgaactggcagcaaccggccggacccccgatcacgaaaccctctatcaggccgaaatcgccgccaccaagcttggcgatctgctcgccgcagcccgctttgccgaacagcaggaggccatccgtgagtaa

SEQ ID NO: 528643 - DNA, 387 bp, Stenotrophomonas maltophilia
atgacaacgctgaaagtcgggatcgccgacccggaggaaatgaaagcccgcaccatgcggatcgcgcgcggcgaggaaaggcccgcgcagggcgatccgaccgtttggttcgcttccaccgagtccttcgcccggctgttgtcggcgggcaatcgcgaattgctccgcgtcatctatgagcaggaacccggctcgctggaggaactggcgcagcttacgggccgcgcgacaccgaatgtctcgcgcacgctcaagaagatggagagtttcggccttgtccgcatggagaagggcaagggtctcaagctggtgccgaaagtggtccatgaccgtgtggagctggtgctgcccctgatcgaacgccgcaagaaaggaggacgcatatga

SEQ ID NO: 528644 - DNA, 315 bp, Stenotrophomonas maltophilia
atgtgcgcagcacgccgtagcgcaaagaggggccgcccacgccaaccggttccccgaacgctccccgacgacctttatgattatgactgcgaccccgtgccgcgcatcagctcgccgcgcgtcagtccgccccatgtctttgacatcgagaagctgcccgtcatcgacgactggcccgatgaagtgccgatcaccgaagccgagatcgcggtgttcgagcgctggttcggcgacgtgttcgacgagatgttcggatcgctcgatctgcccgatggcttgaagatgttatctcgtgatgataaggaaaagccctga

SEQ ID NO: 528645 - DNA, 222 bp, Stenotrophomonas maltophilia
atgaccaagctcaaactcggccccgtcgccgacgacaagcccgtcaagatcacggtggatctgccggcgcagcttcaccgcgacctgaccgcctatgcacaagtgctggcccgcgaaagcggccagcccgccgccgatcccgtccggctgatcgtgccgatgctggagcggttcatcgccacggatcggggtttcgccaaggcgcggcgcgcacctggctga

SEQ ID NO: 528646 - DNA, 1134 bp, Stenotrophomonas maltophilia
atgaccgagaacaccgtcaccgaaaccgccgccccgatgcggctgcgcgccgagccgccgcgcgtcacccgcctgtcccgcaagatgctggccggcgtcggcgcggtcgccctggtcggcatcggcggcgcgctgatctatgcgctccagagccgcgacgcgggacagggcggcggcgaactttattcgaccgaaaaccgccccacggcggacggcctcgccgggctgccgcgcgactataccggcccggtgctgggaccggccctgccgggcgatctcggccgtccgatcctcgacgcgcagaaccggggccagcccgtcgccaccccggccatggcgacgcccgccgtcgatcccgcagaggaacgccgccgcgccgaggaagaagctgcgcgactgagcaccgtgttcttccagtccggcccgcgcaccgcagcgccgaccggaaccgtggccggcctcgccggtctcggcgcgcaggacggcacgacagggcagaaccgccacacggcgtttctgaatgggccggtcaaccggcagaccgtctcgcccgatcgcgtcatgccgcccgcatcgccctacatccttcaggctggggccgtcatcccggccgcgctcatcaccggcatccggtcggaccttcccggccagatcaccgcgcaggtgacggaaaacgtctatgacagcccgaccggaagcctgctcctgattccgcaggggacgcgcatcgtcggccaatacgatgatggcgtgaccttcggccagcgccgcgtcctgctggtgtggaaccgcctgatccttcccggcggtcgctccatcgtccttgagcgcctgccgggcgcagacgccagcggctatgccgggctggaggatggcgtcgattatcactggtgggatctgatgaaggcggccggtctctccacgctgctcgcggtcggcaccgaactggcgaccagcgacgacgatcgcctgatccgcgccatccgcgacggggcgcaggataccgtcaatcaggcgggccagcagatcgtccagcgccagttgcaggttgcgcccacgctcaccatccggccgggcttccccgtccgcgtgatcgtcacccgcgaccttgtatttgccccgacaggaggctga

SEQ ID NO: 528647 - DNA, 990 bp, Stenotrophomonas maltophilia
atgacccgcgccatccacagatcgaccgccgccgccttgcttttgtcggcgaccatgctggcgggctgcgccaccaaccgcacgccgcagttcagctatgacgccgacgtgccgccgctgccgaccgtgccggccaccatcaccgacgatcggccccggccgctgcacaccccgccgggctggaccgtggcgcggggcggcaccgccgccggcacgccggcgggacgcgtcgagaacgccaatgccgccgcccgcgtggaaccgcgacgggaaggctattacaacgccatccagatttatccgtggtcggaaggcgcgctctatcaggtctatgcctcgcccggccagatcaccaatatcgcgctcgaacccggcgagagcctgactggcgcgggaccgatcgcggcgggcgacaccgcccgctggatcatcggcgacaccgaatccggttcgggcgcgaaccgccgcgtccatatcctcgtgaagccaacgcgcccggacatcgccaccaatctggtggtgaccaccgaccggcgcacctacatgatcgagctgcgcgcgcgtgaagccctctacatgccctccgtggcctgggcctatcccgcgccgcctgtcggcacgcgccagacggtgccgaccgcgccggtcattcccgtcgaggccgcccgcaactatcgctatggcctgaccggcgacagcccgccatggcggccgatctcgatcttcgacgatggccggcgcgtctatgtcatcttcccgcgcgggatcgcgcagggcgagatgccgccgatcttcgtgctcggcacggatggcgagccgcagatcgtcaactcccgcatccaccagaacatcctgatcgtggaccggctgttcggcgcggccgaactacgccttggcagcggcgagcgtcagcagacggttcgcatcgtccgcgtcgagcagcggcaggccgccacccgacccgccaccaccggagactccccgtcatga

SEQ ID NO: 528648 - DNA, 690 bp, Stenotrophomonas maltophilia
atgagcatcttcaaacgaccatcgacccattacggcaagacgccggaacccgagacaccctatcagaaggccgcgcaggtctgggacgagcgcatcggctcggcccgcgtgcaggcgaagaactggcggctcatggccttcggatcgctgatcctgtcggccggcttcgcgtccgcccttgtctggcaatcggcgcgcgggactgtcgtgccgtgggtcgtgcaggtggataatctcgggcaggcgcagaccgtcgcgcccgcgaccgccgattatcgcccgaccgatccgcagatcgccttccatctcggccgcttcatcgagcaggtccgcgcgatcccggccgatccgatcatcgtccggcagaactggcttcgcgcctatgagttcaccaccgatcgtggcgcggcggcgctcaacgactatgcccgcgccaacgatccgttcacccgtgtcggccggcagcagatcgccgtcgaggtgtcgagcgtcatccgcgcctcgccggacagtttccgcgtggcctggacggagcgccattacgagaatggccagctcggcagcaccgagcgatggaccgcgatcctgaccgtcgtactccagccgccgcgcgacgccggacggctgcgcgccaatccgcttggcatctacgtcaacgcaatctcatggtcgcgggagatgagccaatga

SEQ ID NO: 528649 - DNA, 1374 bp, Stenotrophomonas maltophilia
atgggcggcaccggcgtcatcgacaatttccttggggtcttcaccagctatatcgactcaggcttcggcctgctcggcggcgaggtcgccttcatcgccacgacgctgatcgtcatcgacgtgacgcttgccgcgctcttctgggcctggggggcggatgacgacatcatcgcgcgtctggtcaggaagaccctgttcgtcggcgtcttcgcctacatcatcggcaactggaacaacctcgcccggatcgtcttcgagagcttcgccggtctcggcctcatggcgtccggcaccgggttcagcaccgccgacctgatgcggcccggccgcgttgcgcagaccggccttgatgccgggcggccgctgctcgattccatctccgacctgatgggctattggtccttcttcgagaacttcatccagatcgcctgcctgctgttcgcctgggcgctggtgatcctcgccttcttcatcctcgccatccagctcttcgttacgctgatcgagttcaagctgacgacgctcgccggcttcgtgctgatccccttcggcctgttcggcaagaccgccttcatggcggagcgcgtgctgggcaatgtgatctccagcggcatcaaggttctggtgctcgccgtcatcatcggcatcggctcgacgctgttttcgcagttcaccgccggcttcggcggggcgacgccctccatcgacgaagccatggcgatcgtgctcgccgcgctgtcgctgctcggcctcggcatcttcggtcccggcatcgccactggcctcgtctccggcggtccccagcttggcgcgggcgctgcggtcggcacgggccttgccgcaggcggcatggtgctggcgggcggggcggccgcgaccggcggcgcgatgctcgccgcaaagggcggggccgcagccctttccggcggagccgccgcggttcgtggcggagcggccaccgcaggcgcggcatccgccgcctatagcctcggctcgctcggccagtccggcgcggccggtgtcgcatcgggcgtcggcggtgtggcgcgtgccgcaggttccgccgccgtctcgccgctcaagcgcgccgcgtcccgcgcctctcgatccgtcaaatccagcttctccgaaggcgcgaaggccggcttcggcgcgagcgggggcacgtcgagcatgggaacggtcggcggcggggcggcatccgccgcatccgcgtccgcccccgccgctggctcgccgcccgcctgggcgcagcggatgcagcgccgccagtcgataaaccacggcaccaccatggccgcgcacgccgtccgctccggcgatagccatggcggcggctcttccgtcaacctctccgaaagtgaccgctcatga

SEQ ID NO: 528650 - DNA, 288 bp, Stenotrophomonas maltophilia
atggacggcaagatgctggcccggattgcggccgttgtattcgtcgccatcgccatcaccgccacggtgatcgagatgacccgcaaggacgatcccgcgcccgccagcaccgcgccggcgttgcaatcgcccgccgatccgctgcgcgcgacgcttcgccgttgccagcggctcggcgaggcggcgacgggtgatccgtcctgcctcgccgcatgggcggagtcgcgcgaccgcttccttggccgcacgcccgcgccggccgccccacctcagaccgaggggcagtga

SEQ ID NO: 528651 - DNA, 774 bp, Stenotrophomonas maltophilia
atgatccatattcgtcttccccgtatcgcgggcgcgtcgctgctcgccctcgcgctggccgcgccggtctcgctgtcgccgatgctgaccagcccggcccatgcgcaatgggtcgtctatgacccctccaactatgtgcagaacgtgctcaccgccgcgcgcacgctggagcagatcaacaaccagattcagagccttcagaacgaggcgacgatgctcatcaatcaggcccgcaatctcgcgagcctgccatattcctcgctccagcagcttcagcagtccgtccagcgcacgcagagcctgcttcaacaggcacagaacatcgccttcgatgtcgggcagatcgaccaggcgtttcagcgccaatatggcaacgtctcgctgtccgcgaccgaccagcagctcgtcagcgacgcgcgcacgcgctggcaaaataccgtgggcggcttgcaggacgcgatgaaggtgcaggccggcgtcgtcggcaatatcgacaccaaccgcaccgaaatggccgcgctgatcggccggagccagggcgcgaccggcgccttgcaggcaacgcaggccggcaatcagatccttgcgctccagtcgcagcagctttccgacctgatcgccatgctcgccgccaatggccgctccgacgccttgaccggggccgaacgcgcgaccgccgccgagcagggccgcgaacagcgccgccgcttcctcacgccgggcgccggctaccagccgggcaatgcccgcatgtttggcaacggcaacaactga

SEQ ID NO: 528652 - DNA, 282 bp, Stenotrophomonas maltophilia
atggcgggcggcctcgaacaactggacgcggtgccgggcttcaccgtcccggtccaccgggcgctgaccgagcatatcctgctcggcggcgcgccgcgctcgctcgcgatcctcaacggaacgctggccggggctgtcggcctcggcctgcgcctctggctggtcggcatcgccatctgggccatcggccatgtcgcggcggtctgggcggccaagcgcgatccccaattcgtcgaggtcgggcggcggcatctccgcatccccggtcatctggcggtctga

SEQ ID NO: 528653 - DNA, 333 bp, Stenotrophomonas maltophilia
atgatccgcaccctctcgcgcggctatcgcgtcgccgcgaccgccgcttccaccctcgtcatcagcttcatgatcgctccggccgcccatgcgtcgggatcgtcgatgccgtgggaagcgccgctgcaatccatcctccagtcgatcgaggggccggtcgccaagatcgtcgccgtcatcatcatcatcgccaccggcctgacgctggccttcggcgacacgtcgggcggctttcgtcgcctgatccagatcgtgttcggcctcagcatcgccttcgcagcgtcgagcttcttcctgtcgttcttctcgttcggcggcggggcgctcatctga

SEQ ID NO: 528654 - DNA, 462 bp, Stenotrophomonas maltophilia
atgacgacccgcacccgcatgaacgtctatttcgacccggccttgctcaaacaggtggaggcgctggcgctgcgtcggaacatctcgaaatccgccatcgtcgaagcggccgtcgcgtccttcctgtccggcgacaccagcgagaagctggaagcggccatgtcgcgtcggctcgaccggctcggccgccagatcgggacgctcgacgaagatctcgccgtgctcggcgagaccgtctcgctgttcgtcaacatctggctggcttccacgccgccgctgccggaaagcgcgcaggccagcgcccgcgccaagggagccgaacggttcgagcgtttcatgcagacgctcggcaaacggctcgcgagtggagacaggttcctgaaagagctttcgcgcgacgtggagtcggcacccgatggtcttgcgccagacgggtccgagacgaatggcgatcccggctga

SEQ ID NO: 528655 - DNA, 1983 bp, Stenotrophomonas maltophilia
atgcgtggaggccgaatcctctggggtcagatcaccgtcgtcctgaccatcgttgtggtgatgacatgggcggcgacgcaatggacggcctggcggctcggcttccagccccagcttggcgcaccatggttcgaggcggccggcctgccgttgtattatccgccggccttcttctggtggtggttttccttcgacgcctatgcgcccgcgatcttcaccgaaggcgcgatcatcgccgcgtccggagggcttgtcgccatcgccgccgccatcctcatgtcgatcatccgcgcgcgggaggcgcgcaatgtcgcgacctacggttctgcgcgatgggcagaggacagggaaatccgcgccgccggcctactcggtcccgatggcgtggtgctcggcaaattcgaccgggactatctgcgccatgacgggccggagcatgtgttgtgcttcgcacccacccgcagcggcaagggcgtcggcctcgtcgtcccgacgctgctcacctggccgggaagctgcatcatccacgacatcaagggcgagaactggacgctgacggcgggcttccgcgcgcagcatggccgcgtcctgctgttcgatccgaccaatgtgaaatcgtcagcctacaatccgctgctggaggtgcggcagggcgaatgggaggtccgcgacgtgcagaacatcgcggatattttggtcgatcccgaaggcagtctcgacaagcgcaaccattgggaaaagacttcgcattcgctgctggtcggcgcgatcctgcatgttctctatgccgagaaggacaagacgctggcgggcgtcgccaacttcctgtccgatccgcgccgcccggtcgaggcgaccttgcgcgcgatgatggacacgccgcatctcggcgaagctggcgttcatccggtcatcgcatcatcggcgcgtgagctgctgaacaagagcgagaacgaacggtcgggtgtgctgtccaccgccatgtcgtttctcggcctctatcgcgatcccgtcgtggcgcgcgtcaccgcgcgctgcgactggcgcattgccgatctggtcgggagcaaacgcgcggtcagcctctaccttgtcgtgccgccatccgacatcaaccgcaccaagccgctgatccgcctgatcctcaaccagatcggccggcggctgaccgaggaactgaccacctccggcaagcgccatcggctgctgttgatgctggacgaatttccggcgctcggccggctcgacttcttcgagtccgcgctcgccttcatggcaggctacggcctcaagagcttcctgatcgcccaatcgctcaaccagatcgagcgcgcctatgggccgaacaacagcattctcgacaactgccatgtgcgcgtcgccttcgccaccaatgatgagcgcaccgccaagcgcgtgtcggactcgctcggcaccgcgaccgagatgcgcgattccaccaactatgccggccaccggctcgcgccctggctggggcacctgatggtgtcgcgccaggagacggcgcggccgctgctcacccccggcgagatcatgcagctcccgccctcagaggaaatcgtcatggtagcgggaacgccgccgatccgcgcgaccaaggcccgctatttcgaggacaggcgattgcaggagcgcatcctgaccccgccgacactcgcgacggtcgcggtggccgcatcgtcggacgactggtccgcacgcatcgtcgcggcggcggaaccgtccatcggcggcaccgcaagcgacggcgatggcgatcccgccaatgccggtatccgccgcgagccggaattgcccgaacatgaagaaatcatcccgcctccaccatcgcccactcaggagttcgagccgctggacgaggaacccgatgtggacgccgccaaggccaatgcgatgcgcgcccggatgcggatggtcgcccggcaggcgtccctcgatcccggcgacggcatcgagctttga

SEQ ID NO: 528656 - DNA, 963 bp, Stenotrophomonas maltophilia
atgcggcggcgttcgacatcaatgacggatcggcaaagtgggttgcctaccgctctcggctcccgcatcccactcgcctccctagtccagacactcgccgtcgcggaacatctcagcttctgtcgtgcagcggtggcgctcggcacgacacaatccagcgtgagcgcgcggatcaaggcgctggaggaagaactcggcatcctcctgttcgaacggaacacacgcggcgtccggctcaccgaagccggacgccttttcgtcgaacgggtgtcggccggcgtcgatcagcttgaccacgcggtgaagagcgctggactggccgcctcgggcgaacgcggccgtctgcggatcggtatccacgctctgatcccacacagcttcctcgccaaactgatctgccagtatcgggccgatcatcccggcatcgaagtcgagatcgccgaaggcacagcccgcgatacggttatgcagcttcgcgccgaccggctggacgtggtgttcgtagcgggcacccccgatcttcccgattgccatagccgtccgatctggaccgaaccgctgttagcattgctgccggaacagcacccactcgctgcgcaaccggccgtcacctgggacgatttggcgagcgaagctttccttgtccgccatggcggcaccggcccacaggtccatgaccatatcctgctgcgccttgccgggcgctggtccgcgccatcgatcctgcgcttcgatgtgggccgaagcacgctcttgtccatggtcggacagggcttcggcgtcaccatagctggggcagccacatccctcttgccgtccaacggcgtcgtgttcctgcccatcgccgacgagctggagccgatcgccttctccgcgatctggctgccatccaatcgggaagcggcccttcacaatctcctcgacctcgccaaagacatgaacggcctggtccgcgcccgatag

SEQ ID NO: 528657 - DNA, 2142 bp, Stenotrophomonas maltophilia
atgagcgagaatagcctatcccgccgtgctttcctgaccgccggtggcgcgctcgcagtgtcgatcgctttgccgggctgcggtagggcgcagacgcaagcgacctcgaccgcgaaccgcttcaacgaccgcatcgaaatccacgccgatggcacggtgcatgtcctgatcggccggatcgagatgggccagggtctcaactcggctatcgcccaactcgcggcggaagagctggacgtggaaatgtcccgcatcgtcatcccgccggtcgataccgcctttgccccgaacgagggcttcaccgattccagcgcatcgatgcgcggaaccggcatgtcggttcgtcaggctgcggcggaagcccgcaccatgctgctggctatggccgcccgccgcatgggcaccagcgcatcggtcctgtcggttcaggatggcaacatccatggcggcaccgaaaacctcacctattggcaaatcatcgcctccggcgagatgtccattcctgcgattggatcggttacgctgaaacagccgaccggttatcggctgctgggcacggccacgcctcgcaccgaccttccggccaaagtcaccggtggcgcggccttcgtgcaggatcttcggctgccggacatgctccatgcccgtgtcgtgcggccaccgagctacagcgcgtcactcaccgcgttgggtgcagagggcgtgtcctctttgcccggcgttgttcaggtcgtgcgcaatggcagtttccttgccgtgatggccgaacgcgaggaacaggcgatccgcgcggccgagcatctgcgagccgccgccgaatggcgcgaaagcgaaaccttgccgggcgacgacacgctgttttcctatctccgccgggaagccggactgagagaacagcctgatagtcgttccggccgacgcctcgcatcgacctatgaggttccctaccgcatgcacgggtcaatcggcccgagctgtgcggtggcgcagttcgcggacgagcgcctgacggtctggagccatgcgcagggcatgtatccgctgcgctcctcgctttccggtctggtcggtctgccacaaaaccgcatccgctgcatccatatggaaggtgcggggtgctacggccacaacggcgccgatgacgcggcagctgatgcggcgctgatcgcgatggccgtccccggccgcccgatccggctgcaatggatgcgcgaggacgaacatctctggtcgccttacggcccggcgatggtggtgcagatgtccggtgcgctcgacgccaacgggcgcattgccgaatggtcgagccgcatcgccagcccgccgcattcctcgcgccccggcggcgcggcccgccttctggcggcacgtcatatcgatccgcccatcgcgccgtccttcctcgacggcttcacgcaatgggcgggcggcggcagctacaatgccgatccctattacgacatcccggctcgggtggacgcgcgcttcgtccggcgcggcccgctacggtcgtcggcgctgcgcagcctcggagccttcgccaatgtcgtcgccatagaaggcttcatggacgagttggcggagatgacgggcaaagatcccgtcgccttccgtctcgaccacctgacggacgcccgcgcccgcgccgtcattgagaccacggcggagcgtttcggctgggccggcttcgtctcgccgggtcgcggaaagggcttcggctttgcccgactcaacaattacggagcctatgtcgccctcgcggccgaggctctggcgggcgaaagtggtgcgatccacatcacgcgcatcgtcgccacggtcgattgcggagaactcatcaatcccgatggcgtgcgcaatcagatcgagggcggcatcgtgcaggcagcaagctggacattgatggaagccgtcgccttcgaccgcatgagggttaggagcgccgattgggacaactacccgatcctgcgcatcaccgaagcgccggaaatcgacgttcatctaatcaaccgcaacggcgataactatcttggcgtcggtgaagcggctcaggggcctgctggagctgcggttgcaaatgctgtcgccaacctaatcggcaggcggcttcgcaaactgccattggtgcagcccgatggatag

SEQ ID NO: 528658 - DNA, 465 bp, Stenotrophomonas maltophilia
atggcgacccgcttccgcctcaacggggaaatggtgaccgctgctgcggatggcgacacgccgcttctctatgtgctgcgcaacgatttcgggctgaacagcccgaaattcggctgcggcaaggcgcaatgcggctcctgccgggtcatcgtcggcggcgaagccgtgccgtcctgtgtcgtgccgcttgccgatgtggcgggggccgatgtcgaaacgcttgaaggcatcggatcggccgaaaaactccatccgctccagcaagccttcctcactcaacaggccgcgcaatgcggcttttgcacggccgggatcatcatggccgccaaggctttgctggacgccaatcccgacccgaccgatgacgacatccggcaagcgctcgagcgcaatctctgccgctgcggcacctacccgcgcatcatgaaggctgtccgccgggcggcgcgggagatggcgcgatga

SEQ ID NO: 528659 - DNA, 999 bp, Stenotrophomonas maltophilia
atgaccgatctgttgaaacgcaaacatctcaagctggcaggcttgatggctgccgccaccataaccggcgacctcctgtcaggtggggttgccgtggcgcaggaagcaacctcgccagcagaccgcctcgtcaatcttggtgtctatcgctaccgggttggcgatttcaccctcacggccattcaggatggcggcttcgccgggccgccgctggagcgtgtcgtcaccaatgccgaattgtccgatgtgcaggcggcactgtcccacaccttccagccaaccgaccgcttcccgatcaccttcacaacgctgatcgtcgagaccgggcggcatacggtctccatcgacgcaggcgcagccggtttcttcggcccgaccgccggacgcctgcctgcgggcctggccgccgccggcatcgacccggcatccgtcgatgtcgtgctgctgacccatctgcatcccgatcacatcaccgggctgcgcaccgcctccggcgatctgctgttcccgaacgcgaccatccacgcgccggcgggcgagctgaactattggctcgacgaggcgacggctggccgtgcgccggacggagcaaaacccttcttctccaatgccgttcgtgtgcttggtcccgtctccaatgacatcgtgcgcatcgccggcgaacaggagatcattcctggcatcaccgcgattccggcccatggccacgcgccgggccataccgtctatcagatcgcctcgggcaatgacggtctgctggtgatcggcgacgtggctaacaacccggcgctcttcgtgcgccaccccgattggcaacccgtcttcgatatggatcgtgccatggcggccgagacgcgccgacgactgctcgaccgtgctgccgccgatcggctgcatatcgccggctatcacttcccattcccggcccatggttacatccgccgcgagggcgacggcttcgccttcgttcccgcgccctggattccgcagttcggatag

SEQ ID NO: 528660 - DNA, 711 bp, Stenotrophomonas maltophilia
gtgaaccgaagagaacacctcaaacttgctggcgcggcactggccgcgacagctttaccgtccaccttggcgcgcgccgaaccgactggttctgccattgaccgctcccgaagcgcgctaattttcatcgagtttcagaatgaatggttggagccaacggcccccctcaatcgactaatggaggatcggccccaactcgacgaagcggttcgcaatgcagcgcggctcatcgagagggcaagacatggcggatttcctgtcgttcatgccggtctctcacttgttgatgaccccacctatgaaattttcggaggcggtaagaacaaggccgggcttcggggagcgatcccacgagccgggacgtggcgtgacccccagcgggtcgcgtttcccgaacccttcacccccgcaaaaggcgagttcgttgtcgcgggacgttcgggggcgagcgttctcaccaattcaaacttggacgcctatcttcgcaacaaccggatagatcaaatctaccttctgggcttcgcgttacatgtctgcgtggagtccacgcttcgccatgcacatgaccttggatacgaagcgacagtcataagcgacgccgctcccgcctttacggccgcgcagcgcgatcacgtcctcaccgacgttgtccatcacttcggacatcacatcaccactgaacaattcctcagagattggagtagcgcatga

SEQ ID NO: 528661 - DNA, 690 bp, Stenotrophomonas maltophilia
atgccccgcatccgtcctgccaccttgcttgctgcattcgcccttgtcgcgggcagcgccgccaccatcgcgctcgcagacacaacgaaaggaagagccatgaccgcatccgtcaccgcaacgcagcctgccgctacgatcgccaacacgttcatgccggacggctatcacgaggtcgcccgccgcgccgtcaccgtcgaccggcaaggggcggaacttgtccgctatgagcgggtcgacgggcgcaacgccgcgctcggcggcgagcatttcagcacggtgatcggcaatggcggccgcctcaaaggcttcgcgcggatcgacctcgatctggtcggcggtcaactgccgtcacgcgaggaaacccaggccattgccatggatttcctgcgcaacgccgcgccggacctgctgccgggaatgaagattagttggatcgagccgcatgacgagccgctgagcgtcacccgcgatggccgcacggaagatctgacgctgaccggtatgaaggtgaagatgcgcaacagcgccgatggcctctggatgtgggtcatcgtcggagccgaccgtaaggtcatggtgttcgagcgcgacatcaactggatcaccttcccaggccgtcgcggcacggagaaatggctgcacgattcctggctcgtcgaaagcggtcactcgctgcgcgcttcgtaa

SEQ ID NO: 528662 - DNA, 1203 bp, Stenotrophomonas maltophilia
atgtcatctcaatctacagctaacgtaatgttacagtctgaaccaagcccgctgaccggccgccatatcgtgctgctggcgctgctgatggcctgcggcttcatcgtggtggggcagctctatgtgacgatcccgatggtcgccgggatcgctgccagcttcaacatcgagcctgggaacgcggcactgatcggcacggccttcggcgtagcctatgccgtcggctttctggctctcggccctctctctgatcgctatggccggaagcgcatggtgctgatcggtctcgtggtaacggcggttgcaacggcgctggttggcatcgccagcagcttcgggcttcttctggctggtcgggcggctcaagggcttgcggcctcgattttcccgcccgtcgccctttcgctcgtcacggaagaattaccgccagcccaacgccccatcggcgtgtcgctgatgagcttcgccttcctcggggccgccccgttgtcccaactcttcgcggtccagactggcagcagcctgtccgtcatcatgttcgagcttgcgccgctttatctgctcggcgcggcgggtctctatctcgtcgtcgcgtcgaagaacgccgcgacctccgccggaaataccgcagacggcaatcgtcttacatcgctcttgggcgatcgatgcatcgtcgcggcatgggcggcggccgtcaccgtgctgttcggcttcgtctccttctacagcgggatgcaggcgttcgggccgggcatcggggtcgatcttcagactgtgcggctgatcggcctgccgccgctgctgctcaccttcgcggcggcgccggtgacgcgacgcttcggcgctccggtcacggcccgtctcggccttgcgctcgcggcgttggcgatcggcatcggggcctttgcttcacccgccgcgatcatggtggccagcgccatcctctcggcaggcgtcgccttcgccgtgcccggcttgatcgcgaccgtcgccggacgcgcaaccaacgccaatcgcggccttgcgcttgccatctacagtttcgcgctgttcctcggggctagcttcgcaccacccatcgcccaggccctcgccgggatcggcatcgtcccgctcctgctgttgcctgccgtgctgctgctcacggccatcatcattctcaccattggcatccgcccgcctcacccctctcgccctagctga

SEQ ID NO: 528663 - DNA, 378 bp, Stenotrophomonas maltophilia
atgcagatcggagagctatcggagcgcgcgaaggtcagccatcgcacgatccattactacgagcgcctcggactggtgaaaccagccgagcgtgagggcgtgggctatcgctattacgatgaggtctcggtcaagcggctggagaagatcgccgccctgaagcgtcttggcctcagcctcgacgagatcgctgccgtcatcgacctctatttcgaggatgcgagcggcatcaagggcaaggaaaaggtgctggagattcttcagacccagctcaccaaggccgatgcccagctatctgaactgaccgcattcaagcgcgacgtcgaaaccaacattgcccgtatgcaagacctgatcgcggaagcgaagcagggataa

SEQ ID NO: 528664 - DNA, 2055 bp, Stenotrophomonas maltophilia
gtgagcgccgacgacgagaaccgctttcgtcccagacccggccgcatccgcgccgatgcccccaggctcggcaaggcgaagagctttctcacgcaggcgaagaagctcgcccgccagcatagcaacagcccgtcacggtcatccacgccgcgccccagatcgtcggcaaccgccaagggcggcaaggccgcgcgaacgagcggcgggccgggcctcaagcgcgggcgcggcgcgaccttcgtgcgcgcccgcgcgctgtcgggcggttggaaacacagcgcgccgggaatgcgccgcgtcgtcgtcaagacccgttatgttcagggcgcgggccggaacgggaaatccgccgcccatctgcgctatatccagcgcaacggcacctcgcgcgacggcgagcgcggccagctctattccgcgaccgaggatcgcgcggatggcgcagccttcgtcgagcgcggcgcggacgatcgccaccagttccggttcatcgtctcgccggaggacggcgcggacctgaccgacctgaccgaacacacccgcgacctgatgagccgggtcgaagccgacctcggcacgaagctcgattgggtcgcggtcaatcaccacaataccggccatccccatgtccatgtcatcgtgcgcggcaaggacgacatgggcgagaaccttgtcatcaacggcgactatctcgccaacggtatccgcgagcgggcgagtgagttgacgacgctggagcttggccccgtcaccgagatagagcagagccgcaagctgtccgccgagatcggccaggaccgcttcacccgcatcgaccgcgccatgaccgaagaagccgaagaccgcttcctcgatctacgccatgagccggccgacgcgcagcggcagttcaaccggacgctccgcctccgccgtctcgccaggctggagaagatgggcctcgccaccgagcacgcgcctggtgtctgggaaatgagcgcgcggatggaaccgaccctgcgcgaaatgggcgagcgcggcgacatcatccgcaccatgcacaaggcgctgaaagccgatggcctggagcgcgatccgatgaccttccagattcacgacgccgcgcccgaaatcccgatcaccggccgcgtggtggacaaatatctgaccgacgagctgggcgagaacctgaccctcgtggtggacgggatcgacggccgcacccaccatgtcgccgggatcgaccccgcccgcgtcgcggacgcgcggatcggcagcgtcgtcgagatcgggccgcccgatacggcaagccgtccctccgaccgcgcgattgccgccatcgccgagggcggcgcctatcggccgagccgccatctggagcaggccaaatttgaggggcgcgttccgggcggcgactatcagggctatgtcgatgctcatgttcgccggctggaggccttgcgccgcgccggcatcgtcgagcggatcgacgccgaccaatggcgtatcccgcaagacttcgagagccgcgccgccgcctatgacgccggccgcaaccggcaggccaatatccgcatcctctcggtcccccgcctcgaacagcagatcggcgcggatggtgcgacctggctcgatcggcggatggtctcggccgagacatcggatctcgcgccctccggcttcggtcagcaggtccgcgacgcgatggaccgccgccgcgagcaccacatcgaccgtggagatgcggcccgccagcccaatggcagcatcgcctatcgccgcaaccttcttgccaccctgcgcgagcgcgaggtcgcccgcgtcggcggagagatcgctgcgaccaaggggctgccgttccgcgcgacaaaggacggcgagacggtcagcggcaagttcaccggcacggtgcagctctccagcggcaagttcgccatggtcgagcagagccacgagttcacgctcgttccgtggcggcccgtcatcgaccgtcagctcggccgtgaggtcatgggcgtcgtgcagggtggatcggtgtcgtggcagttggggcggcagaggggactggggatttag

SEQ ID NO: 528665 - DNA, 924 bp, Stenotrophomonas maltophilia
atgcgatcttctgtcatcatcgcgctcaaaacccgcattcctttgttcgcgggaaagccgtctcattccttcgtcccgctcgaccacaagtcggccggcgcgcgcagtgcaggtcaggggcggcctccggccggcgcttcgcgcgcaccctcgaccgcagcgagcacgctggcaggctggtggttcggcggagaaaggtcggcccggcgctatgccgttatgatgctcgcgggcgtgctgttggtcggcatgacgcccaccgcgacgctggcgcagtcatcgcccgtcgcgcgcacggttcccggcgattctcatggcgctcatatcgccgaggcgtcgcagcgcttcggcattcccgaactctggatacgggccgtgctgcgcgccgaaagcgcaggcgacgtgcgcgcggtgtcgtcggccggtgcaatgggattgatgcaggtcatgcccgacacctgggcggggctgcgcgttcgtcaccggctcgggcgcgatccgtaccagccgcgcgacaatatcctcgccgggaccgcctatctgcgcgagatgtgggatcgctaccgcaatgtcgcggctatgctcgccgcctacaatgccggtcccggccgctatgacgatcatcgtgcgaccggccgtgcgttgcctgccgagacccgcgcctatgtcgccgcgctcgcgccgatccttggcggcgcggcagcacccgatccgatggtatcgccgccgtcaccgccgcccgactggcgcgatgcaccactcttcgtcatgcgggcaagcgacccccggtctgccgccgtgcagccgtcgggcgtgcaatccgacgacgcccgcgcaaccgtgccggcgcgcgagcggcgtgatacggagccgcaggacggcagcatcttcgtggcgcgcgcggacgatccgagagcgccatga

SEQ ID NO: 528666 - DNA, 336 bp, Stenotrophomonas maltophilia
atgccgcagatcggtcaattcacgcgcgaggaatccggcttcaccgggcgcgttcacactttcaccctctaccgcgagatcagcatcgttcccgccgatccttcggacgccgagaacgcgccgcactaccgcgtccatcacggagccgatgacgggccggagatcggtgcggcgtggaagcgcaccggcgagaaggccggcgaatatctgtcggtgctgctcgacgatcccgccttgccgcagccgatccgcgccaaccttttccgcgacgacgatgccggcgcgtcatggtcgctgcactggtcacgcccgaagccgcgcgaggagcgggattaa

SEQ ID NO: 528667 - DNA, 558 bp, Stenotrophomonas maltophilia
atgacgcgcttcggctacgtcatggtgacgtatttcaccgcgatgggcatcggcgtcgccgcgctgatcccgacgcccacgaaactggtctggaacgccaccgccagcgcgcccatcggcttctacacgatcgagccggccgagcggatcgacgtgccggagctggtcgccatcatgccgcccgaaccgctcgccgccttcatggtcgagcgcggctatatcgggcgcggcgtgccgctgctgaagcgcgtcgccggcctgccggggcagcgggtgtgccgcctgcgcgccacgatcacggtcgatggcgtcgagctgggcgaggcgctcgaccgcgatcgaagcggccgcgatctgcccgtctggcagggctgccgcatcatcgccgagggcgagcttttcctgatgaactggcaggtccgcgacagtctcgacggccgctatttcggtcctgtcccggccgcttccgtcatcggccgggccatcccgctctggaccgatgaggaaagcgacggccgctacgagtggcgcgcacccaccggcaccacgccacgctga

SEQ ID NO: 528668 - DNA, 519 bp, Stenotrophomonas maltophilia
atgagcggcaaagccccccgccgcgcgcacggccggccgcagccgaacggacccgcgcccttcaccaccctggtcgagctgaccttccagaagcagaagatcgagcactggatcaggttcggccgcaagagctacgaacagatcctcgaccgtcgccgcagcgtcgtcggcttcgcgccggacagcatattcgccttcgtccgctgggcggccggcgagcacggcacgatcatctcgcgcatcgacatcgtgcgcgccatcggtcgcggcgagccgttccagacgctgcccttcgtccgtccgggcggcgacattctgctgcgtctcgatagctgggcgaaggtgcaccgcgcgcttgccgccatcgacgccgtggaagcgctcggcctcgatccggccgacgcctcgcccgattactggcggcacgtccacaaccggcttgtcgccgggctggaaccgaacacctacacgccggcgcgccatgccgcgtggatcggccgccggaggatcgagccatga

SEQ ID NO: 528669 - DNA, 1137 bp, Stenotrophomonas maltophilia
atgctgcacgatgacgatcatcgccccgccgcgcagccgtccgacgccagcgagcgcagccgtctcgcgcctttcgtggtcgcgaccggcgacgccagcccacgcgatcaacgcgacctgatggagcgcccgttcttctcgctcgccaaggcgaagcgcaccgcgccgatcctctacgaatccggcggcgtccgcgtcgaggtcttcggcatggccgattacggcatggcgaccatctgggatgctgatgtgctgatctgggccgcctcgcagatcgtcgcggccgagaacgagggcctgcgcacgtcgcggttcttccgcttcacgccctatcagcttctcatggcgatcggccgcgccaccggcgcgcgcgaataccgcctgctgaagaacgcgctgatccggctgcaatccacctcgatccgcaccacgatccggcagggcgagcattggcggcggcaccagttctcatggatcaacgaatgggaggaactgaccacccgtgacggccgcgtcgagggcatggagttcgtcctgcccgactggttctatcgcggcgtcaccgatcgctcgctcgtgctggcgatcgacccggcctatttccggctgaccgggggcatcgaacgctggctgtatcgcgtcgcccgcaaacacgctggacaccagccgcatggctggctgttcgagatcgcccacctgcacgcgaaatccggcagcatggcgcggatttccgatttcgcgctcgacctgcgccgcatcgccgcccggcaatccctgctcggctaccgcctcgatattcaccgcgacgggcggcgcgaactgctgcaaatccggcccggaaatctatccacagtgcctgtggaaaaccctgtggaaacgctcgtgacttcgggcgcaaagggtatcgggacttcgggcgcagccctatcgggatttcgggcgcacgaaccgcagttaagcctctggaacgaaacgcagaatccgactgctaacttagagtctaacagagactctaacttttcttctgaggcgcacgcgcgcgcgaaacgtggtgccagtgccgcaaggtccgtcgccgaggtgctgcgcgacatggctcgcggtgacgatgccggcgattgggggaagcggccatga

SEQ ID NO: 528670 - DNA, 273 bp, Stenotrophomonas maltophilia
atggccatccgccccaacgcggatatgccgccgcgcctgctgcgcactcaggaagccgcacgcttcctcggcatttcgatccgcacccttgagaagcaccgcacctacggcaccggcccgacctacaagaagatcggcggccgtgtcctctacgccatccgcgatctggaagcctggtccgacatcggcacccgcaaatccacccgcgatcccgacgccggcacggtctttcccgcccgcccgttgacgccgcaagagcggggcgagtgctga

SEQ ID NO: 528671 - DNA, 222 bp, Stenotrophomonas maltophilia
atggatctcaaggagatcatggcgaggaatctgcgtcgggcacgtcatgacaaacaactgacgcaagaagaactcgccgatcgggcgggcctcagcatgcgttatgtcggggccatcgagcgtggtgacgtgtccgccagcgtcacggttctcggccagatcgccgatgccctggagatcgagccgggcgatctgttgaaaaagacgatcgcgccgaaatag

SEQ ID NO: 528672 - DNA, 303 bp, Stenotrophomonas maltophilia
atgcgtgggcgaccgccgctcgatccagatgtggaagatgaagcgccgggcggctccagcatcagcgcctatgacgaagagcattacgtcacctatctgcgccttctcgacgcgtgtcgcgacggcgcggactggcgcgaggtggcgcgtatcgtcctgcaccgtgatcctgtcgcggacgaagcacgcagccggcgatgctgggaaagccatctggcgcgcgcacaatggctgtcgagcgcgggttacaggcagattctcgaacaggcggtggcgaccgcgactacgggcaaccgggcctag

SEQ ID NO: 528673 - DNA, 528 bp, Stenotrophomonas maltophilia
atgctctcccttgtggagcatggtgacgacggcgcgcagccggtcgtcacgctcgctcatctgggcggtctcgacctgcgcagcgcagcggatggctggcacggtatctggcaggcggacggcgtagtgcatcaattctggctgccgcatgccgtccccgacgctgcggccttctatgccgcgtcgctgccaatggatgcctttctcgaactgcgcgcccatgccacgcgccgactctggcgcgcgctcaccggacgcccggccggaccagatttccgcgcgctgcccgcccaactccggcaatggcacatcctctccctgcgcgcgctcgatgcacgcctgcgcggcgagagctatcgcgccatcgcccaggtcctactcggcttccaaggcacgaaagaggatttcgaggtcgatcccagcaagaacaaggcccgtcgcttggttgcccatggcatcaggatgatgcgcggcggctatcggctgctgctgcactatccgatcaagccgcctgacaaggattcctag

SEQ ID NO: 528674 - DNA, 198 bp, Stenotrophomonas maltophilia
atgctgagcatcgactggcgttctccggcggcatacaaatttgccaagggcatccctgctgccggcttcgcctgggaatatctccgccgcgacgacgagtatcgccgcgaatatcgggccatcacgacggcgcacgatccaaacccggaacgcctcgacgccttcgtgcaacgctgggggctgcgatttcccgactga

SEQ ID NO: 528675 - DNA, 843 bp, Stenotrophomonas maltophilia
atgacctaccgtctcgctacccggttcggccgcaactctcaccagatcagcgggcgtgaagccctcgacaacgaaaccctttatcgtcacgtcccgtccatcttcgcccgcgaagcccatgacagccgttcggagcgttatgtctacgtccccaccatcgagatcgtggaggggctgcgccgggaaggatggttcccgttcttcgccgtgcaggcggttccgcgcgatggcgagcggatgggccatgccaagcacatgctgcgccttcgccgggatggcggcatcggcaaggcggaggcggcagaagtcatcatcgtcaattcgcatgacgggacgagcgcctatcagatgtttgtgggcgtgctgcgtttcgtctgcaccaacagcatgattgcgggcgagcgtttcgaggaagtccgcgttccccataagggcgggatacaggatcagatcattgagggcgtctataccgtcgcagaagatttcccgcgcctgatcgatgccacggaaggcatgaaggatacgcggctttcgtccgacgagcagcgtgtgttggccgaggcgagccttgtcgcccgctatggcgaggacgaaagcccggttcgcccggaccagatcattgccccgcgccgccgcgaggatgtcggacaaagcctgtggcagaccttcaacgtcattcaggaaaacctcatccggggcggagtcgacggacgccgccagacttcggacgggcgtatccgccgcagccggacccgcgccattaacggcatagaccagaatgtcggcctcaatcgcgccctgtggacgctggccgagggaatgcatcgcttgaaggggaattga

SEQ ID NO: 528676 - DNA, 417 bp, Stenotrophomonas maltophilia
atgatcgtgctcatgttgatggccgttgcgctgatcgccggtctgtgtgttctggcctatacgctggctatctatgcgctgcccttcatgctcggcatcgaagcggcgcgtttggcctacgcctccggctccggcctgatcggtgcggggctggtcgggctgaccgcaggagccgccgcttatggtctgctggtggccctgttcatggtggtgaggacaccgatcctgcgcctcgccgtggcgctggtctttgccgcccccgctgccatcgccggttttgcgctggtccatggcatcacgcgcgatgccgtgccgtccgatatctggcgtgtgattttctgcctgattggcggtggtgtcaccggcctgtcggcgctgatgcggctggctgcggatgttgtcggaagcgacagataa

SEQ ID NO: 528677 - DNA, 2028 bp, Stenotrophomonas maltophilia
atgaccgacactatcgaaacgaccgccacggtttccgacgtccccgccgcagaaaacggcgcggtgctgtccttgccgctgtcgaaactcaagaagtcgccccgcaatgcccgcaagaccccgcacagcgaagcccatatcgaggcgctggcagccagcatcgccgccaaggggatgctgcaaaatctggtggtggagccggagacgaacacggacggcgaaccgaccggaagctacttcgtgaccatcggcgaaggccggaggctggcgcaaatgctgcgcgtgaagcgcaagcagatcaagaaatccgaaccgatccgttgtgttctggataccgagaacgatgcggcagaaatctcgcttgacgagaacgtcacccgcgaggcgatgcatcccgccgaccagtatgagcggttccgggagttggcggacaatcgtggatggggcgcggaagagattgccgcccggttcggcgtgactccgcatgtcgtccgccagcggatgcgtctcggcgcggtcagcccgaagctgatgcaggtctatcgccagggcggcttgtcgctggaccagttgatggccttcgccatcaccaaggatcacgaccggcaggagcaggtgttcgacaacctgtcctataaccgcgagccgtggatcatccggcgcgacctgaccaagatgaacgtggaggcgaccgaccggcgcgcgcgtttcgtcggggcggacgcctatgccgaagcgggcggcaccatcatccgcgacctcttcaccgaggaccggggcggctttttcgaggacgccgcgctgctggaccggctggtcatcgacaagctgggaaccatcgccgccgaagtgcaggtatcagagggatggaagtggaccaccgttcacatcgacttcccccatgcccacgggatgcgccgcacctatccgcatccggtggacctgtcggcggaagacgccgccgcctatgatgccgcgcaggaagaatacgaccgtctgaccgctgaatatgagggttatgacgaattgcccgacgaagcggatcagcggttcggggagttggaaatggagatcgagcggatcgacgccaagcgccacgcctatgatgccgacgagatcgggcgcggtggggtgttcgtcatcctgaaccatgacggcaccgcccgcatcgaacgcggctttatccgcgccgaggacgaggcaccggaaatggaggaaggcgaagatggtaaaaccgtcaccatcaccgaggatggggaaatcatatgggacgaggacgatggcgaggacgccgaaccgaacccggaagacgaggatgccggtgatgcgggaaagccgctgtcggatgcccttgtccgcgacctgaccgcgcatcgcacccttggcctgcgtctcgcccttggcgagcaaccggacatggcgcttgtggcggttgttcatgcgctcgcggcgcagaccttctatcgcggcggggaagcctcctgcctcgaaatcaggctgaccagcgcgtatctcgcgtcccacgcggacgggatcgaggacacgcccgccgcgcaggcgctggcggatcgtcatgccggatgggcatcggacatgccccgcgacgtggcggacctgtggtcgttcgtcgccgggctggatcaggcgagcctcatggccttgctcgcccattgcgcatcgctgaccgtcaatgcggtcaggataccgtgggagcagaagccgaacgcccgcgcgaccacggagaagctggcgagcgcggtggcgctggacatgacggcgcactggactccgacgacccggacctatctcggtcgcgtgaccaaggcgcatatcctcgctgccgtttgtgaaggtgtcagcgacgaagccgccgagcagatcacaggcttgaagaagcctgacatggcggaggctgccgaacagcttctggccggaaccggctggttgccgtccctgctacgcaccgcgcggcccgcgtggctggacgctgcgccggaagtggacgcctatctgcaagccgccgagtga

SEQ ID NO: 528678 - DNA, 627 bp, Stenotrophomonas maltophilia
atgggcggatacacgcaacgggttcgtgacagtattcttccgctttcagtggcgggaaacctgccggctgcgttcgacgagtggtccttcaccgacaacacagtcgatcacgagcaacccgtcgaaacctgtgaactctgcggccagcaagaccttcgctaccacttcgagatcgccaatcactataccgatgcgacgctttgggtcggctcccactgcatacttcaattcgacgtggcggtcatggagaaagggcggcgcctgtcgccagccgaggcgaagcgtcacctcaccaagctgacccaacagatgcagttggaatcctgcatccgcacactcgaacagcttgccgcgaaagagaacaatcccatcctgtcgggggctctggattactatcgcaagaacaagaagctcacgccgaaatacgccgccgtcgtgttttggaagcttcaggccttcaacatcgatcatcacccgtcgttcttccagatcgagcttcgccgcgcccaacatatcgacgatctcagacaaatgccgactgcgcgcgttcatcggttttggagtgcgttgacgaccgcccaacgtcgcaaggcggttgaactgggtcacgctgacccgaaagtatag

SEQ ID NO: 528679 - DNA, 1182 bp, Stenotrophomonas maltophilia
atgtccgaatcagcttccaacctccggctaggccgctttgtcgagacctcgattgcgggcgaaatggtgcgcgccttcgtgccgcctccgctgccgccgaaaccgccgatcgacgtgctggatcttctggagcggctcagtctggcggaacgtgccttggggcgactggacggcatcaccatgctgctgccgcgtcaggaactgttcctctacatgtatgtgaggaaagaagcggtgctttcatcccagatcgagggcacgcaatcgactctttcggatttgctccgcttcgagaccgaggcgcaggcgggacagccgatcgacgatatccgcgaagtgtcgaactatgtcgatgcgatgatgtatgggctggagcgcctggaaggcttgccgctttcgctgcgtctgatccgcgagatgcacgaacgcttgctgcaaagcgggcgtggcggcacgaaaaatcccggcgagtttcggcggtctcagaactggatcggtggctcacgtccaggcaacgcgctttttgtgccgccgccgccgaccgagatggatggttgtctcgatgcgcttgagcgattcatgcacgaggacgattcgcgtttgcccgccctcatcaaggccgggctgctgcatgtccagttcgagaccatccacccgtttcttgatggcaacggcaggatcggccgcttgctggtgacgttgtatctctgcgtcaacggtgtgctgcgcaagccgctcctctatttgagcctgtacctgaaaactcatcgcgccgattattaccgactgcttcaggaggtgcgcgagcacggggcatgggaagcctggctcgatttcttcctcaccggcgtggcggatacggcaaatcaggcgttcgatgcagccacaaggattgtcgatctgttcaaggaagaccgcgaacggattacgacagagagcgaccgggcaggctccgcgcttcgtatccatgatctgtttcagcagaacccgttcctgacggccaaccagctcgttcagaagacaggtctctcagcccccacggtcaacgctgcgctcgccgacctggagcggttcggcatcgtcgaggaaatcaccgggcgcaaacgggggcgcgtgttcagttaccggcgatatctcgccatcttgagcgagggaaccgacccgctccccactgcggcctaa

SEQ ID NO: 528680 - DNA, 1821 bp, Stenotrophomonas maltophilia
gtggcctggttcctaggcgctggtgcatcggccgcctccggcatcccgaccggctatgcaatgatccgcgacttcaaggcgcaaatcttttgccgcgagacaaacctgtcaaagcgagagatcgatacggctgatccagtgtggatcgacaggatcgatgccttttttcggcaaacgtcactgttgccgcctgacggcgatcctacggaatatgccaaggcgttcgaagcggtctatccagaagcccggcatcgccgacagtatatagacgatgcgatctccaagggcactccctgttttggacataaggtgcttggcagtcttatggctgctggcaaggtcgatagcgttttcaccacgaacttcgatccgcttatcgaggaatcggcgcattcggcaaatgcgatcctcccgatagacggccagaaccgcccgactgtggcggcgatcgattccgccgaccgtgccatgcggtgcctgaatgaatcggactggccgttggtagcgaagctccacggcgattatcagtcgatcacgattaagaacacgggatcagaactggaggaacaggacgcccgaatgcggcatgtgctggtggaatccggcaagcgcttcggaatgatcttcgtcggctatagtggacgcgacgcttcgatcatggaggcgctgaacacggttctggatgggccgtcgccatttcccaacgggctttactggctcacctcgtcagtttcgcgcttgctgccagcagtgatcgaattcctagatcgtgctcaagcagccggcgtggacgtggccgtcgtcgagtgcgcgaccttcgacgagctggctgcggatatcatcaagataaccgacctgccccagccgcttcttggccgcgtgatggcagggcgacctacgccgcgcctcgtgcccgttcaggttccacataccaaagcccgcgccttcccggtgctgcgctattcggcaattctgctcccatcgatgccgaccgtagccagacgcatcaggctgagccaatcaacgacgtcggcagaagtgcgcgagatcttcaaagtgaagggataccgagcgacggcagccgcgttggggcgtgagctagcggcgttcgggcgggaccaggaaatcctggatgccttggctccgctcggcccatcgctcgctggcacgatcgacctagatccggtcgccgatagctgggcggtggggttgctctacgacacgcttgtgcggtctctcgcccgacagcgcccgctcatcccacgctacaggcgttcgggccattcgctcgtcgttgcaacaccgcgcgatagcgatgatcctgatcgaacgcggcgtcagcaacaaaccctgtcccggctgcgcgacgcctacggcaccagtctgtttggcacagtgccaaagcttggcttcccgtttcaggagggtgtccacctcaagctggaacgagtcgatggaaagtggtggtgcggcttcgagccctacacgtttgtccagttgccccggcaagatagttcccaaacggacattgcggagggtctggtcgccgaagaagctccggctgaaatgggtatgcgagccgagcgccgaggtgatcctgccggtgactggcgccgcgagcgatgggctccgcgctataataggaattgggccagcattattggggcttgggcacagcttctaaccgaaacgggaggcacgacccgaagtgccttcgggctcgaagagggcactggcattgatgccgtgttcaaggtgtcacccgtcacagggttcagccgaccatcgcatcaccatacctacttcgacaggagcaaatga

SEQ ID NO: 528681 - DNA, 1449 bp, Stenotrophomonas maltophilia
atggcgaacccagccctcaccgagctgccgccattcacgctcttggatgagccagacctgtcgttttcgccatccgatgccacccaggtagatgtccatccattgcgtggcctcctgaacttcgggccgtattcgaaaggatcgtttagcggatacaccccccgtattcgaatcgcgacggttggcccggagagcgctttccatcgtcgcggtgacctgatgaagctgttgcggggcgtgcatcggccttccgaccgatcagaatatgtgccggaatatcccggttttgagagcctgttccgcgtgtcgcttgatgccgcgccagcgagcgcgcacatcaagtggcctgaacacctcgaccagttgccgggcgacggcaacgcgcagcatcgcctataccttgcaatggatgccgcgctccgccgcctcgacgccgttcgcaatgagttcgacgttgtgctggtccactttcctgacaactgggacacggcgacacgcggaaaattctttgacgcacacgatgtgctgaaggctttgggcgcgaagtataatattccgacccaggttctgaatgatcgcgcctttaccttcagttttaaggcctcgctcgcgtggcgtctttcaaccgcactttatgtgaaggctgcgggcacgccatggaagctcgcgccgctgaagggtgtgccggcggacaccgcctacatcggcttggcttatgccctgcgcggtgaccaacaagacgcgcattatgtgacgtgctgctcgcaggtcttcgacatggacggcggcggaatgcagttcgttgcgttcgaggcgcgcgacccggtggccgacgtggccgaagcccgccggaacccctttctaagtcgcgacgacatgcgcgcggtccttgcccgtagcttggaactctatcaggggcgcaatggcggcaacctaccaaggcgcatggtcattcacaaaacgaccgcgttcaaggaagctgaaatcgagggcgcgttcgatgcgcttagcggcgtagcggaaatagagtgcgtcgaggtcagttcggcatcgtgctggcgcggcgtctggctcatcaagtcgggcgtagagaaaccgccgtcaaaaccttcggggtttcccgtgccgcgcgggacgatggtgatccgcacgggcaattctgccttgatatgggtggcgggcaatgctcccgaggtctcaaccaaaggcgattactatcagggcaagaagagcattccccggccactacaactgatccgtcatgccggcagcgggccacttgaactcactgcccatgaggcgttggccctcacgaagatggattggaataacgacgcgctctacgacccagtaccggttagcattcgctattcgcagaaactggcccgcacgatagcgaacgtcccggacctacctcggaatgtttatccttatcggttgttcatgtga

SEQ ID NO: 528682 - DNA, 816 bp, Stenotrophomonas maltophilia
gtgacgacaccgagctatctgaactggctggtcgatactggagagcgacaagcaacggcgtgtggccgtgaaatcgagatatgggaactaaatccgcaagatgacgctgaaatcctttcaaactgggctcggcatttccgcaaccactacatcgccgatgctgatttaccgttcatggctggcggaacgggactcggcaatcccgattatctaaggaccattctctttcccgatgcgaaggtggcacccggaccgagcctccgatcgggagattttggcgagatcgtcgtcgccgactttatcgaatatttcctaggatattggtgcccacgcgagctgcgctaccaggatcgctggaaccgaaatgactcgacaaagggttgcgatgttatcgggttcaagttcgcgaacgaggacaaccccggtccggccgacgagctttttatcttcgagtccaaatctggcatgtctgcgtccggcgcgaaccggctccaggatgcgatcgatgacagcgtaaaggacagacttcgcgagggcatgagcctcaatgcgattaaacgccgtttcttcgatcggggcgaaatgggcgatgcccgaaaggtcgagcgctttcaaaacgaggccgaccgaccctttcgccggatcaacggagcggccgccattctcgacgaggccgtcttcgccgagaccgacatggcggcgaccaacggtgcggctcattttaaccaagagaatttgcgccttctggttatccgcggaccgtcattgatgaagctcgtacatacgctttacgagagggcagccgatgaggcctga

SEQ ID NO: 528683 - DNA, 3120 bp, Stenotrophomonas maltophilia
atgaggcctgaggcgaccgcgctcaccatcctatccaccgcgcgagcacgggcaaagatgcacgaattccgcgtcgcgccagcggacttcaatgcgttgccgcgcgacccgtcgctactcttctcattggcaatcggcatcttgggagatgttgcggccgccgtcgcagatacgctcgatgttgcaggagtggcaccggccgtgcttccacaaccgcccggctgggacgagttggatgaggacccacaagatgtgctacgcttttcctcagttttcttcgatgcatatttgaacgcgcagctcgatgccgacttagacaccgaattttcactcctgtgcgcagcggcatactacatcgccgggaatgtcggcagcgcgacggtaatcattcggcacatgacggagccgagcctcgacctcgcgggcgggcttggtcatctcgtctacagcatcctcaagaacagcttcgttccgaccgaggcggcccatgctcatcaaggggcgacgactgagcttctccaggcgctagctggctatttcagcttcgaggccggggcggatggcattgccgaagcgtgccgcggaatccgcgagtatttccaccgatccggctcaccgcgcgaattgctctacgccgacattgctggcgccttgtgtgcactcaagctcagaaattctgcccggacgatcctgccaacagcatcaggcttggcgccggacgcgtggcgccaagcgctcgcgaagtcgcattttccgatcgaactctggcctgctcagcagcggatcgcggatgctggcgtgttcgctggacgttccgtagtcattcaaatgccgaccagcgctggcaagactcgcgccacggaaatcatcattcgatcggcctttctatccggtcgagcacaccttgcagtgatcgtcgcaccctatcgttcgctctgccacgacatccggggcgacctggtaacggcctttgccggtgagaatgtgcgcctggacgaagcatcagacgcctatcaattcgacctcgcgctcgatgcgctgctcgccgaagactcggtgctcatcgtgacgcccgaaaagctcctctatatgctgcgccgggctccggacctcgcccagaggatcggtttggtgatctatgacgaaggacatcaattcgacggaatgacccgggggccgacctacgaactcctcctcacttcgctgcgcatgtcgctacccgctgaaacccagatcattctcatctctgccgtgatcggcaacgcgccggatgtcgctgcatggctgatcggcgatgctgatgcggttgtcggcgccgacggtctgctaccgacgacgaaaagcatcgcctttgcgagctggcaggatcaacgcgggcgactcgaatatgtgaaaccggaggatccggccgagcgagaatatttcgtgcctcgcattatcagcgatatcgctctgccgctccgcggcaaggaaactgcccagcgcagatttccggagaaaaccggcggtgacgtcggtctgttcctcggcctgcacgtcgtgcgcaacggtagcgttgcgatcttctgcggccgaaaagacagcgtgacgaagatctgctcgcgcgctgtcgaaatcgtcgagcgcggcgtcgccttggaatggccgattgaaacctcggacgccgccgaggtggagaagatccgagcactttgcgaagtcgagctcggagccggcgtgtcagcgacccgcgcggcagcgcttggaatattcgcccatcacgccgacacaccgcacggtatccgcctcgcgatcgaacacgccatgaaagaaggtatggcgaaatttgtcatttgcacctcgaccttggcgcaaggggtcaattttccgctaaaatatctgatcatcacatcgacgcgccaaggtggcgaacagatcctggtgcgcgacttccacaatctgatgggtcgtgccggtcgcgcggggatgcacaccgagggcagtgtcatcttctcgaccccgtccatctacgatcagcggcagcaatttcgcggccgatggacgtgggaccgcgcaaccgaacttctcgacgcccgaaactctgaaccctctcgcagctcgatcctggcgttgttcgatgcgtatcagcagcgccaaccgccgatcgtacaagagcttccgcccgattggctcgacctcgcgttcgccgatgccgcccggataaatgaggtggtggccgcagcgctcgcggcgcaacccaatatcagcgaacgggaattccgccggttcatcgaaggtcgcgcccgcgctgtccagaatatcgccgctttcctcgttgccaacataacctttgccgagggagaggacgtcgcagcgcggatcggcgaacttgcggctaatacattggcttatcacctcgctgacgaggagacgcgggttcgtatcgtcgaagtgtttcggtcgatcggggattcgatcacggccaacaccgatggcgaccagcgcgcgcttattcgacggtcgcccctaccgcctgcggcggttgcagaactcaaaacttggctgactgagaaccttgaaaccctgcagaccgcagtacaagagaaccgcctgttcgccgaaatctctccgttggtactccgtttcaccacgtcccgcgcgatccaggcgattagcgatcagaatgtagttccgcgctctcttgaggagtgggtggcgggcagatcctatgccgtgatcttcgacatattggctgaagcaagagttcgggtcgggcgtgactatgtcaccgtcgaagatgctgttgcgctgtgcgagagcggcttcggctacgatgttgcgatgatcgttgcatcgatagcggacctgaccgaggacctggacgacgcactgcacacggacgtcagccttctgcaaaagcagattaaatatggcctgactgatcgcgcggcggttgcgtttcacgaggccgggttcgcggataggcatgtcgcgagccttctcggtcttgtctggggaaatgtagtcgaccgtggcggcgtccgcgcagcttgccagcaagaggagattgtgcgcgcggtgctcgcgcacattccgagctatttcgtcaaggtcgctgctgagcttggaggatgggcctaa

SEQ ID NO: 528684 - DNA, 867 bp, Stenotrophomonas maltophilia
gtgccgttgagggcaccgcccactgcgccgccaaccgcaccgaccgtgttgttgagcgtgccacccactgcactgccgaccgtgccgacggtgccgttgagtgcgccacctacagtgctcccgacggagccaaccgtgccgttgagggcaccgcccactacgccaccgaccgcaccgaccgtattgttgagcgtgccgcccaccgcgccgccgacagagccgacggtgccgttcagtgcgccacccactacgcttcctaccgtgccaaccgtgccattgagggcaccgcccactgcgccaccgacagcaccgaccgtgttgttgagcgtgccgcccactgcactgccgaccgtgccgacggtgccattcaatgcgccacccacgatgctcccgacagagcctacggtgccgttcagtgcgccacccactgcactgccgaccgtgccgacggcgccgttgagtgcaccgcccactgcgccaccgaccgcaccgaccgtgttgttgagcgtgccacccacggcactgccgacctggccgaccgtgccgctcagcgcgccacccaccgtgctcccgaccgcgccggcagcgccctgcagcgtgccgcccacggcgcccacggcgccgcccaccagattgccaaccccgagcgcgctgtgctgcgcggctacggccgtctgcccagccagcttcaggttgcggtcggcgacgacttcctggccgtccggcgcctgcatgcgcaccttgccggcggcgccggtgtcgaacgcggcgctgatggcacgatcgtgggtttcacccggcaactcttccttggccggcaagcggacggccgccgtcgctctggcctggccttgcccgtcgatgtga

SEQ ID NO: 528685 - DNA, 654 bp, Stenotrophomonas maltophilia
atgctggaagcacttttcgtggcaaccgccaaggccgctcccgcggccactgcagcggcgaacaacgcagacggctggaattggctggtgcccgtggccacgctgatcttgggcttcggactgaaatggctccaggactacgtcaccgagaaggggcggaggaggcacgaaaaggagctccgacgtgagcagcgctttgacttgctgcggatgaggcgcttggaagccgagcgtgcaaacctgctggaactccagccgctggtggtcgccttcgtgcgtgccgcgaccgatgcttacaaggtgaagatgaaggccttcggatgggataggggggctgcagcttttatgcctagcagcaccatggaacgcgaggccctgctgaagtctgtggccaaggccaacgatgaagtgcgccaagcgtcggccgcgcttataccattgcagtcaaggcttcattctgaggaagttcgatcagcattgaacggcttgatcgatgttgtctgggcaaccatggacgccaaggccagcttgacgatgatgaagaactgggaaaaggtggatccgccgcacaacgaactgcacacggtgatgggccggatcatcaagcagcttgaggatgagaaccagcagctcggcgatccgccggtgcgctga

SEQ ID NO: 528686 - DNA, 918 bp, Stenotrophomonas maltophilia
gtggtgatcgagtcgaccgcctacggtgccgcaggcgacttctacgagcgctgccagacagcgatcgagctggaccggcagatccgcgccggcacggccaagctgacggcgatggactaccgcttccacttctatccgtggttccgggagccgaccgcagccggcgcgacggagacgaccagcgtggtcgggaccgctccggagcagtccgtggccaaggcgagcgctggcctggccagcgtgcccgcgcaggccgaagtgccgaaggtggccaccgcggctgctgaggcggcgacgaacccgcagaacgatctgcctacgcccacggatgcacagaaggaagccggcaactacaagaagggtcacgtccgcatcaacggccacgacatcagcatcgagaaccctgccggcagccagcgggatccacgctggcccgcactgaagaaccactacggctacttcaagggcaccgtcggcaaggacaaggaccacgtcgacgtcttcatgaccgaccgcgctgaggatccggcgctgccggtgtacgtggtcgaccaagtcaacaaggacggctccttcgatgagcacaaggtcatcatgggaaccgcgtcggagcaggaagcccgggatacctacctggccaactactcgaagggctggaccggcctgggcggcatcaaggaaatgtcgcaggagcagttcaaggcgtgggtgcgcgacccgaagaagaccacccgccgtgtcaccaggaccaagccggcggaggcagcgccagctccgcagccagctacgagcgtcggtgaaacggggcagatcgtcagcaccgcggccgaaaccgtcggtgcgacggcagaaagcggcagcgcgttggccaagaaccccaagctggccgcgcggctgaacaaagcagtgacggagtaa

SEQ ID NO: 528687 - DNA, 282 bp, Stenotrophomonas maltophilia
atgttgcagcagcaagccgtgacccaattggcggacccgcaaaccccggtcgaatctgccgtgaaggacctggcgcgggcccagcaggatctgcacatcgctgttgagcagctcgcgcttcgcctcgcaccggccctggcagaagcgaagcccgactcggcggcatccaccggacgtgccgtcggcgcgtccccgttgctcgaagacctgttccagaggcgagacgcagctgcgcagaccctcgccgtcgtcaacgcactgcacggccagctgaccctgtga

SEQ ID NO: 528688 - DNA, 189 bp, Stenotrophomonas maltophilia
atgaccagatgccggccagcggccggcactaccgccgcacccgggcagggctatgccggtgaggcggcgcgggcggtgtttgcctacctgctgggcctgggcatgcaggagcgcggggtggtccagctgccgggcgtggacagcccgagccggctgtatgccacgccgggtgcggccgacgtcgggtag

SEQ ID NO: 528689 - DNA, 1452 bp, Stenotrophomonas maltophilia
atgcgattgccaaactatctcgttgtttcatccactggcgtgtatcacttccgctggaaggtccccaagcgcttccaaggcccattgggcctgaaggtggtgaagcgctcgctcggaacgcgcgacgcccgtgtggcgcatctgcaagccctcgtgctcgcctcccgctatgctgtggctgcacaagggggcgatatggcaaagagcgtggacgaattgctgcgcagcgcgcagaaggggcgggccgactttgaagtcgtcgctggtccccacggctatacggtcaaaacggacggatcggcgcaggacaacgcagccgccgtcgaggccgtccgtctgttgaacgccaatggcgtgactgctgtcggcggtgcgcctctgcctcccagccagcgcattgcgctggaaatggctgttgaaaagtgggccaagaccctgaccagcggggctcgcaaaaccccaggtcagaaactggaggcggtgcaggcgtttgtggcgtggaagaactccacgcgcaagcgctctcccgcgcgcgtggcgctcggtgacctgtccaagactgattgcgctgagtgggttatccacctcaaacagacacccgccgagcgaaccggtaagccgctggcggacagttacattgagaccaagacgcggtggctgtcgttgttctttgactgggccatggcggcgggctactaccctaagggcgacaacattgcccgaggtcacatcaaaatcagcaagaaggccaagcgcttgcaatccaaaaagaccggctggcagcccttcgacctgccacaactgaagttgatttttagtttcacggcgcttaaggccatgcggcggcagtcgtcgcgctgggtggcggtgattgcgttgtacaccggggcgcgcagcaatgagatcgcgcagttggaattggaggacttcaaagtggtggatggcgtcaagtgcatccacatcaccaccgaaggccaagacaagagcctaaagaccgaggcaagcgaacgcatcatcccaattcatccggacctgttgggactgggcctgtgggcgcttgtggagcgtttgcggggaaggggcgaaagcaagttgttccccaatctcacgtttgacgcaaagaacggcccggccaacggaccgcagaaagcgttcagtcatctcctgagcgacacgctgaaaatttccgcgcgtggggaagggcgcattggcttgcacagtttccgcaagaccgtcatccagcggatgcaagacgcattggtggggaaggagtaccgcgttgcctacgttgggcatgagggtgggcgagagactgatgacgaccattccgccgtgtacggcaagaagatttctccggctgtactgtccgcgcaatgttttccggcgttgaactgggcagaagccggggtggtaaatatcgccgcgctggccccgctgtttgctcctgaataa

SEQ ID NO: 528690 - DNA, 708 bp, Stenotrophomonas maltophilia
atggacagagatacaacctttaaagagcattacttttgggaactccaacgaagggacgcactcaactcaagcctgtcgtttctggtcggcgttgtgacacttctgcttggcggcacttacacgatggcgaaatccagcagtttcgacttcagtccgtggactttcgtgtccactgccgcgctcatggtcaccaccgggcttctctttgcatctgtgtacttcgtagtccgcgcatacactgggtacagttacgctcacagccctgatgctgaaggactgatgagaacaaagaagcaactgcttgattactataagaaccaaggtgaagatgaagaagcagcacagcgcttggcatcggttgacttctttcagcagatcgatgagcgctacgccaaagacgcctccactaacggggagtgtaacgataccaaggcgcgttggatccgacgggcaaataggttcgtagcctgggctctggttggctttgctgcatctggtgtaacctacttggtgcggccgtcaactgcggatcgcgaacctgtcaaagtccaagtgacaaatctcagcgaggtttcgatgagcgagaataagccagcaacgcccccaccaccacctccgcagacgacaaaccagcaaagcccgcccaagcccgcaattccgcctagcagaattattatggatggggttgaaccgtctcgacgcaaataa

SEQ ID NO: 528691 - DNA, 660 bp, Stenotrophomonas maltophilia
gtggactatacgttaggcaggcttctcggcggcgtcgccaacggattggatgttcccagttattgggacacgattgcggagtgggaagagcgaggcacaggcagaaaaaccatatacgagaagcgatacttctttcatcgcagtgacaagttcacagtctgggttgcaacaggaattccggaacctgacttccaggcaattatgcagtggcaccgtgagatgtaccgcggcgactttgttgcgatccagaaagaagtgctgaaggaaagcattgcagcagcgaccagttacacgaatgtaattctcgccgtcggttacgccgcaatggcggccctgctttcggcagggaagccaacgttcacacctgccacctacttttcagcaacaatctttctgtcgatttccgtcttcgcattcattgcgtgggaggtgtacggaatgattgttcgttcgaaatcgaatattgcgcttgcacaggccgtcaatgatccggagaccttcgaagcccgaatgagcaggcatcaagaagagatggcggggacgatgcgacgccttcagccgctctgggttcttaacgtcgctgttgccgccggatgcggcattgtgtccttcggcatcatggtatttgcatacatccatgctgcatggatggcgctttag

SEQ ID NO: 528692 - DNA, 258 bp, Stenotrophomonas maltophilia
atgaaacccaagccagtcccagatcaaaagaatactgcccttacctcagagcaactgcgtgtcatccgagtggtgcttgactacaaccattcgcatttcgttcggcgctaccagatgcatcccggctgtatgtgcccagaggaaatggtggcgcagatcgcgtcggcactgtcgggcacgccgaacgatccgctgcaaccgcccctcggagcgccgcccgctgctccaggtcacatcgccgataggacctccacctag

SEQ ID NO: 528693 - DNA, 351 bp, Stenotrophomonas maltophilia
atgaaaaagaaatcattggaagagcgagccgcggacgccgacaagcgcgcaaggcaactcaaggctcagttaaacctcaagaacaagcgcgagcggacacgggaggccaatgcccagaaacgaatacgattggctcaggccgtgagttggacccgacaaaaggacgcccaccgcaagatcgaacttgggggcgtcgtgatcgcagcaggtgccgatcagatggacccggctgaactgtgcggacttctcttggtagccctgcgcaacctcacgccggacagattgcctgcactcaaggaaattggattgacgcatttcgaagcgagaaaatctgcgagaggagaaaattga

SEQ ID NO: 528694 - DNA, 1773 bp, Stenotrophomonas maltophilia
atggccatttatcactgttcgatcaaaagcatcagccggagccaaggaagcagcgtcaccgccgccgctgcctaccgggccggcattcggatcgaggacgacaccacggggctcgtacacgactacacccggaagaagggcgtggtgtcggtggacatgctggctccggtcggtgccccgacctgggttgctgatcccagcatgctgtggaacgcggccgaggccactgaaacgcgaaagaacgcgcgggtgggccgggagatgattgtggcgttgccacacgaaatgagcgacgcgcagcggcgtgacctagcgattgggattgggcaaatgcttgtggaccgctataacgtggccgcccaagttgcattgcacgcgccagataaagagggcgaccagcgcaaccaccacgcccatattcttttcacgtcccgtcaggttggggcagagggcttgggcgcgtacgcgtccaagatcctcgacgatttcaagcagggcaggaaggaagttaccgcgctgcgcgcagcagtcgctcagatcgtgaaccggcatttagagcgtggaggctacttcgaacgcgtggacgcccgttctctggtggaccagaacctagacgccatagagcaaggggattggacgaaggcccgagaaacagatcgcctgcccacggttaaagaggggcacgccccggggcagaggcgcgctcggcgcgctatcaatgcccgcattcgcaacagcaacgccgccacgcagcgcaagtgggacatgtgggagcagaaagcccgcaacgaaggacgtttgatgcccgctgccaacgacacccaaaccgaaatcaggagtaataatggaaaaagccaccaatccagaacccgaccaaacaagcaacgcgcttgcccccctctcacccgagatcacgtcgatacttgtcgattgcgatctgacagcgatggcgccgagccggtgcttcgagtgccagttggcaaccgtcttgcaactctcaagcctcgatggggggaacaacgcagtggtggtccactgcggggcaatgaaccgcgacatagaagtgctggtgcgtcgctgcacggcgttccgaccgcacgcctaggtgctggtggcggttccggtggcgggcgcgtcaggctgaccatcgacggggatgcatcctcgcgccaagcgctgatgctcatgcaagagcgtttggacttggaggaggaggcccgccaatcgattagacgtcaacaacgtgaaacggagacgctgctggcggcgttttcgagtgctgatgctattcgcttaagggaagcgcagagacagattgctcgatgccaggcatggttgactgacaacgagcacgaggaacagcggcggttccgggagcgggagaggcgcaagcgcgaagttgagacggttgaagcctcgcttcgccattggaaggtggccaaccccgagccatggcgctactggcctgcgcacaagaagtggctggcgtcttttgaacggcggatgtcttctgtgagaaccgctcgcaagtactacgagcaggcgatggctgaagccaatctgcgtgcgttagaggcattggagcaggaacgcggcagggtgcggcgtgcactggcgcgcgctgaggcggtagcaagcgagatcgccggagtaggtagcgctggaggagaaaccgcagccattaggtcagtcgaaaagaccgagagcccgttgtttggaaggccagagaaacatgtggaagaaagcgtaaggcgaggattgagtcagcgttaa

SEQ ID NO: 528695 - DNA, 252 bp, Stenotrophomonas maltophilia
atgaaaacaacgtatcagatcccatataccgaactttttaacccggaatttgtttccaccgaaacggatttcgctcacatccaagaactattggactttggccagattgaagccgataccgcggaagagtttagccgcgttcctacttctcattttgacaatctggcacagcggactacgcgcttccagacatggcgtgagttccaattggctgcggtagcaagttggctaaaacgcacaccgcagtcgtga

SEQ ID NO: 528696 - DNA, 141 bp, Stenotrophomonas maltophilia
atggcgtggatctaccgtgtcgaccaaggtcgacacctaccagagcagtcgaccaaggtcgacaccgaccagaacaatatgccgttccgacagatcgcggaatctgtcgaaggcggggtgggtccggttgcgggggcgtga

SEQ ID NO: 528697 - DNA, 432 bp, Stenotrophomonas maltophilia
atgggcccgcaggtaagcgtggaccgcctgccgggtcacgcccaggcgcttggcaattgcagggccgttgttcccctgctccaggaggcgcaccaccagggcgtgctggtcagccagtgggcgcctgggcttttgccgcaaccccaggtgagccaggtcggcgctcaccacgggcgacggaacgcccagggcctgggcgatggccgcccggcggtgtccctctcgaaacatccgggcgacctcggagcggcggtgggcaacagaggcttgcttcatgagctcaaccacaagcccgcaagccgtgccttcgcaatacacgcctccaccaaggtgttcgctttcgtgcatccttacggccccacgcgcacgcgagcgctgttgttgtccgaccgggcattgatgccaatggcacaagggcttccgcacgaataa

SEQ ID NO: 528698 - DNA, 1461 bp, Stenotrophomonas maltophilia
gtgaacgctgcactgccccgtctcggcctgatcgtcgcgctggccagcctggccgcgtgcaggaccgtcggcccggattacgccctgccggaaggctcggcgttcaagcggccggaggccaatgcggccttcatcgataccaagaacccgcaggtggccgccaaccaggcgctgcccgaccgctggtggtcgctgtacaacgacccggtgctggacggcctgatcacccaggcgctgcgtgacaacgtcgagctcaaggccgccgatgcacatctgcgtcgtgccgcggcggtgtacgaacaggcgctggacgccggtggcttcgagtacgaggccgaggccggcgtcagccgcgcgcagctgtcggccgaatcgttcctgcaggagcacgagctgccggtgatcaacctggccgatggcaagttcgcggtcagctaccagttcgacctgttcggcaagctcaagcgcggcgccgaagcagcgcgtgccgacgagcagtcggtcgctgctgcgcgcgacctggcccaggtcagcgtggtggcgcaggtggccgacagctacctggagatctgccacgccaaccacgaactgcacgtggccgagcattcgctgcagctgcagcagcgcagccgcacggtcaccgagcgcctgatcgcggcgggccgtggcacgccgccggaactggcccgcgccaacgcccaggtggcgctgctggaggctgcactgccgccgctgcatgcgcagcgctcggcggccgcctattcgctggccgccctgctcgggaagaccccgggccagctgccggccggcgtgatcgactgtgcgcacgcccccggcctggcgcagccgttgccggttggtgatggccgcgcgctgctgcagcgccgcccggacgtgcgccaggccgagcgcaagctggcctcggccaccgcgcggattggtgtggccaccgccgagctgtaccccgacatccgcctgggtgcctcgctcggtgccgccggcctgctggaggacttcggcacgccgatgacccagcaatggtcgatcggcccgctgatctcgtggacgctgccgtcgtcaggcacgcacgcgcgcatccacgccgccgaagccggggccgatgcggccctggccgagttcgaccacaccgtgctgcaggcgctgcgtgagacccagaccgcgctggaccgctatgcacaggacctgcgccggctgcagtcactgcgcatcgcgcaggagcaggccgcgctggccgccgagcagaaccgccggctgtaccagggtggccgtacgccgtacctgtccagcctggatgccgaccgcagcctggccaccagcgatgccaccctggcggctgccgaagcgcaggtttcgcgcgaccagatccacctgttcctggtgctgggtggcggctggcaggccagcgccgccgcgcccaacgcctcgaccgcagcgaagtaa

SEQ ID NO: 528699 - DNA, 204 bp, Stenotrophomonas maltophilia
atgagctataccggccaggagcgccacaaatcccaggcagtgtctgggaaatccgtctcctgcgaattgaccaacaactcaatgacgctttcctatgcgccgccgacgcgggagcagttgctggaggcacttgccatgctggagcgagtgcgtccggaggactgtaacgctgccgcacaagaggttgtgggggcggtcacatga

SEQ ID NO: 528700 - DNA, 2853 bp, Stenotrophomonas maltophilia
atgttgacgggcggccagcagccttggtggaaccaattgagcgatgccgtgcgaggcgtcgctgtggaggggcttgtcttcgtcaaaacttaccggcgtgacggtcgcccgccggaagaggttgttctgatggagaaggcgcgcgagtacggcgcgcaggcggtgttcttcgaggcgggccgcaatggcaaacgctcggtgccgcaggccttcgtgtttgtcgcagacggtcctgagcgagatcatgagtttgcggagattcacaagaagctctggagttggggtggcgtacccctgatctaccgaaagctgcctggtcaactgcaactcttcaggtgcgctcacggccctgacttcgtgtcttcatccggagagctggtctgcaatccagtccgcactttggcattggcgtccacggttgccagcgacccatggtggagtgcggagcaattgcgcaacggcacgctatgggatgacacggcggcctgcaaggtattgctgtcatccaacaagtccgcgcacaagggtctcatcacggcggtcaaggagatcagcgacgacttaaatacggaaggcatcctgccaagacatttgcgccgcaagctgctgatcctgtccttgctgatcgcatacttggagcagcgcgaggtcttcaaggatggttatctggcgcgcttcctgccaggtgcagaaaagtttttccaggtgctggccaatggtccagcactcgtggcgctgcttgaggatctggagaggcgcttcaacggccacgtattctccttcagtgacgctgaccgcgagcgcttgagaggcagccagcaactgatccgcttttcccggcttatcgaagggcgcgaggaggttggcggtcagttgacgttgtggcagctctattcgttcaaggaccttcccgttgaactgatcagtcacatctatcagctgttcgtcaaggatgccgatagttctgtctatacgccaccattcctggtgcgcctgatgttggaggagtcgctgaactgggagcggcttgaccggctgcaagagcgcggggagatcatcctggacccatcgtgtggttcgggtgtgttcctggtcgaagcctacaagcggttggtgcttcactggcgcagccgcaaccaatggcagaagcctgatgtcgctgtcctcaagggattgcttcagtacgtgcacggaatcgatcgcgaagagggtgcgatcgaactggccgccttcagcttgtgcctggctctttgtgatgcgctggaaccggagaccatccgagccaccatcaagttgttcccaccactggctggtgagacgttgcactggtcttgtttcttcgaggcgaaggaacaaggcgtcatcacggcaccgataggggtcgttgtaggcaatccgccgtttgcgtcgaaactgacgacgcctggcgctgtgcgaagctacgagcgatacaacgccacgcatggcaccctccccgacaagcagcttgcctacctgttcctgcacgaagcgatggagatggttgccgagggcggtgtgctgagcatgctgcagcaatacaacttcctctacaaccaacagtcgattgccctgcgtcggagcttcatcggcaaatgggatgtgcgtgagattctggacttcatttcagtgcgtgggctgttccagaggggcaaggccgacacgaaggtcgttgtcatcgtcgccgaagccaggacggcgccggaagacaggcagatcctgcacgcaacgttccgacgcagcggacgctcggatgccgagcagggattcgacatcgactattacgacctgcattggctgccgagagaactcgcgctggaaaacgatgcagtgtggagagccgacctgtttggtggcggccgcacgctgggctttgtcgatcgcctgaagaactatcggacgctgggcgaatacgcgaagaagaagaattggaaccacggcgaaggattcatcgaaggactgagtggcaagcgtgagcctgcgaagcatatttctgggaagaaatacgttccatcggacgccttgactgtggatgggttggaccgccagcgcattacgactgccaaaggcactctcttcaagaccgcctatacgagtggtcgctacacaccgcccatgcttcttgttcgcgagcagatggacctcccacattgcttgtggacggattcgtaccttacctatggtcagcagatcgtagggttctgtgcggagcagaaggacattgcagccctgcgcaagctcgacaaatggatgtcgacatcgcggcgtgcattgcaagcccaccttgcattggtgagtccgcgcttgtttgtgcagaaggctaccgcgctgcaggcggacgatgtgttctccatcctgtatcctgcagaaggcaccctcgacctgagtcccaacgaatcgattctggtggacgacatcgtggaccactaccgcgacttcattcgactgggtgaagactccgaggtgatgaagaacagtggtctgtccagtatgtcggccttcaacgatgtcttcgtgcgccagatcaacgccatttacaagaagaagtcgataaaggcgctcgcgccgcaaacgtggccaggggttatttgccagccgtttgtttttggtgctggcaaggtggaatggcaaggtgcggatgcgttgaaggacaggttggcgtcgttgctgcaggagcgccaagggcaatcgctgcaaatcacgcggatagcgcgcatctacgacggaaactttgtcttcctgctcaagcctgaccgcctgcgcttctggatgcgttccgtggcactgagggatgcggacgagatgctggccgaccttcgggtgcaagggttctaa

SEQ ID NO: 528701 - DNA, 498 bp, Stenotrophomonas maltophilia
atgctgcagttccgcattgaggagcccgatgaacagaagacgggccgcaagattgatttgatcgcttcgccatgcgggccgacgatatggatcgatggtcgacgctgtacccagttcgataccttgcttcctattgagtgcaagcggttgccaacgccgaaggacaagaatcgggatgagcgcgagtacgtgataaaccgcaaggcgacaacgggtggcatccagcgtttcaaggccggggatcacggggcggcgcactcccgtgctgccatcattgcctacgtccaggctgagacaccgcagatctggttcgaccgcttgaatgcgtggatcactgaattggatggctcggagcacgcaggctggtcgttgcaggacctgatccgcaatgagtctgctgccgcaaaagccggcctcaccatgtatcgctcgcaacacaccagggccaggggactctcacatatcgatattcgccatctctggattgcgatgaaatga

SEQ ID NO: 528702 - DNA, 216 bp, Stenotrophomonas maltophilia
atgatgccccggatcaaagaccctccagaagaaaacagcctgctcggccgatgggctcgatggacggctgcaccgtactgcgaattcaaggacgaccgcgcccgattgcttgccttggttgcgcgagatgtacgcaaggtggccatcgtgatcgtgctcgcaatcacgggcgaggcggtgccgtggcatggatgggcagccctttttctaggatga

SEQ ID NO: 528703 - DNA, 687 bp, Stenotrophomonas maltophilia
atggcaacgcagaagcaatcgcggaaccggcggctcaacatggccgagcgcgccaagcagcagatggaaatccagttccccggccacccggacgcactgctctggcatcgcaagctgaacgatggctactcaacgatcccccgcacactgccgctggcgatgcaggccatcgacgctcgatccaagggccagcctgcggggcacacgctgttgtgcctgtggattcgcgcgcctgaccacccttttctcacaattgaggccccggccacctttgccgcggaaacgggcttcgatggtgagcgtgcggtcgatacctggcgccgtcgtatgcgcacgctgcgcgatctcgggttcatcgaggcgaagaaggggcctaccggtgacttccactacgtattgctgctcaaccccaacgtaggcatcgaaaagctatggcgtgcggacaaagtacagacggttctctatggacgcttccgggatcgcttgatcgacatcggcgcgcagagcgacatcacagactatgacgactacctggaggatcgcaagaaggccgaagcgaaggtcgcgacgaaagctccgaaggctgccaagcgccctgccgcttctgcggacgcatcgaccaagacggccagtgcctccgcaacgcccaagccaaagactcgttcaagggtgaaggaggaacgatga

SEQ ID NO: 528704 - DNA, 282 bp, Stenotrophomonas maltophilia
atgcgtcccgctcctttgcggcctgccgccgctgtctcgaccgctgctgcgcagccccaacgctatctgaccaacgacgaagccgccgaatacctgcgcctgtcgccgcgcacgctggaaaagcagcgcgtgatcgggggcggcccacgctttcgcaagttcggtcgccgcgtcatgtacgccgtggccgacctcgatgcttgggccgccgaccgcagtttcgagacgacttccgatcccgaatacgccgagcaccacgcggcggacagccgtgcgcgctga

SEQ ID NO: 528705 - DNA, 858 bp, Stenotrophomonas maltophilia
atgtccagccctgccctgccgtcccggcagcggccatcgcaggaacgcgaacagctcgatctgtttcgcgccttgccgggcgacatggcgccgcgcgacagccaggacttgatggcctttccgttcttctcgctggcgaagtcgcggcgcgttgcgccgatcgactttcgggcggggaacgtgacgatccgcgtggaaggcacgcaggagcatggcatcgccaccatttgggacgccgacgtgctgatatgggcggcttcgcagatcgtggaagcacgcgacgcgggcctgcgcccgtcgcggctgatgcaggccacgccctacgagatcctgcgcttcatcgggcgcggcacgtcgctgcgcgactaccagcgcctcaaggccgcgctggatcgcctgcaatcgaccacggtagccacgtctatccgcgagacgaccgggcggcgcctgcatcgcttctcgtggatcaacgagtggaaggaactggccgatgccaagggcacgcctttggggctggagctgatcttgccggactggttctatgccggcgtcatggatgccgccctggtgctgaccatcgacccggcgtatttccggctgaccggcggcatcgagcgatggctctaccggctggtgcgcaagcacggcgggcgccagccgggcggctggcaattcgatttccgacacctgtatcggaaatcgggcagtgccacgcgcttctcggacttcgcctacgacctgcgcgcgctggtcgcgcggcagtcgctgccgggctacgccctgggcatcgagcggatgccggacaacggcgccgagctgctgaccttccggcccgtgccgcacacggcacggggataa

SEQ ID NO: 528706 - DNA, 639 bp, Stenotrophomonas maltophilia
atgatcgttgctctgctcaaccagaaaggcggcgtcggcaagaccacgctcgccacgcacatcgccggcgagctggcgatgcgcggccagcacgtcgttctgctggacgccgacccgcagggttcatcgctggactggacacagcgcagaagccagcaaggcttgccacggctgttcagcgccgtgggcctcgcacgcgaaacgctgcatcaggaagcgccagaactcgccaggcgggccgatcacgtcgtcatcgacgggccgcccaggatcgccgccttggcgcgctctgcgctgctggcggccgagcgcgtgctgatccccgtgcagcccagcccctacgacctgtgggccagcgccgagatggtggcgttgatccgcgaggcgcaagtctttcggcctgcgctgcgcgcggccttcgtcatcaatcggcgcgtcagcaccaccgtcatcgggcgcgaagcgcgccaggcgctcgccgaccaaccgcttcctgcgctgcgcgcggaagtgcatcagcgcatcgtgtttgccgacagcgtggccgctggccggcttgcacgtgagacggcgccggacagcgctgccgcgcgcgaaatcaccgcactggtggacgaactgctgcggtggcagacatga

SEQ ID NO: 528707 - DNA, 1983 bp, Stenotrophomonas maltophilia
atgagcaaccgccgcgatgacgatttccgcatccgccccagcgccccgaagaaccggggccagggcttcgtctccaaggtgctcaagcaggccggcaaggccagcagcggcaagtcctctgtgcgccgtccgggcggaaccggtaagggtgctggcactggccagcggcccggctcgcgcctggggcgcggccacacggcggcgcgcttcgcgggggcgaagctcacgcccatgtcgcggcgcgtgaccatcaagacgctgctggtcaaccagcgccaggccagcccgcagtcgctcgccaagcacctgcgctacatcgagcgcgatggcgtgggccgcgatggcgagccgggccaagcctacgggccgcagaccgatgccgccgacctcgacgccttcaaggaacgctgcgccgatgaccggcaccatttccgcttcatcctctcgcccgaggacggcgccgagctggaagacctgcgcacctacacgcggcacctgatgggccgcatggaagccgacctgggcaccggcctggattgggtggcggtggatcactggaacaccgataacccgcacactcacctgatcgtgcgcgggcgtgacgacaccggcaaagacctcatcatcgccggcgactacatcgcgcacggctttcgccatcgcgccgccgagctggcgaccgaatggctggggccgcgcaccgagttggagatacagcagaccttgcagcgcgaggtagagcaagagcggtggacgagcttggatcgcaccctgcaacgcgaggccggcgaggacggccgagtgcagatcgaacgcttcaacgaaccgaagctgcaacgccaacgcctgctattggtcggccgactgcaacgcttgcagcgcatgggcctggccgacgaaatgcagcccggaacctgggccattcatacagatgcagagaagaccttgcgcgccctgggcgagcgcggcgacatcatccgcacgatgcagcgggccatgcgcggcgagctgcgcgagctggcggtgttcgagccgagcgacgatggccgtaccgtcatcggccgcgtggccgcgaaggggctggccgacgagctgcgtgatcggggctatctggtcatcgacggggtggacggcaaggcccactacgtcgcgctcaacgtccgcgacgagctggcgaactaccagaccggcgccgtggtggaggtgaagggatcggccgacgtgcgcgcggccgaccgccacatcgctgcgctggcgagcgatggcctgtaccgcaccgatcaccacctcgccatcgcgcaaggtcaggccgttcccggccgagatccgcaggaagtcgtcgcggcccacgtccgccggctcgaagccctgcgtcgggccggcatcgtggagcgcgtggctgaggggctatggaaagtgccggacaacctggccgagcgcggtcgcctgtacgacgcacagcgcctcggcggcgtggctgtggagctgaaatcgcacctgcccatcgagcggcaggcccgcgtgatcggcgcgacctggctggatcagcagttgatcggcggcggcaagggcctgggcgagctgggcttcggcggcgaagcccgacaggcgctgcaacagcgcgccgacttcctcgccgaacagggattggccgagaagcgcggcccgcgcgtgatcctggcgcgcaatctgctggcgactctgcgcaatcgggaactggcccaggccgcaaaggacattgccacggaaaccgggttggagcatcgccccgtaggcgacgggcagcgcgtggccggcatctaccggcgcaacgtcatgctcgccagcgggcgctacgcgatgctcgatgacggcaaggggttcagcctggtgccgtggaagccagtgatcgagcaacggctggggcagcagattgcagcgactgtgcgcggcggcagtgtttcatgggagatcgggcgacaacgagggcaatccttgagctga

SEQ ID NO: 528708 - DNA, 1059 bp, Stenotrophomonas maltophilia
atgactccaaagttcatggaaaaagaagatgcacgcaagcagtcgcgggaagtgctgcacgaacgacgcaagcaggtcatccgcttgcatcgcaaaggtgtaggcgtgatgcagatcgttgagcaaaccgggctcagttggtctggggtcaacactgcactgcgcctgttcgagcgaggcggggcggctgcactcaagccccacgccaggggaaagaagccgggcagtggacgcagcctgagcgctgagcaagagcttgccatccgaatgaccatcatcgacaaacgccccgagcagatcaagatggagttcgcgctttggagcagaccggcggtgcgtgaactcattgagcgcgattttggactcaagctatctgtgcgggcggtgggcgactatctggcgcgctggggttttacgccacaaaagccgatcaagaaagcgtacgagcagcgccctgaggccgtgcaggcctggctcgaagatgaataccctgccattgaggccagggccaagcgtgaaggcgcagagatccattggggtgatgaaacggccctggtcaacacggatgtgcgtggcagaagctatgccccagcaggccagacgccggtgacacgcgcagtgggcggcacacggcaaaagctctccatgattgccaccgtcaccaaccagggaaaaacgcgctggatgatcattgacgaggcgttcaattcagacaaactgatcgagttcatgcaggccttgatcaaggactcgcagggcaagaagatattcctgattctggacaacctgagggtgcaccacagcaagcctgtcaaggagtgggcggcactgcacaaacaggatattgagttgttttacctgcccagctatagccctgaactcaacccagaggagcggttgaacgcagatttgaagcatgcgattggtagcaaagttccggtgcgcaccaaggtcaagctgcgcgctgcggcgactgaacacatgacgatgctggagaacacgccagagcgggtcagaaagtactttggagacaagcatgtcgcctatgcggcctcatga

SEQ ID NO: 528709 - DNA, 330 bp, Stenotrophomonas maltophilia
atgacccgcgcgcctgttctctgctgttttgtgctcctgctggccggttgcggccagcaggaggtgccttcggtcgatgcgctctcggcagatccgtcgcggctgcgcttgctcaaggagcaatgccgcgcgggccagctcaacggcaagttgcgcgcgcgggtggcccaggccgatttgcgccgctttctctccggcaaggccgggccggacgagtaccagacgctggccgacctgccgccgattccacccagcttcgatgaacccgccgaggacagcgaggcggtggccgtggccgcggccttgcctgggcaggaggacttgccatga

SEQ ID NO: 528710 - DNA, 1335 bp, Stenotrophomonas maltophilia
atgaatgacatttcggtcattgaccatttcctcgatgtgttctcgcgctacatcgactcgggcttcggtctgctgcacggtgaggtggcgtttctcacagccacgctgatcgtcatcgacatgacgctcgccgggctgttctgggcgatggggcacgccgccggccagggcgaggacgtgatcgccaagctgatccgcaaggtgctgtacgtcggtgccttcgcctacatcatcggcaacttcaacaccttggcgagcatcgtgttccgctcgttcgccgggctgggactgacggccagcggctcaaccctgagcatgggtaacttcctgcagccggggcgactcgcgaaggtgggcatcgacgccggggcgcccattcttgagcagatcaagcagatggcgggcttccccgaggtgttcatccacctcgcgcccatcgtcgtgctgttcttcgcgtggctggtggtcatcgtcagcttcttcgtgttggcggtgcagctcttcgtcacgctgatcgagttcaagctgaccacgctcgcgggcttcgtgctggtgccgttcgccctgtggaacaagacggcgttcctggctgaaaaggtgctgggcaacgtggtgtcgtccggcatcaaggtgctggtgctggcggtgatcgtgggcatcggttcgggactgttctccgagttcaacatcccggccggcgcggagccttcaattgatcgggcgctggtcatcatgctggcctcgctgtccatgttggccttgggcatcttcgggccgggcattgcgaccgggctggtgtccggtgggccgcagctcggcgcgggcgcgatggccggtgctgccattggcgcagccggaaccgctgtggcggtcggtgccgcggctacgggcgtcggcagtgccgtggcggccggagcgcgcatggcacccgccgccgcccgctcgatggcatcgaccgccagcagcgcccgatcggcgtaccaggcgggctccgcttcggccggaggcggcctcaagggtgccgccgccggtgtgggcaatgtcgccaagaccggcgcgcaggcggccgggcagaaggtggccgatggtgcgcgctcgatgaaggagcgcatggcggcggcctttcggcccgatgacgcgccggcctccggcgccgcacccgccgggcctgacgctgccggatcagctccgtctgccgaacaacccgcctgggccaagcgcctgcatcgcaggcagcaactcacccatgccgcgacgaccgccgcccacacgctgcgcggcggcgacggcggcagctccagccaggggccaagcctgcgcagtcctgacgaatga

SEQ ID NO: 528711 - DNA, 609 bp, Stenotrophomonas maltophilia
atgagctactgcgcgcaccggaaggatccaaatttaccggctggcattcgctcaagcgcgagcctggccggccgaccaacaaagaggtccggttctatctgcagcacatccgtatgctgcagcagttggcggagcaactgcctccaatcgatgtaccggtccccaagctcaagcaattccgtgcaatggcccgggcgtatgacgccagcgagttggccgaattgggtgaggacaagcgctatgcgctggccaccatcttcattcgcgcccagcatgccaagacactggatgatgcagccgagttgttcatcaagcaggtgcgcgggctggagaacacggcccagcagaaattgctggcctaccagctcgaacatgccaaacgggccgacttcctcatcggccagctcaaggaaatcctacaggcctatcagctcgacggcagcgatagtcagcgcgtggatgccatcgacaacagcctggaagcggaagtgtcgaccttgctggccgaatgcgaagaacatatggcctacgccgggaagaactacctgccattcatgctgcagccctatggcgcggtcaggccgctgctgttcaatgggctggagctga

SEQ ID NO: 528712 - DNA, 1728 bp, Stenotrophomonas maltophilia
gtggccagcggcgaggttgagcatgtcctcaaagtcgatgccatcctctgctgccaaggcttcgtcccacgccgccatcaccggagccgcgatgtccaggaacatctggtagcgcagcttgaaggtgtcggtgggcatcgcgtccagccgtccctgcaaatccgaagggctcaggccgttgctcttggagtggctcatgaacgtgcgcaccagcccaatgagctcgaccgatgccatgggctgctgacctttctcgggaatctctcggaatgggttgggatcgagcaccaacccacgggcggtcagttcgcgctccagccggtccagatcgtcgcggtggcgcagcccgtggctggtggtttcaaacagctcagtgcctttctcagcgtgaagctgtcgcttccaaatcactccttccaagtagccttcgaagtgcgctggtggcacgccgttggcgtcaagtgcgaagtgctcgtggaacaggttcaagtcggggtagtagaaatcgggtttgtattgccggtgcgtttcgtcggcggttcggtgggggtagggggcctcgtagcggtagttgaccccgttcaagaagagcaagttggcgatcatcacctcttccacgctcttcacccgctcgccgcggttggtgaccagcgcgcccttgccttgggcgtcccacacgtccgacggctccggtgcaccaaacgccggaaggtccttgccaaagacgaagcggaacaggtcccattggcggcggaacgcgggcgaccggtctttgagctggtccacgatgtcggtgagctttcgcacccctccggccgcgtcggtggcccagtcgggaatgtcgggtttttccccggtggccttgccgatgaggcgcaaacccagcgcgtggaaggtagacgcctccacggtcacctccgccatacccaagcgctcaaacgccaagcccgcgcgttccttgagttcttcggcggcctgcttgttgaacgccagcaggacgatccgtttgggatccacgaacccgcgttggatggcgtaggccgccttggccaccatcgtggaagtcttgcccgagccggccgaggccaccacctgcacgcggttgtcgaagcacaccacggcccttgcctgttccggggtgagcggtttgctctccacccggtccagcaagtctttgcaggccaccagctcgcgttccacgtgggcagcgttgagcgcggcccaagcagggcggtggtcggcttcccaagcggccagcgagcgctcgatcgcatgggcagccggtcccaaccggaccgccacgccgggcttcttcaggcgcgatcggaggacggccggatcaaccgtggggcgggccgccaggacatcttcctgctgctcgtgggtgaaccagcggcgctgtgcgaagcaggtccgctcttgttctgccttgtggtccagccatgcgccgatcgtgccctgctggtccttgaggaacgccacctcctcgcgcaggcgcttctccttcaatgcgacgttcaacgcttgaatcaaatcggcgccttgggcgttgggcaacccgtcggccttcacttcccgatgctggcccgggtggagcgtgatgtcggtccagaaggtgccggcgttgacgcggtaagccgcctcgtcttcgacgttgacccggtgggtgcgcccgtccagcgccagggcgagctccaggccgtccaagcgcaagcgccactccgatga

SEQ ID NO: 528713 - DNA, 243 bp, Stenotrophomonas maltophilia
atgggggagaactttgggcacacttccgagcgctggaaaggcaagctggcgttcaaggcaaccatcaatgcggacgctacggaacccaatttgacctttacggtggcatcgatggcaaaaggcacccaggaagaacagcagatcttctacgcctactaccacggccacttgctgcaaacgtttatagaccacttgggagagcacttctccgcggctcggtatgccgacacgcgcgagaactga

SEQ ID NO: 528714 - DNA, 828 bp, Stenotrophomonas maltophilia; identical to SEQ ID NO: 499616

SEQ ID NO: 528715 - DNA, 1038 bp, Stenotrophomonas maltophilia; identical to SEQ ID NO: 517199

SEQ ID NO: 528716 - DNA, 147 bp, Stenotrophomonas maltophilia; identical to SEQ ID NO: 517200

SEQ ID NO: 528717 - DNA, 897 bp, Stenotrophomonas maltophilia; identical to SEQ ID NO: 517201

SEQ ID NO: 528718 - DNA, 1092 bp, Stenotrophomonas maltophilia
atgaccgccgctgacttggacgcgtttgcccgccgcgtgctggccttccatgccgcccgtgggcctaccaccccacgctgggcactggacgtggcccgccgctctgagagccccgcgtgcgctttctgcatcgcccccttggacttggaccgtcgccacgcctgggggctttcgccgctcgttccgttgaaccagggcgggccggcggacaccgagaacctgcgcatggcctgcaaacgctgcatcgctgaacgcggcagccgagacctgttggcctggcccgagttgagccagcggttgccaccagacaccctggacgccctactggccgaccggctgtttgtcctgcagcgctccgacaaccacctggtcgaggtggggcgctttgcgaagccggccaccgtccttgcccagcttcaagagcgctggatacacccccggttcctcgtccacgtggagcggcattcggacagctggatgttggggtggccactggcccagcgtgcccatctgacgcgaaacgacttggccgcgctcttgcgcaacgtgcaccagggcgaatggctggaacaccccgaggtggtggccttccggttgaccgcggatgtttttcaattggcggtgtggcagctgattgccctccacgcgttggtcattcccctgcctatggagacttatcccctccccgaccgcacctttgagaaccggtggatggcccggtatccaagcctgcgccagatccgcctgcggcgacagggcgcgcacgaaacactgtggcccagcatgggcaaagaccacgtcccggcttacagcgacaagcccaatgcggttcgcatgcggacccagcgtcaagccacacgtgagggggaaacgaaagcccagtggttggaagcaaggcggcgtttggcgaagcgagacgcgggcgtggccaaagggacgttgagggcatggctgcctggagagcgggccgcgctgcaggcagacgtggacgatctggcggcggcgtggttgaaagcccgcaagcgccagtcgaaagggcgcccggacaccagggatcccttaccattgaggcaagctcagacaatcaattga

SEQ ID NO: 528719 - DNA, 255 bp, Stenotrophomonas maltophilia; identical to SEQ ID NO: 517194

SEQ ID NO: 528720 - DNA, 501 bp, Stenotrophomonas maltophilia
atgacacgcaagaccttccttcgcgccctgctgcccatcgccctggcctcgctggcggtgcccgccttcgccgccgacaccaccgcagacctgatgattcagggcaccctgaccaacacctgcaacctgtccgtttctccggtcacggacatggattggtcgggcacttctgacaactccacccgaacctctgcgttgagcatcgtgtgcaaccagggaaccacttactccatttccccaggacagggacagaacttcggagcgttggcgggttacgagacctaccgcgccgtgagcaacggttcgggtgccttcattccgtatgggttgttcaaggacattcccggcacccaggcatggggcgatgatgccgatgcgttcgcgggcacgggtagcggtgctgtgcaaacccacgaattcgcgttgaagttcttcgccctcaagcaggccgtgggtggcaactacaccgatacggtcaccgtcaccgccacttacaactga

SEQ ID NO: 528721 - DNA, 387 bp, Stenotrophomonas maltophilia; identical to SEQ ID NO: 500321

SEQ ID NO: 528722 - DNA, 585 bp, Stenotrophomonas maltophilia
atggactacggccgtgcgctgctgttcctcctggagacccatcccatcgatcttccggcggtggccttggcgatgcaccgctcccagattgagcaattcctgcgggcggtgtttgtccagttccttgccgacgacgaacagctggcggactttctccaggaagatcgcggcccccgaaagaagaacgagaaaggaaagtgggtggctattgccctcaaagacctggccgcggacgtggagcaggccattgcacgcatagggcaggacgatgagcctcagaagctggctcggacggtgaccaattcgtgggaccctctttgcggactggtccatggcgggaaggccattcgggtgatgtatcaagatcccagtgggcagatcggggcgcacgtgccggcagccattctttttcagaccaccgtcaacgcggtggccaccaccaacttgtgcgtcattgcagcactgacggcggttggggttgaggcctttgaggaaagccccgttgttgagcagtgcgccagtgggatgttgcactacatgcaacggaggaaagcccgcatggaagagctggcctggccgccttaa

SEQ ID NO: 528723 - DNA, 141 bp, Stenotrophomonas maltophilia; identical to SEQ ID NO: 528696

SEQ ID NO: 528724 - DNA, 264 bp, Stenotrophomonas maltophilia
gtggcctttgaagccgccaacgcgcccgtcccccaggtgaccgtccaagcggtgcccaatggataccgcttgacgaatcacgggcagaccgccgcccgcgtttcgtccatcggcccggccggtgggaagccgtggcgcgacggtgcattgggttggacgctaccgggggcctcgatgacttacgagacccagcctggccagcgtgccgaagtgctttcgatcaccgtcagcggccagtccgccaccgtccccgtggggcggtga

SEQ ID NO: 528725 - DNA, 1080 bp, Stenotrophomonas maltophilia
atgatcctcgatttcttccgtttcgagctgcgcgagcagctgcgttccccgctgctgtggctgctggccgggctgttcgccctgctcgccttcgccgctgcgtccagcgacgccgtacagatcggtggtggcagcggcaacgtgcacagcaacgcgcccaccgtgatcgcgcagatgctgggcatcttcaccctgctcggcatgctggtcaccgccctgttcgtcagcaatgcgctgctgcgtgacttcgaactgggcaccgccgagctgatcttcgccagcccggtgaaacgccgcgattacctggccggccgcatcgccgccgccctggctaccggcctgctgttctacctgctggtcgctttcgggctctggctggcaccgttcatgccctgggtggacgccgagcgcatggggccgatcagctggcagggctatgcctggagttttgcggtcatcgtcattcccaacctgttgttcaccaccgcgctgctgtcactgctggcagcggtcacgcgttcgatcctgtgggtctacatcgggctggtggcctacctggtcctgttcggcgccagcgcggcggtgctgcgcgacatcgacaacacctggctggcggtgctcagcgagcctttgggcatgcgcgccctgtcacgcaccatccgctactggtccaccgccgagcacaacagcggcgttcccggcctggcgggctacctgctggccaaccgtgccctgtggctgggtgtgacggcgctgctgttcgccgccacgttcgccctgttccgcaccgagcgcagcggcagcggccgtcgtcgctggggccgccggcaggcgcagccggttgccgacgccgccgccctccggcccaaccgcaaccgttgccgcgcgtggtaccggcattcagcgcgaccaccgcgtggcaacagttcctgcgccaggtgcgcttcgacacgcgcggcgtcctgcgcagcgtgccgttcatcgtgctgctggtgctgggcctggccaatttcctgcccaacgcgctgttccggcagaccctgtacggcacctcgatctggccggtcacctcgcagatga

SEQ ID NO: 528726 - DNA, 672 bp, Stenotrophomonas maltophilia
atgaaatggcaagaagtagaagttgaatgccggaaaatcgctgagtcggtgtgggggcagccagccaaccccgagagaattgccggcgtcaactgcgatgcagttgtaaaattcaagaacaatttctggatcctgattgaggtatcgaaacaggatgacctggcaaaattgagagatgacatctcaaagttggcagttatgcgccaatcacttatgtccaacggcacattctcagagtgctacttcattacaagtggaagccacccatctttagtcgaaacaggaaaatcatgcaacgttgaagtccacagcctacatagcttcgcatccaagttcattggctcggaaagatatcttcaagagcgtgctcgatctccgttcggaagcgcagtacacccggatacaggtgacattgacggcaatgcgtattcaagcattgactacgtcagcaccgcagggaagaactactctgtcagtgaagtcgcaatggcgattagccagggcaggaaggttatcctgatgggagaatttggcactgggaagtccaggtgcctgatggaggtgttcagaaacctctcgcaagacaatccaacattccccccccgtggcgataaaccttcgggacaattggggctacaagaagttccatcacatcgtcgggaaccaccttga

SEQ ID NO: 528727 - DNA, 1089 bp, Stenotrophomonas maltophilia
atgtcttcctggctccataggctggcccgagccaacggccgctcggaccacacgctgtgctcaatgatgttcggggcagtcccgttgctgaaccgcgacctcgatctgaccatgcccgttgcattgctacccgtgctctcgaaatggacgggcatttccgagtaccggttgtcggaactcctgttgacgacgatccagggcaaggtcaccggcgaaagccggaccgggacagtctgtcgatgggtgcttcccctgggtgtttaccaccgggtacgccggcaccatggacttcaatactgtccgcaatgcttggcggaacccatcgcatacgctcgaaagcagtggcgctacgcgttcgtgaccgagtgcctggagcatgagcgccctctgttcgaccggtgccccacgtgcgcgtctcccttcatgtttcaccggatgcatccggatcgcgggcaacgctggggctgcgcgacttgcggcgaggccctgaacacgccagatgccagtgccgggtcaaaatacctactgcgacgacagcaggcgcgactcgtggccgcggccggcagcggcggagcacgcatgaactgccgctgggtcagctcgctgacgctgttcaatgggtaccggtttctcgtgcacaccctcacctcatcgcgtttgaagcacctggcgaacacggcaatcatcgaccgggacggcacgttgcggccctctgggacgcacacagagttcgagcgtatgggggtctacttgaggaggccgattatgctcgcgctggccacgtggatgaccgattggccggatcgctttctgcgagacgtgcggtcgtcttgttcaagccggtcggtactgatgggggatcggcggcacatcccgttctggatccaggaggtgctcgataccttgcccacggcccagccccaccggctgacatcacaggaagttcaaagctgcgcgcggtggctccgagccggcggccaggccatcagctttgatgggctgtgcagggccctctcactttccacctgggaacggatgcttcccgcgaacagggtgctcttgggagagggtgtgtccgcgctggactga

SEQ ID NO: 528728 - DNA, 399 bp, Stenotrophomonas maltophilia
atgaagcctcaaacccatcagcccctgccgacaaggcccgatctttccagacccggcctcaccgcgttctttaatatctgcgagaaatggggcctcacttctgaagagtcccgcgttctgctaggccgtccggcacgttcaacctactaccggtggaagcggactcgcaccggagcgctcaccaatgatgtccttgagcgcatcagtttcgtcctgggcatctaccgctccctgcatatccactttgtggcgccggcacaggcggacggatggatcaagcgcgctaatgcggctcctttattcgccggcagcagcgccctggaccgaatgattgggggccaggttgccgacctgtacgtcgtccgccagtacctggacgcccagcgcggctggggctag

SEQ ID NO: 528729 - DNA, 1668 bp, Stenotrophomonas maltophilia
atgacccgcaacgacccatcccgcaccgtcgccgcgccgaccggcaccacgctcaatgccaagagctggctgaccgaagcaccgctgcgcatgctgatgaacaacctgcacccggacgtggccgagcgcccgcaggaactggtggtgtacggcggcatcggccgcgccgcgcgcgactgggaaagcttcgatgccatcgtcgagacgctcaagcgcctggacgacgaccagaccctgctggtgcagtcgggcaagccggtaggcgtgttccgcacccacgccgacgcgccgcgcgtgctgatcgcaaattccaacctggtgccgcgctggtccaactgggaccacttcaacgagctggataggaaaggcctggccatgtacggccagatgaccgccggcagctggatctacatcggtgcgcagggcatcgtgcagggcacctacgagaccttcgtggaaatggggcgccagcatttcggcggcgacctgagcggcaagtggctgttcaccggtggcctcggcggcatgggtggtgcacagccgctggctgccgtgatggccggcgcctcctgcctggccgtcgagtgccgcaagagcagcatcgacatgcgcctgcgcaccggctacctcgacacctggaccgataatctggacgaagcgctgcgcctgatcgacgagtcgtgcaaggcaggcacgccgaagtcggtgggcctgctcggcaatgtggccgatgtgctggccgaactgctcaagcgcggcgtgaagccggacctgctgaccgaccagacctccgcgcacgacccggtgaacggctacctgccgcagggctggacggtcgagcagtgggacgagaagcgtgtgagtgcaccgaaggaagtggagaaggctgcgcgtgcatcgatggccaaccacatccgcgccatgctcggcttccacgcgctgggcgtgccgaccgtggactacggcaacaacctgcggcagatggcactggaagaaggcgtggccaatgccttcgatttcccggggttcgtgccggcctatatccgtccactgttctgccgcggcatcggcccgttccgctgggcggcactgagcggtgatccggaagacatcgccaagaccgatgccaaggtgaaggaactgattccggacaacccgcacctgcaccgctggctggacatggccgccgagaagatcaagttccagggcctgccggcacgcatctgctgggtcggcctgggtgatcgtgatcgcctcggcctggccttcaatgaaatggtggccaacggcgaactgaaggcaccggtggtgatcggtcgtgaccatctggacagcggcagcgtcgcttcgccgaaccgcgaaaccgaagcgatggccgacggttccgatgcggtgtccgactggccgctgctgaacgccctgctcaacaccgccagcggcgcgacgtgggtgtcgctgcaccacggtggcggcgtgggcatgggcttctcgcagcacgccggcatggtgattgtctgtgatggcaccgaagcggcggcgaagcggattggccgcgtgctgtggaacgatccggccactggcgtgatgcgccatgccgatgcggggtatggcatcgcgatcgactgcgcgaaggaaaagggactggatctgcctgggatcctcggctga

SEQ ID NO: 528730 - DNA, 1203 bp, Stenotrophomonas maltophilia
atggccttttccactgacaagaaactctggaggtacggctccaaagtcgccggcaacatcggacatggcgttgcttgggagctagactttcttcggggtatgcatcagggcaatgcgctgcgttatctggcccgtgaactcagttcagccacgggccgagctattcatctgacatctatttggctggacaagcacgcctgggtgtcttggtcccaaggcggcaatagggtagacaagcgagagttggcggacctggcggtcattgtcagaaggaggcgcaagggcaaaattgtcaaatggatgtggctcattcagggcaagcgaacagacaagctactcggtacttatggtggctcgagcaccccctacgagctcgacctcctgcatcgtatgcccatgttctctctcaatggatacagcgggaccttccggttaaaaagggactttccccccagtggctgcaccgccattagccccgagtggccgattgctgtgagcaccccgtggacgttcatggatttcgacgcggatatggccgacccttggtcggcctattcccaggggtactcgcctatcgccccccgctggcccgggtcaaacccgccacttggggcctgggctaagaaatggcaaacgatcaattcgtcgcccgatatcagcctcagctcctacacccaatgtctcagcgcgatcatcaaatgcgcccctcactcgtggtcagttccagtacttaacggatctttgggcgcgtcgttcgtaccgggcgctcctattgatcctgataattttccagagtggtttgccctttatgaggcactgatagccggtgctcagggagcaactattcgccatgcggccacgaaatcaaaccctcgtggctctgtgttgcagttgagtcattttctgcagaactactatgcgcataaggtgctccataccgctgcacctccgcttagctccttcctaacgttagggcagctcgggtggatgtgggcagcagccactgctggcatgggccagcgccctggctcgtcgatagaggaccttatagatttccaccgccgagttgcggcagacgaactcccgcgatcaccgagcgagcccagtcggccaagagagcctgctttcgagaacgacgggccaggcggcatgctgacgctcttcgttgacgtgctcggcgaagcggacacccatcggggctag

SEQ ID NO: 528731 - DNA, 471 bp, Stenotrophomonas maltophilia
atgcagcgcgaagaggcggagaagcttctaactcaggcggtcgaccaggtcatccgctttgaccgaatattgctcgagctcgatgtgaccgagcgggcgctctcctgccggattgcccactacatgcacgatccgaagcttgtcccgccgccgctcagtatcgactgcgagtacaaccgccactttggtgaccccaaacgactctacttgccgccacgggacgcctttgaccgagaggtccgggccactaccgtcttcccagacatcattgttcacgaacggaattcggatgcgcgcaacctcctggccatagaaatgaaaaagcctggcggcagcttggactacgaccggcagaagttactcgcctttcgacgggagctaggttacctgcacacggcccatctaatcttgggactcgacgccagcggggacttggtcaatcaggtcatctgggttgatgacgtgacttag

SEQ ID NO: 528732 - DNA, 516 bp, Stenotrophomonas maltophilia
atggaaccggcaacgtggggggcgatcggcgccctgatcggtacggtggtgggtgcggccgcgagcgtcgtgaccgcgtacatcgccacccgccatgcagcgtccctgcaggcagcggacgaccaagccagacgacgggaccagggccgggccttccagcgggacacgttgcttgcgctacaagaagcgctgagtgacctgcttcgtttggaagcgcgttgccacctggaggatcgccacgccttccgaagcacgggtgtttggggcaagaacgccgttggcgagacgctctccgaggagaaccgactggcgcgtcgatggaccatgatcctcaaggagcgggtcgcagacgatgcgttgcgtgtggctctggatggtttctgcgggcagctgacacaggtctccctggtcgactcggaggccgaggcggtaacgctgttcgaacgcaacatgcgccaagcgaccccgatgatggagcacatcggccggacgctccgcgcccagtacgaccattga

SEQ ID NO: 528733 - DNA, 630 bp, Stenotrophomonas maltophilia
atgcaaacatcacaagacaaagagtacttcgccgccgaagagggggtacgccaactcgccgcggcgatcgcgcttatgtgttcatcgaaaatggttgagttagaccgcgatagccgcacgttcaagcccgtctcagaattggcctttgaagctgaggccgcgaagcaacacccggtattcggtcgggtaatgttgtggattcttttctctacgggggccgagtacctactgaaggcatcattgattttttcgggcttgctggagcttaggacgcaacagaagcagggaataccgttgaaaggaacgccgtggacgtcagagtggctgcaaggcgttccggctgctgacgtggcgagtttcgaaacaatgggtcgagtcagaccacaacttgctcagctgcttgctggtcggctagatgtttcgcaagacgacaagatgagggttcaggatacctacgacttgcttagagacgctattcgaaatcgtgatgcgcacgcctacgtcaaaggagttcgagctgcgcacttccacgtactcgagacgttttgctccgccttcaacacactactttccctgatcgaagatgacgcgttaaaagtcgctctacagattgccatgcctgacgcctag

SEQ ID NO: 528734 - DNA, 492 bp, Stenotrophomonas maltophilia
atgcggcgatggctcgttctggccaccacccacctggcggtgctcgcgctaggttttggcgtcggcatctattccctgccaatcctgaccgcaccgggggcgccggatgcagaggcacttgatcgcgtcgctgctgaaacgctctacgcagggcgcttcgtgcgagatctcaaaggcagcaatcggctccactggggcgagggcgaggtgcgcgtgtcgcgcaatcacattgcgcactttgggcacttggccccgggccccgactacaagctctatctcgccccacgcttcgtcgacacggaggaagcttttctccgggtcaaagacgtatcgcgccgcgtgggcgatgtgaagacgttcaacggcttcctagtggatgtgccgaccgacaccgatgttcgcgactacaccacggtcgtcatctggtgcgaatcatttagccagttcatcagtgccgcggagtaccaggcctcgcgtcatgatcaagactga

SEQ ID NO: 528735 - DNA, 861 bp, Stenotrophomonas maltophilia
atgaactcaatcccgtccagacgagttcagatcaagcggaataccctccgcaacacagattttccgcaacgcggcctccagcttgctgccgttttccaacgttttcagtgtcactgcaatcccaccagtgatcccaagcttcctctgtgcactttcggagagagacagctcaagctccatgcgccgcagagagatatgcaccagaccgccatagcaaggctcaagacctccaccgacctcgatatgggcgtgcgccatgcccaactcttcgtcctggtcgtcatacgccttcgcgttctgcaataccacgtaacgagacggattcgtcgagctgtcggccaagccaactacgatgcattagtcatcttcctccatggaaacgacttcggccttgaatctgtacatttcccgggtactcctgacatgtggaaagctcaatgtctactccgccgctgtcctggtgccgctctcagcacgcagggtcgcatcgttgtcacccttccagcccacctgggtgccactcgccccgcctgcgagcccatccgtacttttgtctgttcgcccgccgctcgatcatcaagggcggcgccaacgtcaggggcggtctgtactgacggaaaccgagccgtcttccagcaggtggacgcttacatatgcgtctggcggaggtatccgatcgatcgacgcccctgcggggagaatgtcccaacttgtgatcgggccgcacaccgtcctatgcaccaatcggcgactatccaaccctcgcttggcaagctcggccacaacttcttcaggaggctggcggtcgaagcccttgtaggctgtgcacgtctctcccgtctggccaatgggatacgttga

SEQ ID NO: 528736 - DNA, 825 bp, Stenotrophomonas maltophilia
atgcccatcaaacagacgcgcggccctcaggtcgggaagtgcaacatctgtggcgaggtcggcccgctgaccgtggaccactgtccacccaagggatgggccccgcgcgttccactgcgtgtctccgaagtgatggctccctatcgcgacgggtcaaaattccggtaccagaagttcaacaatggcgttcagttcagatcgctctgcgagcgttgcaatcgagacatcctcggtacccgctacgatcctgaattgatttctttggtggagaaggtgacggcgctaaccacgtcagtacttcacattccggctctccagtacgtgcgcttacgaccccaacgcatcatgcgctcggtgatcggccacctgtgttcccaaggcgttgatcgtttccacaagggggaactgacagaggtgctgaagaactatcttaccgatcccacggcaaaattccccaactccctgagtctgtgctactggctcttcccgcatccaggcgtcgtgctgaccagggactactccatcacacgtctgggatgcggtagcgcgagcatgctctggatcatgaagtgcttcccgctggggttcgcactgatcaatagagggtacgcgtttgacggtgtgccccctcaaatggtgatggacgacttcggggatcttggtgacgatgatcaggctgagcttccgatcgcgctcatcaactaccccccgcgccacttccccgagcacccaagcagcaactcggcgatctttgcagggcctcagtccactatggcaaacgccagtcctcccaggccagtagacctttccaggataaagaagtag

SEQ ID NO: 528737 - DNA, 141 bp, Stenotrophomonas maltophilia
atgtccagtaagaagggccccgcggacttccgcagctcggagactggccggtttgtgaccgagcgcttcgcggagaaccacccgcgcaccactcagaaggaacacaaccgtccgccgccgccgcccaccaagaagaagtga

SEQ ID NO: 528738 - DNA, 636 bp, Stenotrophomonas maltophilia
gtgagcgcctggggcagcttcccttcatggcctgtagggcccttggccctgggccccttacgaggcggagccaacaagctgaccgggaggcacatcgctgcgatgaaggtcttcatcgcggtagcgatcgaggtggacttcactacccgatcaagcgaaatcacgaatgatcgcctgattcacctgacgggcctgtcccgtccaatgctcctgccagctgtggagactctggcggacagaggcgttttgaattttgacaacagcggctatcgcaatcgcttcactcaggtcccaagtgcggagaacacgcgctggaccaaggtgccagtggatcttgcaaccaaggccatgcagcagttgccaaatcgaggcgtgacagtcttggctgcgttcaagatctacctgaagctcctcgagagccgctcgaagggcagctccaagacgctcatctcccaccggaagctggtggaggccatgtccctacctccccgcgatgttgcggccggtatcgatcacctggttgtcaatcgccttgtccatgtaaggcagcatccgacgctcaacaccgccggccacccggtcaatgagtacgacctcaaagggccgctcaatggtcacggtggaccaaccaattga

SEQ ID NO: 528739 - DNA, 1059 bp, Stenotrophomonas maltophilia
atgtccctcgcccgtggttatgccgcccattcccataccgacccgctggtcccgtacgagttcgaacgccgcgcggtcggcccggacgacgtgcgcatcgagatcctctacagcggcatctgccattccgacctgcaccaggcccgcgatgactggggtggctcgatctacccgatggtgccgggccacgagatcatcggccgggtgaccgaagtcggcagcaacgtcacccgcttcaaggtcggcgaccacgccggcgtcggctgcatggtcgactcgtgccgccactgcgacgcctgtgagcacgatctggagcaatattgcgccgaaggcgcgacctggacctacaacggccgtgaacgcgaaaccggcgcgccgacctacggcggctattccgaccacgtggtggtcgagcagcgcttcgtggtgaaggtgtccgacaccctcgacctgaaggcggccgccccgctgttgtgcgccggcatcaccacctggtcgccgctgcgccactggaaggtcggcccggggcagaaggtgggcgtgatcggtctcggtggcctcggccacatgggcgtgaagttcgccaaggcactgggcgcgcacgtcgtgatgatcaccaccacgccggaaaagggtgccgatgccaagcgcctgggcgccgatgaggtactggtctcgcgcgatgccgcgcagatgaaggcgcacgccggcagcttcgacttcctgctcaacaccatcccggtcggccatgacaccaacccgtacatgggcctgctcaagcgcgaggccaccatgtgcctggtcggcgtgctgaccgaactggacccgccgctgaccggcggcagcgtgatcttcggccgcaagcacctgaccggctcggcaatcggcggcatggccgaaacccaggaaatgatggacttctgtgccgagcacggcatcgtcagcgacgtcgagatcatcgacatcaagaacgtcaacgaagcctgggaacgcatggcgaagaacgatgtgcgctaccgcttcgtgatcgacatggcgacgatgcagaacgccgcctga

SEQ ID NO: 528740 - DNA, 885 bp, Stenotrophomonas maltophilia
gtggccactgacaacctctcccacctggccgcgttcgccgcggtcgcccgccagcgcagcttccgccgtgccggcgccgagctggcgctgtcgacctcggcggtgagctacgcgatccgcgcgctggaggaacggttgggggtgggcctgttccatcgcaccacccgcagcgtggccctgaccgaggccgggcagcgcctgctggagcgcctgcagccggcgttggggcaggtgcacgacgcactggaagaaatgaaccacttccgcgcagccccggccggcctgctgcgcatcaacgccacccgcgcggcggtaccgacccagttggggccgaggctggcgcgcttcctgcacgcccatcccgacgtgcgggtggagctgaccgaaaatgacggcctggtcgacatcgtcgccgagggctacgacgccggcgtgcgcctgcatgagttcgtgccggaggacatggtggcggtgccgatggggccgccactgcgcgggctgatcgtcggctcgccggactacctgcggcgtcggccggcaccgcagcatccgcgcgacctggccgcgcacgaatgcatccgcttccgcttcgccagtgggcacctgtacaagtggcagttcgagcgcgatgggcaggcgctggagatcgacgtgcccgggcggttgaccctgtgcgagcagggcacgatcgtgcgcgccgttctggatggcatcggcctggcgtacgtgctggaagacacggcaaggccgtacatcgaatcggggcagatggtggcggtgctggaagactggagcgagccgtttgccggcttcgcgctgtactacccgaagcagcggcagatgccgggcgcgttgcgtgcgttcgtggatatgttgcgcgagtga

SEQ ID NO: 528741 - DNA, 663 bp, Stenotrophomonas maltophilia
atgggcgcaatgaacagcaccaccctgcccgcgcccacatcaccgtcccgccgtcgtggccgccctgcgcgaccggaagccgaagtccgccacgcggtgctgcaggccacgctggagctgctgctggcacagggttacgaggccaccaccattgaagcggtggcggcgcacgccggggtggcgaagaagaccgtctaccgccatgccagcaaccgcgaggagctggtcgggttggcggtgcgtgagtggaccgacggcttcgcgccacagctgcagcgtgatgcgcgcaatgcccaagaggtcgtgccgttgctgcaggacatcctgcacgcggtgtgcacgcaggcgctatcggcgcaggcggtgcaggtgttccgcctgctggccaccgatttccccggcaaggacgcgctgctgcaggcctacctcgacaacggcatcgaacgcggccgtgcgctgctggccgactggctggcacgtcagcagcagcgtggactgctgcgcgagggagattccgcatgcatggcgcggctgatcctggcgatggccgtggccgagccgctgcgcgaacgcgtgatcggcgtggtggccgaggatgcgccagtggagatgcatctgcgtgagtgcgtggcgttgttggcgccggtgttgcaagggccgtag

SEQ ID NO: 528742 - DNA, 231 bp, Stenotrophomonas maltophilia
atggtgattaccgacttaaatcagatgcggtggggcgccgatgcaaggcggcggcgcgacaatctcgcgcgaaaaccgcacgccaggaggcagttcgcggctgcattaatcattgcgattgcactcctctcccccttggcagaggtggcggaatccacgagtcacgagggccaagatatagacccttcgcaggaaggtatagaagcgctcgacaaagcggaggatttctga

SEQ ID NO: 528743 - DNA, 1161 bp, Stenotrophomonas maltophilia
atgaagcgcaggaagaggatctactacaccgacacccagaaggcactgatgtgggatcgctggcagcagggcgagtcgctgcaccagatcgcatccttgttcgatcggcaccatagttcggtgcggaacatcctggccgagcatggcgggattcgtccgccggtgcggcgacgatctccgagggtgctgagcttggccgagcgtgaggagatctcccgtgggctggcggcggggcgctcgatccgtgcgatcgccgcatcgctcgggcgggcgccttccacggtgagccgagaagtcggccgcaatgagggccctgagggctaccgcgccagccaagccgaccatgccgcctgggaccgagcgcggcgtcccaagccctgtaagctggcgctgcatcgagccttggccgctcgtgtggcagagaaaatccagcgacagtggtcgcctgagcaggtggccggctggcttaaacgcacctatcccgatgatgcgagccgtcaggtgtcccacgagaccatctatcgcacgctctacatccagtcgcatggcgccttgaaacaggaactgctcgcgcatctgaggcgcacgcgggcgatgcgtcgttcacgacaccacacccagaagacagagaaccacggccggatcaccgacaccgtctcgatcagcgaacggccagccagcgccgaagatcgggctgtgccgggacactgggaaggcgacctgctgttcggtgaccggaacagtcagatcgccacgctggtggagcggcagacccgctatctgatgttggtgaaggtggcaggcaaggacaccgagaccgtggtcaatgcactgatcaagaacgcgcgccgcctgccgaagcagctgtaccggtcgctgacctgggatcggggcaaggagatggcaggacaccgccgcttcaccttggccaccgacatccaggtctacttctgcgatccgcatcatccctggcagcgcggcaccaacgagaacaccaacggcctactacggcagtacttcccgaaggggatcaatctggccgatgtcacgcaggcgaagctggatgccgtggcgcgccagctcaacgaacggccacgtaagacgctggggtacgaaacaccggcagagcgatatcgacaaactgttgcgtcgatcggttga

SEQ ID NO: 528744 - DNA, 261 bp, Stenotrophomonas maltophilia
atggccgaccacgaaggcatggaagaaaggcccaccctgtatgcctccgctggagacaagttcatcgacatactctgccgcctgattcatttctttgcgaccgatttcagaacgcccttttttcaactcgatgagcaggacatcgcgcatcatcacgagctgatccttgccggtatcaaaactttccgtcccacgattgagagagtggcatcggagaggacgacgatgtcggggcgcttcgcagcattagcaaaggtctga

SEQ ID NO: 528745 - DNA, 933 bp, Stenotrophomonas maltophilia
atgagcgggattagaaagctagaacgagattttgcgcaggctgatattgctgctctgacgtcgcttctcgatcagttgagcgaagaagatgtgatggctaggttcggtctggagtcgcgcttagaagagctgcaggcgaaacttgcaagaatggacgatacccctgatgctgagcctgcatctgcagcgctgttctttggcggccgtccggtggtaggaacccgaggaatagaaacagaattcggcggctcggcggtagcaaagtttcaagacatcatctccaaaatcatggctcacgaagccggcggacttggccagcgtggtgtcgttccaaataaggccgcatcatctctacacatcacgaacgtggttcggggctcttttgggttcttgctggaggaaattcatgatcagtcagacatgcttggcgctccgcttaagcaggcgattgaagaaacatcaagggtgctgagtgccttcggtgagcctgatgaggaagagtttagaactgcggtggaagctatcgaccagcgggtgttgaataccactagagagttctttgacttgatgaaggtcaatggcgctacgctcagggttgttgcaggcgatagggacaattcgtttggtccagatgcggtttcccgtgcagcagagcgagcgcagtcgacatccgtggaggaggtcgatgagttggttacaggccaactttcgggaacgctgccggaagcgcatcagttcgaattccgcagacaagaggatggcgtagtaatccgaggaaaggtcgcaaagtccttcacggtggatgagctgatccggtttaatcagcagtgggttaatcaaagtgcgactgccagttttaaagtgaatagagttaagcgcaatggcgaggtggtacgtgagcaatatgtgctgatggagctatcaatccgttga

SEQ ID NO: 528746 - DNA, 288 bp, Stenotrophomonas maltophilia
atgaccacagagacagcagaaatccttgaccgcctgcacgcgtgcgagaccagccttgaagtacaccgtggctacctcaaagctatggagtacgccctacgggtttccttcatcacccatcaggatcccgaagcgctgctctcgacttggacaaagctgctccccgctatcgctcgccgccacgaaagcgacggcggcgaaatgttcgccgccgcgttccagcagtccctgacaatctttacggagcaaataggcgtagggcacccgcacaatggctcaacggattga

SEQ ID NO: 528747 - DNA, 768 bp, Stenotrophomonas maltophilia
atggttgaccggcgctaccggagttggcaaaattctagtcacaccgccgggcgcttcggcgcgcggtcgcagggctccctagtggagcccttgccttttctggggggagacggcttgcgaacctacgtatatgtcgacggcttcaacctctacaactctggtctgaagcaggaccgctcactgcgctggctcgatatccaggcaatgtgccgaggcgcacttcgggcggaaaatgatgtgattggagtgcgctacttcactgcacgaattagcgcggaagagaacgacccagatgggccgacgcgccaagacgcgtatttgagagccctcgaggctcatacgcagaacctctcggtgcactttggtcaattcagatctgagcgccgccgcaggccgattgcgggctgggtggctggctctgtcggccctaggacggttgaggtgattgaacgtagcgagaagggctcagacgtcaatctagctgttcacctcgtcaacgatgcgtgggccgacctctatgattgcgctgttgttgtctcgaatgattcagacttagctgaagcgttgcgcattgtccgttctagaggcaaaggtgtcggcatcttgacgacaaagaatcgaccgacaggggcgctcttggcccacgcccacttccatcgccgcatcaccaacacacacttcacccactccaggctgcccgatccagtggtcgatccggaagggcggcagatcagttgccctgttgcttggcaatggtcccaagagtaa

SEQ ID NO: 528748 - DNA, 216 bp, Stenotrophomonas maltophilia
gtgaaggtgctgcaggatctgcgcgcgcgcggtgccaagggcgactgggcggtggtggctacggcgcatccagccaagttcgaggctgtggtcgagccgctgatcggcgaaacggtggcggtgccgcctgcgctggatgcgttgctgcagcgaccggcgcacgccgaaccattggcggcagattacgcggccttgcgcgaggtgttgctgcgttga

SEQ ID NO: 528749 - DNA, 150 bp, Stenotrophomonas maltophilia
atgacacgattgattcgcgccctgcaggtgtcgctgaacctgcgttcggacaattccacgcagtgcatccgttccaagtatcgctactggaatatcttctggccggaaggactccacgtattcgatgacatcgccagggagggtcgatga

SEQ ID NO: 528750 - DNA, 318 bp, Stenotrophomonas maltophilia
atgattgcctatcttggttgggggtcgctggtatggcaacccgacggtctaccggttcgtggacagtggctggcagacgggccaacggtttgcgtagagtttttaaggcaatccggcaatggacggcttacgttggtcatgcatgcggccgcgtctgctgtcacctccttctgggttgaggctggtaccgacgacgagggcgacgccaagcgagccttgcgtgagcgggaagccattccctcaaagaacatggagcgacacttggggggtctggacacatggctgtccagcaccggcgagtattcctgggctcgctga

SEQ ID NO: 528751 - DNA, 687 bp, Stenotrophomonas maltophilia
atgttgggaattggccagggcatcctcggcatcggggccttcaagcagcgcctgccgcgcccggaagaggcactgccagggcgcgagcaaccgctgccgctgcacagcaaccagcacttcgtgaacagccatccgctgaaggaccgcttcgccggcctgcagcagatccgcttcgcgctgggctgtttctggggcgccgagcgcaagttctggaccgagccgggcgtgtacagcacctcggtcggctacgccggcggcatcaccccgaacccgacctatgaagaagtgtgctcgggcctgaccgggcacaccgaagtggtgcaggtggtgttcgacccggcggtggtgagcctggaacggctgctgcagctgttctgggaaagccacgacccgacccagggcatgcgccagggcaacgacaccggcacccagtaccgttcggcgatccacgccaccgacgaggcacagtacgctgccgcgctggccagccgcgaggcctaccaggcccagctggatgcggccggctacggcccgatcaccaccgagatcgtgtacccggcaccggcgtactactacgccgaggactatcaccagcagtacctggcgaagaatccgaacggctactgcggcatcggcggcaccggcgtgagctgcccgatcgggttggatgtggaggcgccgcgctga

SEQ ID NO: 528752 - DNA, 177 bp, Stenotrophomonas maltophilia; identical to SEQ ID NO: 511045

SEQ ID NO: 528753 - DNA, 267 bp, Stenotrophomonas maltophilia
atgcacctgctcccaggcctgcgcagcgcgcacctgcgcttcctgcatttcggctcggatcaactcggtcatctcggcgtggccggcttccgcttcctcccagatgaagtaccggcgcatctggtgcgtcacaccatccacaaagaccatcgtctcgaacaggagtggatcgccaccaagtccgtggttgtggtccagcccaagaaagaccgtgaagatacagacgtcatcgatccaggtctccaccacgcgccgatcagctactga

SEQ ID NO: 528754 - DNA, 198 bp, Stenotrophomonas maltophilia
atgaatgctgagatcgttcaccgtattgagcagacgttctctgccgatccccaggcagcagagatggcccacgacttccgctatgtactgctcgatcttgtcgagcacgggaaagtcacgccggagacactcagccgcattaagaaaaacgctggcgccacacctggcaaggcagcgaagtccaagaagggcaagtga

SEQ ID NO: 528755 - DNA, 219 bp, Stenotrophomonas maltophilia
atgacgcaagccccccaacgtctggcctatggaccggaagaagccgccgaccagctagggatcagccgcgcccgtttctaccagcttgtcaaggaaggaagggtgcggacctacaaggacggcaagcgccggctgtgcagccatgccgcgctagtggagtgccagcaggccatggagaaggcctccattgagggccggcccgatgcagtacccgcctga

SEQ ID NO: 528756 - DNA, 1104 bp, Stenotrophomonas maltophilia
atgagcaacgacaagacaaccctggcggacgtgaagcccggtgggtgggtgaggctgggggatgggcgcgagcgggcgcggtttcaggaattcctgagtcggaatccgctcacagcgctgtgcgctggtactgcatgggaagtatggcaagccgccctctccgcccagccctccccgggtggtcagggggagggtttggctatggctgcgggaaagcttctggatgttgtgcgcgagctttgcctcaacgatgaccctcaccctccgaaaagcctctctgatgcagcggagaatcttcaatcggtgctcgcctgcaggtctccgctggggccatgcaattgctgcggtgggaccggctatgtcgatgatggcgagatcaattgctatccggacggaactccatacgaatgcggcccagtgaagtgcatcaaggactgtccgtcctgcgccgcccaccagccggtaggcgatcagcacccggacgacctggcagtggacgccttcgccgcagccatgaaggcaaagatggccgaagcgcgcgccaaaggtcgtggcggctgggaagaccccgcgcagtgcactgccgaggatctatctcgcatgctccgcaaccacgtggagaagggcgacccgcgcgacgttgccaacttctgcatgatgctgcaccagcgcggtgaagccatcgccgcccgccagccggtgggggagcctgcctacaactcggctggaatttcgctgaccgcgtgccagctgcacgaagcgttgctgatggcgggtgacccagaactggatgtcccgttcgaagatcgaagccttgtccggattttctggacggacacaggccacagtggacccggcctctactgcgaatgcgtcggcgctgaggaagagggctgcatcctgctggacgggaccgcgcctgctatcggccagtcctcgcaggcggtggacctggccatgccgatcgcgatgatcgaccaggcgctgggtcacctctcaactgcactggatgatctggactccagtcccgacgcccgccctggtgccatggtcaccgaagcgatgggatgcctgcgccaagcgctgactggggtgcagccatga

SEQ ID NO: 528757 - DNA, 1134 bp, Stenotrophomonas maltophilia
atgcaggatggcgcggctgccgggcaggcggcgtgcgtccggggtcagattgccgatggcgtactggttgagtacttcaatggcatcgacgatcgcatcgaggtgttcgaagatcaccgtgttgatgccgttggccagttggccgtagacgcccgggaagtcttcgggaatgcggtggctgatgtccgggccggcatgcatctgcgccatcagctgggtctgctcgctgaagcggcgcagcatcgcggtcatctcggcggtggcggccagcatcttgccggcttcgtccttgctggtggcctgggtgctgacgctgagatcaccgcgcgcgacggcctggatggcatgcacggccttgccgagtgggccggtcactgcacgcgagatgacgacggccagcacggctgcgaccagcgacagcagcaccatgcagccgacgatggcaatcatgctggtgcggtgggtggcattggcgccggcgatcttgccgtccatctggccggcgatgtgggtgcccagtgccttcattgcagcgaacagatcgcgacgcgcggggcgcgactgctcgtcggagatctgctgggcccgtgcgccatcaccggcagccacggcgtcgcgcatcgccttgttggcggcgaagtagcgatccagctgcgcgctcgccgcgcgatacagttcacgctccttggccagcgccggcagcgccgagtacgcggccagctcgtcatgcacggccttggcggtgtcgtccatgcgcttgttgtagtcggcgaccttctccggctggtcgagcatgctcagctgtgcaagttcgtaggtgcggaactcgcccagttgcgagcgcgcctcgcccaggtgctgcaccgacggaatgtcgttgccagccatctcgcgcagctgcgcgttggcttcgctcagacgcaccagtgcgaaggcgccgaggaccagggtcatcaaggtggtgagggtgaaccccacggccagcttgcgggcgatgggcagatcttggaaccacttcatgcagggtgctccaggtgggcagagtgccggcgtctgtgcgccggtttgggggtggttgcagagcgaacgggagtgcccggtgggggttcggtgacggccgtcattgcggaatag

SEQ ID NO: 528758 - DNA, 1992 bp, Stenotrophomonas maltophilia
atgagcatggacctgcaacgcttccacgccaccttcttcgaggagagccgcgaaggcctcgacgcgatggaggctggcctgctggccctggaatcggggcagcaggacgcggagatcatcaattcggtgttccgcgccgcccactccatcaagggcggcgccggcaccttcggcttcgatgccatcgccggcctgacccacgtgctggaaacgctgctcgatgagctgcgtgccggcaagcgggccctggaaggccacgctgtcgacgccatgctgtcctcggtggacgtgctgcgcgcgctgctgcgcgaggccgagcacggccaggctgccgaccccgccgctgttgctgcggtgaaggcacgcctggaagccgttctctccggccaggccgcaccgagcgcgccggccgctgccgccgccaaggtggacgatacgccggaagcctggcagatcggcttcaccccggcaccgtcgctgttcatgagcggcaacgatccgttgcgcatcatccgcgaactggaacacctcggttcgctgcaggtggccgcgcgcatggaacgcctgcccggatttgcccagctcgacccgctcgaggcccacctggcgtgggacctgggcctggtcggcaaggtgccgcgcagcaagatcgaagacaccttcgcctgggtactggacgactgcgagctggacatccgtccggcagcgccgccgagcctggctacccaggcgcccgttgcagcaaccccttccacgcctgctgccatcgcaccggcagcgcctgctgcgccagccgccagcggcgctgccagccaggaagccgagacctcgatccgcgtcagcgtcgacaaggtcgatgcgctgatcaacctggtcggcgaactggtcatcacccaggccatgctcaagcaggtctcgcacgcgctggacccggtccacgccgagagcctgtttgccgggcttgaccagctggaacgcaacacccgcgacctgcaggaagcagtgatcggcgtgcgcatgctgccggtcgatgcggtgttccgccgcttcccgcgcctggtccgcgacctgtccagccgcctcggcaagcaggtgcgcctgcgcaccgtcggcgaaggcaccgagctggacaagggcctgatcgagaagatcgccgatccgctggtgcacctggtgcgcaactcgatcgaccacggcctggaaatgcccgatgtgcgccgcggcgcgggcaaggacgagaccggcacgatcaccctggccgcttcgcatcaaggcggtcatatcgtcattgaagtgagcgacgacggccgcggcctggatcgcgccaagatcctggccaaggccaccgaacgcggcctggccgtgccggacaacccgaccgattcgcaggtctgggacctgatcttccagcccggcttctccaccgccgatgcggtcaccgacctgtccgggcgcggcgtcggcatggacgtggtccgccgcaacatccaggcgctgggtggcgaggtgcagatcgaaagcagcctcggcgccggtacccgcacactgatccgcctgccgctgaccctggccatcctcgatggcatgaccgtggccgtggccggcgaaaccctgatcctgccactggcctatgtgcttgaggcgttgcagccgcaggccgaggacatccgcagcatggccggcgaaggccgcgtgctgcgcgtgcgtggcgagtacctgcccatcctctcgctgagcgagtactacggctacggcaaccgtgcaccgggcagcgaatcgctggtggtcgtggtcgaaggcgatggccagaagatcgcactggaagtggacgagctggtcggccagcagcaggtggtggtgaagaacatcgagaacaactaccgccgcatcggtggggtgtccggtgccaccatccttggtgacggccgcgtggcactgatcgtcgacatcggtgggctggtgcgttcgctgcggatgccgcaggccgcctga

SEQ ID NO: 528759 - DNA, 783 bp, Stenotrophomonas maltophilia
atgcgcatctgggcagtcgccaaccagaagggcggagtcggcaagaccaccaccaccctcgccctcggccgtggcctggccgcgcttggccatcgcgtattgctgatcgacctcgatccgcatgcctcgctcagccgcgccttcggcgtgccggtggatccgcccccggccggcgtactggaactgttcggcgccccgccggcagatctttccagcctgtgccatgccagcagcatccacggtctggactatgtctgcgcgcagtcggcgctggccacgctggagcgccgcagcgccaaccagcccggcctcggcctggccctgcagaacgcgctggcgcgccaccagggccagcacgactacatcctgctggactgtgcccccaccctcggcctgttgatgatcaatgcgctggccgctgcggaccgcctgatcattcccacccaggccgagccgctggccctgcacggcctggatggcatggtccgcaccggcgagatggtcgagcgctcgcgccgccgccccctgccgatctcgatcctgccgaccctgttcgaccgccgcacccgcgccggcaacgaatcgctgcgcaccatgcaggatcgtcacggcacccgcgtgtgggaagacgcgattccgatcgatacccgcatcagcaatgccgcaggcctgaccctgcccagcgtcggcgaggactaccccggccgcggcctggccgcctaccgccgcgccctgaactggatcctcggcgaagatgcccgtgccctggagcaggcggcatga

SEQ ID NO: 528760 - DNA, 1818 bp, Stenotrophomonas maltophilia
atgagcgcggtatccgacgacatcactgccgatttcatcatcgaggcccaggaaatcctggatcgcctgggcgaacagctggtgtcgctggagcaggcaccgcaggacaccgagcaactcaacgcggtgttccgcggctaccacacgctcaagggcggcgccggcttccttggcgtcaccgcaatggtcgagctgtgccacgccgctgaagaagcacttggcatcgcgcgtgccgggcaggcggtactgcaggcccaccacttcgacgccgcccagcaatcgctggactacctgcagtcgatgctggacgccgtgtcctccggtacggagccgggctatgcgccgccggacctgatcgcgcagttcgacatgaacggtggcactgccgcaccggtcgctgcggccgcgcctgcggcaggtggcagcgatctgatcaccgacgacgaattcgaggccctgctcgaccagctgcacggcggcaacgcgccgaccgcagtcgcgccggcgaagaaggccgacgacggcctgatcagcgaagacgagttcgaagccctgctggaccagctgcacggtggcgctgcgccaggcgccaagcctgctgccgccgtcgcggcggcacccgccgcagcaccgcgcccggcacccgcagccaagccggcagccaagccgatggccgaggccgagcacaccgtgcgcgtggacaccaaacgcctggatgcgatcgtcaacctgatcggcgaactggtgctgtcacgcaaccgcctgaagaccctgcgtgcacgcctgcgcgacgaggagctggaccgcgccgtatcgacgctggacatcgccactgcccgcctgcagtcggcggtgatgcgtacccgcatgcagccggttggcaaggtgttctcgcgcttccccaaggtcgcccgcgacgtcgcccgctcgctgaagaaggaagtggacctcgagctggtcggcgccgagaccgagctcgaccgcaacctggtcgaagcgctggccgacccgctggtgcacctggtccgcaacgccatcgaccatggtgtggaaatgcccgagctgcgtgaagcgcagggcaagccacggatgggccatgtgcgcctgtcggcgcaacaggaaggcgactacgtcagcatcgaggtgcaggacgatggcgccggcatcgacccggaaaagctgcgtgccaaggcgcgcgaaaagggcctgatcgatccggaagccgccgctcgcctgagcagcgaggaatgcctgcacctggtgttcctgcccggcttctcgaccaagcagcaggtcaccgacatttccggccgtggcgtcggcatggacgtggtgcagtcgcgcatccgcgaactgagcggccagatccagatccagtcggaactggggcgtggcagccgcttcctgatccgcgtgccgctcaccctggcgatcctgccaaccctgctggtgcaggccggcgaggacgtctacgcgctaccgctggcgcgcgtgatggaagtgctgcacgcaccgcgcacgtcgctgggctggttcgatggccgcgccgtgctcgaccgccgctcgcacaccctgccgctggtcgacctgcgccagtggctggatgtgacgcccgccgcgtcgaccctgctgaccatcgtggtgctgcaggccggtgaagcgcgcttcggactggtcgtggaccaggtgcgcgggcgcgaggaagtggtcatcaagccactgccgaaagccctgcgcggcctgcgcggttatgccggtgcaaccttgatcggcgatggtcgcatggcactgatcctggacgtggacggcatccgctga

SEQ ID NO: 528761 - DNA, 744 bp, Stenotrophomonas maltophilia
atgaaaggtgcagcccagtaccgggaggtccagcgctcggcggccaacgaggtcatcgcccagcactcggacctggtgcggcgcatagcccaccacctggccgcgcggctgccggccagcgttgaagtggacgacctgatccaggccggcatgatgggcctgatcgaagcctcgcgcagctacgacgccgaccagggcgcctcgttcgagacctatgcctcgatccgcatccgcggttcgatgatcgacgagatccgccgtggcgactgggtgccgcgctcggtgcaccgccgtgcccgcgatgccgccgccaccatccgccgcctggaacagagcagcggccgcgccgccagcgccaccgaagtggccgccgcgatggagatgccgctgcccgaatacctgcggttgatggaagacgccgcacgcggccaggtactgagcctggaatcgcgcatcgaggaccagggcgagctggacaccgtcgcccagggcggcccgaccccgcagcaggtgctggagcgcggcgaattcggccgcgagctgggcaaggccatcggccacctgcccgagcgcgaacagctggtgctctcgctctattacgagcaggaactgaacctgaaggagatcggcgcggtgctcggcgtgagcgagtcgcgggtctgccagatccacggccaggcggtgctgcgcctgcgtggccggctcaagattttcgaggcggcggacgccggcctggaagaatga

SEQ ID NO: 528762 - DNA, 888 bp, Stenotrophomonas maltophilia
atgccgtcgcgtgagtacgccaagctgaccaagaccttcccgctgtcggccacccgcagcgagccgctcggccctgtgcgcacccttgccgtcactggcggcaagggcggcgtgggcaagaccaatgtctcggccaacctggccgtggcactggccggcatgggcaagcgcacgctgctgctggacgccgaccttggcctggccaacatcgacgtgatcctggggctgaaccccaccttcacgctggccgacctggtcgccggccgctgctcgctggacgatgtgatcgtcgaaggcccgaacggcgtgctggtggtcccggccgcgtccggccgccggcacatggctgagctggccccggccgagcacgtcggcctggtcaacgtgttctccgaactggaacgcgaactggacatcatggtggtcgacaccgccgccggcatcaccgacggcgtgctgaccttctgccaggccgcacaggacaccgtggtggtggtctgcgatgaacccgcgtcgatcaccgacgcctacgcgctgatcaaggtgctgtcgcgcgaacgcggcgtggaccgcatccaggtggtggccaacatggtgcgcgaccccaacgagggccgcgtgctgtacgagaagctgacccgcgtctgcgagaagttcctcgccgatgtctcgctgaactacctgggctgcgtgccgcaggatgactggctgcgcctgtcggtgcagcgccagcagccggtggtgaaagcctatccgtccagcccggcagcactggcgatcaccgagatcgcgcgtcgcaccgcacgctggcaggcgccaaccgaaccgcgtggcggcgtcgagttcttcctcgagcgcattctcaagcagcgcggggtggccgcatga

SEQ ID NO: 528763 - DNA, 2109 bp, Stenotrophomonas maltophilia
gtgagcgcccagccctccgccggattcaatacccgccgcgccctggaaatgatccgccagggtcttggcgcaccgctgatcgtgctggccctgctggccatggtcgtggtgccgctggccgcgccagtgctcgatgcactgttcaccttcaacatcgccatctcgctgatggtgctgctggcggtggtctacgtgaagcgcccgctggacttcacgatcttcccgatcgtgctgctgatcaccaccatgctgcggctggcgctgaacgtggcgtccacccgcgtgatcctgctcaacggccagaacggccacgacgccgcgggcaaggtcatcgccgccttcggcgaattcgtgatcggcggcaactacgcggtcggcatcgtggtcttcgcgatcctcaccatcatcaacttcgtggtcatcaccaagggcgcaggccgcgtctccgaagtgaccgcgcgcttcatcctggacgcgatgcccggcaagcagatggcgatcgacgccgacctcaacgccggtttgctgacgcgtgaagaagccaagctgcgccgtgaagaggtccgcgaggaagccgacttctacggcgcgatggacggtgccagcaagttcatccgtggcgacgccatcgccggcatcctgatcctgttcatcaacatgctcggcggcctggccgtgggcgtgctgcagcatggcatgccgttcggcgacgccgctgccacctacaccctgctctccatcggtgacggcctggtggcgcagctgccggccctgctggtgtccagcgcggtggcgatgctggtcacccgcgcctcgcgttcgcaggacatggcccaggccatgaccggccaggtgttcggccagtaccgtgcgctggcgatcactgccggcatcatcggcgtggtcggcctggtgccgggcatgcccaatgtcgctttcctgacgctgtccgcgatcctcggcttcatcgcgtggaaggtctatcgcaagggcaaggctgccaccatcgatccgggagctgcaggcaacgacgccgctgcgctcaacgcattgggccgcccggccgcgccggcaccgaccgccgaactgagctgggacgagctgcgcccggtcgatccgctgggcctggaggtcggctaccggctgatcccgctggtggacagcaaccagggcggcgaattgatggcgcgcatcaagggtgtgcgccgcaagttgacccaggacgtcggcttcctcattccgtcggtgcatatccgcgacaatctggagctgccggccaatggttaccgcgtgctggtgcacggcgtgccggtggccaccgccgagatccacccggaccgcgaactggcgctggaccccggcagtgcactcggcgcgctggaaggtatcgccggcaaggaccccgcgttcggcctggatgccacctggatccagccgcaccagcgtgcccaggccgaaacgctgggctacaccgtggtcgacccggccaccgtggtcgctacccacctgtcgcacctgatccgcgagcacgcgccggaactgctcggccacgaggaagtgcagcacctgctggccaacctggccaagagcgcgcccaagctcgtcgaagatctgacgccgaaggcgctgccgctgtcggcggtggtgcgcgtgctgcagaacctgctggtcgagcgcattccgatccgccagctgcgcaagatcgccgaggcactggtcgaacacgcgcccagcagccaggacccggcggtgctgaccgctgccgtgcgcaccgcgctgggccgcttcatcgtgcaggagatcgccggaatgtcggcggagctgccggtgttcaccctcaacccgcaattggaacgtgtcttgcaggagtccacgcagggcaacggcgccgcgctggaacccggactcgctgagcgactgcaccagagcctggccgaatgtgtcagcaagcaggaagcccgcaacgagcccgcggtcgtgctggtacctggcccggtgcgcgccgcgctggcccgcctggtccgccacagcgttccgtcgctgtcggtcctggcctacagcgaggtgccggaggacaagcgcctgaagctggtcggaacgatcagctga

SEQ ID NO: 528764 - DNA, 684 bp, Stenotrophomonas maltophilia
atgggcgccaaccgctggggccatgcggcaacgctggacgccgccgcgggtgcccaccgccgctaccacctgtcggccgcacccgcttcggccgatggctaccaccgcctgcaggaacagccgccagcgccagaccagctggggcagaccgtggacctggccgaccgcaatgaaatgcggcatggctactacccgttcccgatcatcgcagcacaggacgaaagggatacggcgctgtcctttgtcaccgatccctttacaggcccgatggatctggtgggcagcttctccggcgacctgaaggtccggatcaacaagcgcgacttcgatttcaccgtcaccctgtacgaactgatggccgatggacgccggatgcagctgtcctactacatgggccgggccagccacgtgcgtgacccgaccacgcgccagctgcttcagccaggccaatggacccacctgcccttcgaccgcacgcgcatggtggcgcgccgactggccgccggcagccgcctgctggtgaaggtggatgtactgaaggacgcgatgcaccaggtgaaccacggtaccggccgcgatgtcagcgacgagagcgtggccgatgcgggtgaaccgctgcgggtggactggcacagcgacagcatgttgtcgattccgctgcagccggtgaagccggacggatga

SEQ ID NO: 528765 - DNA, 270 bp, Stenotrophomonas maltophilia
atgtctcccgaacttgccctgaccgaactgcgtggcggcctgatcaccgtgttgtgggtggccggcccgctgctgctcaccgtactggtggtgggcgtggtggtcggcgtcgtgcaggccgccacccagctcaacgaaccgaccatcgccttcgtcgccaaggcggcggcgctgaccgcggtgctgttcgcgctgggcagcctgctgatcggccacctggttgaattcaccacgctgttgttccagcgcatcccgcacctgatcggctag

SEQ ID NO: 528766 - DNA, 336 bp, Stenotrophomonas maltophilia
atgaacgatatcgacgccctcgaacccaccccggcccagttcagcagcctgcaggccgacgaggcgaacggcccggacctgaacctggacgtgatcctggacgtgccggtgacgctgtcgctggaagtcggtcgcgcgcgcctaccgatccgcaacctgctgcagctcaaccagggctcggtggtggagctggaacgcggcgccggcgaatcgctggatgtgttcgtcaacggcaccctgatcgcccacggcgaagtggtggtgatcaatgaccgcttcggcgtgcgcctgaccgacgtggtcagcccgagcgagcggatccggagactgcgttga

SEQ ID NO: 528767 - DNA, 516 bp, Stenotrophomonas maltophilia
gtggccgcagccgctgacaaaaccaagaagaccgccgagaaggacaaggccgccaagccgcgcagtccgatcctgatcaccgcattggtggccgtgctggccgccgccgccgctggtggcggcgtctggttcttcacccagtccaagccggaagagaagaccgcgcaggccccgaagaagtcggccaccccggcgccggcgcagtacttcgcgctcgacccggccttcgtggtcaacctcaacggccccatcgacggcccgcgctacctgcagctggaagtgcagctgatgacgcgtgacccggccgcgctggaggcgatcaagacccacgcgccggccatccgtgcacgcctgctgatgctgttctcgcaggtcagccccgaccagatcgccgatgtcgccggcaagcagaagctgcaggctgcgtcgctggccgaagtgcagaaagtgctcaaggccgagaccggcagcaatggtgccgacgacctgctgttcaccagtttcgtgacccagtaa

SEQ ID NO: 528768 - DNA, 1167 bp, Stenotrophomonas maltophilia
atgccctccccgctcgccagcagcgccaacgcgcagacacagaattccggcggcgctgcagcgcgcgcaccgcgcagcgagggcggcaaggaattcggccagctgctgcagggtggcgcgccctctgcagccgcccctgccagcagcgccaccacgccgacgccatccacgccgagccagccatcgacccccgacagcaatggccaggctcccggcgaacgcaacgcagaaggcgaagcggcaagcgctgaaacgtcgccgctgccgcccgttgccgccaccccggctggacccggcaccgacaaggacacgcccgccgcgaccgaggatgccccgtggccaccgctcggcctggccggcctggtgctggcgatgccgacgcccgtggatccggccgccgctctgccgaccaccgctgcaccgtcgctgtccagcgacggtagcgcgctgcccgctgcccccgccgcgaacccggcgctgcccgcaaccgccccagcagcggctaccgcagccgcagcgacggccgacggcaaacctgcggcgaccagcgctggggatgccagcgcgctgccactgccggagatgatcccgcccggcaagcgcagcgagcgcggcgaaggcagtgacgtggctgccttcggcgaccgcaacagtgcaccactgctgcacgcaccggcagcggccgccgtgcaggacctgaaagcggcgctcgccaccggcaacgcgatcttcaatggcgaacccacgcccaagcccgtgctgggtgacgacggcttcgaccaggccatcggcgcgcgcctgggctggctggccgaccagaagatcggtcacgcccacatccgcctgagtccggacgacatgggcccggtggatgttcgcctgcagttgaacggcgacaaggtgcatgccagcttcagcagcccgcacgtggacgtgcggcaggcgctggaaagcagcctgccgcgcctgcgcgagctgctgggcgaacagggcttccaactggcccacgccgatgtcggccaccaggcgcctggaggtgacggcagtgcgtcggggcaatccggcgccggcggcatggccggtgacggagaaccgtcgccgggtgacaccagcgtgtcgtccgcgcagttgatccgccagcgcggattgctggacgcctacgcctga

SEQ ID NO: 528769 - DNA, 468 bp, Stenotrophomonas maltophilia
atgaaccagtccaagcgcatcgatcccctgctcaagcgggcccaggaacacgaggacgcggtcgcccgagacctcgctgaacgccagcgcgttctcgatacccatctatcgcgactggacgaactgcgacgttatgccgaggagtacgcaaacgcgcagatggcagcgaccagcccggcgcagctgctgaaccgtcgcgctttcctggaccgcctggacagtgcggtcgagcagcagcaagccacggtcaacggcaaccgcgaaaaagtggaagccgagcgtgcccgcctgatcctggccagccgggacaaggccgtgctggaacagctcgccgccagctaccgcgcgcaggaaaaagtggtgaccgatcgccgcgaccagcgcgagatggacgacatcggtgcgcgccgcgcgcgccttgtacaggccgaagaccaggatggcaccgagcagggaggccgctcgtga

SEQ ID NO: 528770 - DNA, 1386 bp, Stenotrophomonas maltophilia
atgacgcccgaatcgcagccggcaccaccgcccgccgactgggccatggcccgcaacctgcgcctggcccgtcgcctcgacggcctgcgcgtggataccgcgcatggtcgcggcctgatccgcgagggcgtgctgcgccgcgcggtcgggctcaccctggaagcggttggctgcgaggcgccgctgggcgccagttgcaaggtggaagtggtcgacggtggctgggtcgatgccgaagtggtcggctttgccggcgagcgcacctacctgatgcccagcgctgaactgcacggcctgctgcccaacgcccgcgtggtgccgtcggcgcgccgcggtggcgtggaagtcggcgaaggcctgctcggccgggtcatcgacagtgatggcgtgccgctggacggcaaggggccgatccgcgccgaaggccacgtcggcatggccggtgtctcgatcaatccgctggcacgtgaaccgatcacccagccgctggatgtgggcgtgcgcgcgatcaacgcgctgctgccgatcggccgcggccagcgtgtcggcctgttcgccggttccggcgtcggcaaatccacgctgctcggcatgatgacccgctacaccgctgccgatgtgatcgtggtcgggctgatcggtgaacgtggccgcgaagtccgtgatttcgtcgaaaccactctgggtgaggaaggcctgcgccgcgccgtggtggtggccagcccggccgaccgcccgccgctggcacgcctgcacggcgcctaccgtgccaccgccattgccgaatggttccgcgaccagggactgaatgtgctgctgctgatggactcgctgacccgcttcgcccaggcacagcgcgagatcggcctgtcggtcggcgagccgccgaccacccgcggctacccgccgtcggtgttcgccaagctgccggcgctggtcgaacgcgccggcaacggcgccaaggggcgtggttcgatcacggcgttctacacggtgctgaccgagggcgacgatccgcaggacccgatcgccgatgccgcccgcgcgatcctcgatggtcacatcctgctctcgcggcgcgtggccgacagcggcctgtatccggccatcgacgtcgaatcgtcagtcagccgagtggtcacggaaatcgccgacgagccgtggcgcctgcgcatccgcaagctgaagcggctggtctcggcctactcggccaaccgcgacctgatcgccatcggtgcgtaccagcgcggcaacgacgcggccaccgacgaagccctggaacgctggccggaaatcatggagttcctcggccaggacgttgccaaggccgcagatctcccgcacagccaggcggcactgcagcgcctggtggaacaagagagttaa

SEQ ID NO: 528771 - DNA, 642 bp, Stenotrophomonas maltophilia
gtgagcaacgtcgtgcgctggcttgccccggacctgctggcccagcccgaaccggcgctggcgcaggaagatgtgttcgaactcaccgagccggacccggaacacgaacccgagccaccgctgcagctgccgaccctggaggagatccaggcgatccaggacagcgccgagaaggaaggcttccagcacggccatgccgacggctacagccagggccaggccgaggtgcggcgcctcgccgcgcagatcgaaggcatcctggacaacttcagccggccgctggtgcggctggagaatgaagtggtcggtgcgctcggcgagctggccgtgcgcatcgccggtgccctggtcgggcgtgcctacgaggccgaccctgcgctgttggcgcagctggtcggcgaggccatcgacgcggtcggaggcagcacccgcgaagtcgaggtgcgcctgcaccccgacgacatcgccgccctcgcccccctgctgaacctgtcgccgcagcagcgcctggtgcccgataccagcctgagccgcggcgacctgcgcgtgcatgctgaagcggtgcgcatcgacggcaccctggaagcccgcctgcgtggcgcgctggatgcggtgatccgccagaccggagcaggcgcatga

SEQ ID NO: 528772 - DNA, 1002 bp, Stenotrophomonas maltophilia
atgactgagccgcaattgaccggcgtgcagcgcgcggccgtgctgctgctttcgctgggtgagctggacgcggccgaggtgctgcgccacatggaacccaaggaagtgcagaagatcggcatcgccatggccaccatgaccgacatcacccgcgagcaggtggaacgggtgatggaccagttcggccaggagctgggctcgaagacctcactgggcgtgggttcggatgactacatccgcaacatgctggtgcaggcgctgggcagcgagaaggccggcaacctgatcgaccgcatcctgctcggccgcaacaccaccggcctggacgcgctgaagtggatggacccgcgcgcggtggccgacctggtgcgcaacgagcacccgcagatcatcgccatcgtgatggcgcacctggaaacagaccaggccgccgacgcactgaagctgctgcccgaccgtacccgcgtcgacgtactgctgcgcatcgccaccctcgacggcattccgccgaacgcgctcaatgaactcaacgagatcatggagcgccagttcgccggcaaccagaacctgaagtcgtccaacatcggcggcgtgcagtgcgcggccaacatcctgaacttcatggacagcggccaggaccaagcgatcctgggcgaaatcgcacgcatcgatgcgccactgagcaaccgcatccaggacctgatgttcgtgttcgacgatctggtcgatctggacgatcgcgaaatgcagctggtcctgcgcgaagtgagcggcgagcgcctgggcttggccctgcgcggtgccgacatcaaggtgcgcgacaagatcacccgcaacatgtcgcagcgcgcggccgaaatcctgctggaggacatggaagcccgtggcccggtgcgcctgtccgacgtggaaggcgcgcagcgcgagatcctggccatcgtcaagcgcatggccgatgaaggcaccgtcaccatcggtggcagcgcggaggccatgctgtga

SEQ ID NO: 528773 - DNA, 1647 bp, Stenotrophomonas maltophilia
atggcactgacgctctccaaggacagcctgaacgccgagaaggccgggcaatggttcgaccgcctgcagagtctgcagatcacccgtcggctgggcctgatggcgatgatcgcggtggcggtggcggcaggcctgtccgtgttcttctggtcacagaagccgggcatggtcccgctgtataccggcctggaccagaaggcgaccgctgaagcgaccgacctgctgcgcgccgcgcagattccgttcgcgctcgatcccgccaccggcggcatcaccgtgccggagaagaacctgcacgacgcccgcctgaagctggccggctccggcctgaccgacagcggcaagcttggcttcgagctgatggaacgcgacccgggcttcggcgtcagccagttcgtcgaaagcgcgcgctaccagcacgcgctggaaaccgagctgtcgcgcaccatcaacacgctgcgcccggtgcgtgattcgcgcgtgcacctggccattcccaagcccagcgccttcacccgccagcgcgatgtcgccagcgcttcggtgaccctggaactgcgcggcggccagcagctggaacgcagccaggtggacgccatcgtgcacatggtcgcggccagcatcccggatcttgccccggaacgggtgaccgtggtcgaccagagcgggcgcatgctcagcatcaccgaccccaacagcgaggcggccgtcaacgctgcccagttcgaacaggtgcgccgccaggaaacctcgttcaaccaacgcatccgcgagcttctggaaccgatgaccggcccgggccgcgtcaacccggaagtgagcgtggacatggatttctcggtgaccgaagaagcccgcgagctctataacggcgagccgcagaagctgcgcagcgagcagatgagcgagaacaccaccagcacgccggggccgcagggtgtgccgggggcgaccagcaacagcccgccgggccagcaggccgcgccggccaccgcgcagaccccgaccgaaagcagcaagaacgcgacccgcaactacgagctggaccgcaccctgcagcacacccgccagcccgcgggccgcatcaagcgcgtgtcggtggcagtgctggtggacaacgtgccgcgcgccggcgccaacggcaagatgagcccgcagccgctgtcggccgccgagctgacccgcgtcgaggccttggtgaagcaggcggtcggcttcaacgccgagcgtggcgacaccgtgtcggtgatgaacgccccgttcgtgcgcgagatcacgcccgaggaaggcccggcctggtgggagctgccttgggtgcacgacgccggccgcatgctgctcggcgcggtggtggtgctggcactgctgttcggcgtgctgcgcccggcgctgcgcgcgatcaccggccagaacaagaagaacgacgagcacgcactggaaccgcataccgcggacgtgcagctggttgatgacgatggcaccccgctgccggcgctgggcgccgaccgggccagcctggccgggccagacgcactggccctgccggtggattcatatgaggaacgactgcggatggcgcgtgaagccgtgaagaccgactccaagcgcgtggcccaggtggtcaagggctgggtggccaatgactga

SEQ ID NO: 528774 - DNA, 366 bp, Stenotrophomonas maltophilia
atgtcccactccgtcacttcgatcctttcgcagatccgctcctatcagacccagatgggacagccggcgctcaacccgctgggcgaaaccccgcgcagcaatgccctgccgggcacggtgctggaagcaccgcaggcccagccggccagcttcaccgaaaccctgcgtggtgcgattgccggcgtcaacgacgcgcaacagaagtccggcgccctggccaaggccttcgaaatgggcgaccccagtgccgacctggccaaggtgatggtcgcctcgcagcagtcccagatcgccttccgcgccaccgtggaagtccgcaaccgtctcgtccaggcttaccaggacgtgatgaacatgccgctgtaa

SEQ ID NO: 528775 - DNA, 378 bp, Stenotrophomonas maltophilia; identical to SEQ ID NO: 513476

SEQ ID NO: 528776 - DNA, 1410 bp, Stenotrophomonas maltophilia; identical to SEQ ID NO: 513475

SEQ ID NO: 528777 - DNA, 639 bp, Stenotrophomonas maltophilia
gtgcctgtgcgagttctcatcgtcgacgatcacaccctggtccgcgccggcctggcgcggcttctgcaggggtttgccgacgtgcagctggtggccgaagccagcaacgccgagcaggcgctgcagctggccctgcaccacgcaccggacgtggtgctgatggacctgtcactgccgggccgtacgggcctggaagcgctcagcgatatccggctgcgcgcgcctggtacccgggtcgtgatgatgaccatgcatgacgatgccgcgcacgtgcgcgatgcgcttgaccgcggcgcggtcgggttcgtggtcaaggatgcggcaccgcaggaactggaactggcgcttcgcgcggcgcatgccggccaggtgttcctgagtccgcagatctccgccaagatgctggcaccgatgctcggccgcgagaagcccactggcatcgccgcgctgtcaccacgccagcgcgagatcctgcgccgcatcggcaagggcgaaagcaacaaggaaatcgccgccgacctcggcatcagcgtcaagacggtggaaacccaccgcgcacgcatgatggagtcactgggctgccgtcgcgccaatgatctgctgctgctggccgcgcgccaccagcacgagctggagtga

SEQ ID NO: 528778 - DNA, 579 bp, Stenotrophomonas maltophilia
atgacccaactgccgacaacgtcgctgcaccatcctgccgaaagcgagctgttcgacgaaacgctcagctgcgaactggccctgcccgccgagttccagcccggcagtgccgccggtcgtaccagcagcgccgaaggcctgctgcgcagcctggcgctggtggaagacagccgcgttgacgagcatgacgaccgcaacgaggccagcctgcagcttcagcggctcgaggcgaagctggatctggcgatggtgctgcttggccgcctggtccgccagcagggccaggagctgaccctgcgcccggtgcgctggtcacgtcgcgggatacgcctgcagctgggcccgcgcagtggcgccagttccggccaggcaggcctggtgcgcctgcagcccagcgactggctgcccgaccatatcgacctgccggtggaagtgatcgccgaagcagcggatggcgggggcggccactatctctggctgcgcttccagcgccttggcgatggcctggaaatggccatggagcgccacctgttccgcctgcaccgtcgacaggtggccgaagcacgccgggcgcgctga

SEQ ID NO: 528779 - DNA, 294 bp, Stenotrophomonas maltophilia
atgagcctgcacgaactgcacgcccagctggatgccttcgaaaaggccctgggcgaagatgcgctcgaccaggccgacagcctgctcgacggccacgacagcacgctgcatgccctgctcagccagccgctgaccttggacgaccacgcaccactcagtgcgctgttcgagcgccagcagaacctgctgggcctgctgcgccagcgccgcgatgcggtggctgcactgatgaatgacggccagcgctcccttcgcgcggcgcatgcctacctgcaggcagaatcgctggcatga

SEQ ID NO: 528780 - DNA, 417 bp, Stenotrophomonas maltophilia; identical to SEQ ID NO: 513471

SEQ ID NO: 528781 - DNA, 1419 bp, Stenotrophomonas maltophilia
atggcaagctttggatacggtggcattggctcggggctcaacatctcggacatcgtcaaccagctggtcgcagccgaccgcaagcccgccgacaacgcgctgaacctgcagcagtccaaggccaagatgcagctgtcgtcgatcggcaccgtcacttcggccttcgacaagctgaagaccgcactgaccgcactgaaggccaccaccgcgttcgatacgcgcaccgtgacagccaccggcaaggccggccccaccaatgccgacgacgttctgacagcctcggtggcgctgtacgacctcggcacgaccaaggcagccgcctccaacggcacgcaccaggtggaggtcacctccctggccaccgcgcacaagctgattgccgacacctcattcccgaagaccgacaccttcggtgccggaaccatgacgctgaccgttggcgtcggcgacaaggccaagaccatgaacgtggcggtggaggacggcgatacgctgaccaccatccgcaacaagatcgatgcggccggccgcaaggagggcgtgcaggccacactgatcacctcgggcgacaaccagtatctgtcgatcgcccaggaaaagaccggcgctgccaacgcgatcaagctggagtacggtggcagcgacccgaagctgggcgcactggtcggcagcctgaagcagaacacggccgcagcggacgccgaactgaccatcgatggcgtcaaggtagtcagcgccagcaacacggtggccgatgcggttccgggcctgaccctgaacctcaaggttcccggcaagagcaccgtggtgatcagtaccgacactgccgccgcgaccaaggtgatgcaggagttcgtgaccgcctacaacgcggcgatcgcggcgatcaacaccgaaaccaagtacgacgccaagaccaaggaagcggccacgctgaccggtgacgcgcagatgcgcggtgcctccagccagctgcgctcgatgatgtccggcgtgctgaaggagctttccgctgacgggctggacccgaaggtgcttggcctgcagacgcgcggctatcccaatgccgacggcagcctggtgctggataccaccaagtttgccgctgcactggccagccagccggagaagatccgcgccgccatcaccggcgacaccggcggtgccggcacgctttacaccatggttgacggctacgtcagcaccacggtcggcaaggaaggcgccttcgtcgcccgcaccaagggcctgaacaccacgctggacaacatcgacaagcgccgcaaggacctcgacacacgcatgaagaacgtggaagagcgctacaagaagcagttcatcgcgctggacagcctgatgggcaagctgcagcagagcaatacgtcgctgcagcagcagctggcacagctgaaccgttaa

SEQ ID NO: 528782 - DNA, 1191 bp, Stenotrophomonas maltophilia
atggcacaagtcatcaacaccaatacgatgtcgttgaatgctcagcgtaacctgagcaccagcggcagctcgctggccaccaccatccagcgcctgtcctccggttcgcgcatcaacagcgccaaggacgacgccgccggcctggcgatctccgagcgcttcggcacgcagatccgcggtaccgacgttgccatccgcaacgccaacgacggcatctcgctggcccaggtcgccgaaggttcgctgaccgaaatcggcaacaacctgcagcgcgtccgcgagctgtcggtgcaggcctccaacgccaccaactcggccagcgaccgcaaggccctgcaggccgaagtgacccagctggtctcggaaatcgaccgcgtcgccaagcagtcggacttcaacggcaccaagctgctggacggttcgttctccagccagctgttccaggtcggcgccaacgccggtcaggcgatcgccatcgacaagaccattgatgccaaggccaatgccctgggcggcgccaagttcgacaccaacgcactggccctggccgacccgggcaccaacgctgacttcagcaccagcggcctgtccatcaacggcgtggccatcgccgatgtctcggtcaagcagggcgccgacgccgctgccaccggcaaggcatcgcgtgaagcgctggtgaccgcgatcaacgccaagatcggcgagaccggcgtctacgctgaagtgaacggcaccgctggcgtgaccctgacctcggtcaaggacagcaccaacgccgacggctcgttcaaggccatcaccgccaccccgggcacctggaccggcgccaccgcgccgaccttcaccgccaccaccgctgctgcggccccggctgcgaagtacgccagcaacctggacgtcagcaccgtgaagggcgcccagcaggcaatggaaattgtcgacaaggcgctgggtgcgatcaacagcacccgcgccgaccttggcgccgtgcagaaccgcttcacctcggtcgtggccaacctgcagacctcgtcggaaaacctgtcggcttcgcgtagccgcatcaaggacaccgacttcgccaaggaaaccgcagagctgacccgcacccagatcctgcagcaggccggtacggccatgctggcccaggccaaccaggtgccgcagggcgtgctcagcctgctgcgctga

SEQ ID NO: 528783 - DNA, 792 bp, Stenotrophomonas maltophilia
atgttaatggggttgtatatgaataagtttgttttgcttgctttcggattgtctttagttgtgtcatcggccagtgcttctggcgacggggcattggtcagtaatgatggtgagtcgcttcataaatttgttgagcgggtgtcgttggctgagcggacatcgagctgcggttatatttctaaagcggcaagctcttatcgcattcgattggttgactgtgcactgaaatattctgatgcggaactcgttgtttacacggctgggggctggacgcgcctagtatttgagtcagtgagtgcctcaataaatatcggtggcagtcatcttgagggccgcgttcttggggaattgaccgcaagctctgcaatgtctatggatcagtttgcagcttcgatttccgatccaatttcgcagtacacaaagaacacccagcacgaggtgtgcgctcagatttgcaagtccccacagggggattggggtgcaatcgtcacaacggtcggttcgcacgtgatgtgcccaatcaccagtgtttgccctgatggcatgtccgcgacaggtcaggggatccattcgcaccctacaggctcgacctacaaaatcaatgccgctgataaggctttgcttctatctggtcccttctatcgcttgggcgcgaaagaagcacgcggacatacggatgtcttttccgaagaagacttcaagggaggtccaggttacatggtcaccgacaagggccgcttgatgcaccaagacggccccaaaaatgtgcggactataagcattgataggtaa

SEQ ID NO: 528784 - DNA, 1476 bp, Stenotrophomonas maltophilia
atgcgaacacaaatttcggcacgcgagatggctgaattcatcgaaacggcgacagtcgatgaattggtggagcactttaaacatcataatgttaatgacagggacgctgttgttgcagatgtgggttcagggctaactttcgagggcggcgcgcttcaatacgcgatattctcggataaggttgacagcgccaagcttcaagcaattatcgacagcggggcagagcttgacagctttgagttccaattgttcaaagagttggaagagtatgatgaatatcctgatgcaatcacgttccatgcgtttgaggatgccagcgcagagaagcaagaggtgctgcgcaacgcagtggaagcgcacgcacactggatcaatcgcaaatacagtgatgcagaaatctatgatttgctgacaaccggcaacgtcgagcggtatttttccgaactcaagcacgatcccaacgatgaaatcacctgggaataccctgagaaaaatatacgctacaccggacccatctgtggtttagccgcgtttgaggacaaggtgagcggctggacattcgaaaaattgttgcaggcgggcgcggatcccaatgcgcaatgtcgtgtggaaagccttgatgacacagacaactacgacgaactgtccgtgatcgaattgtgccattcagttgataaaatcaaccgtgcattagacaggggtggaattcccacggaacaccttttgggggacgttctgtatggcatcaaagatgaaggcgtcaaagcgtatcacgtttatttccatagtccaccggagcaacaagaagaagcgtggcagaggcatcacatagcgtccgagaacgtcaaacaacttgcgccgcttgaattgaggctggtcactgagcatcccgacatctttgaagcccgccacatgcatgggatgacaaacccccaggcggtcaccgaaatgcttttgatgggccacgatcccagcgtcgagaatgaagacgggcaaagtctgatgttgggttcgcttttaaacggaaattttgagacgtttgcagttttgcagcggttcggcgttgagcctggacccgaaggtcagcgccccatggatctggtggttaagcactatgaaaaagtgcagaaggaacatgtacctggctcaggggagtttggagagtggagaaaatgcgactatgccatcaagcatctgatagatatctctgatgaccgtacatctgatctggcgtcctatatgaagctaaacagccccgacgctgatgtgatcgttgagatgattgatcgtggcgctgtgatgagtgacgaagcacaacggcagtacatgtcacttggaaaaggttccggtatggaagacgtgtacaagtccagaaaagatgcagtccaagatgccttaaaccgtcaacagcgtgacgtaatcctggcggaagtgggtgaggaagcgcccgtgcaaaaaatgcgacgtaaaatgtaa

SEQ ID NO: 528785 - DNA, 1581 bp, Stenotrophomonas maltophilia
ttgaccgacatacatttgacgcgcgaacagatgttcgccctggctgagcaaatatcgatccgtgcagcggcaggaaagatcacctcccatcgcatggaccaacttggcgcgcttgtcgatgccgcaggtgaaaccaaagaccttgatttgttgttgcgttgtattgaggtcattggcatatgcggagaattggacgacaagcgccacgggtgcatgctgcactactaccacgccaatgctttggagtcgctgtacaaacaacggcatacgaacgagaacgcacactcgtggatccagccggagaacacagggcagatctatcaattgcgctcagccatcgcacatgctggctttcccctgcatcccgctgaattccgcgcacagatccactccaacctgggcaacgcgttcaacaagacggggcgcctacatgatgccttggaacaatggtgcaaagcgttggatttggacccgatgcttgcgatggcccaaggcaacatggcgtgtgcattgttcttctatgccagcaacctgtatgacgtgggtcacagggagtggatcaacattgaaggccgtgcgcaactgcgtgaggcggttgctatcggcgctcacggtgcaacgttcgtagaagctgcagagcgctttcggctgatacttgaaaccgttgaacttggcttggatcagtacggtgttgagagcaatccggacgttgcctggatggacgacttttcactaggacgaagcgctcaggagaagcgttaccggcgctggtgtttggacaaccgattgttcctcaaccccatgaacgatgcgtacaccctgccggtggccgccacagactcgctttcgctaccaacccaccgggccgatggggtggggatctcgtatcttgctgcgttcaaccaactcaaacaggaatacatctatgccagatggtgcttgtttgtcgggctggatgaccagaagacgcatgtggccgaccgtgaggtgttgttgtcatccaacaccgacggtgcgcgctacagcattgccattgagcaggtaaaaaccgcttaccgtgcggcctactcgctgttggataaggttgcgtactttgtgcgcgaccgctgggagattggtgctaagcgaaaatcggctgacttcgcacgactgtggtggacagagcccaaaaagtgcacggagacaaccattcgcccggagtttgaaagcagtcagaatatttggctgcacgctctgtacagcctgtccgaagacatcttcaacgagggcacaaggcaatacgcatcgccggacgctcaagaacttcacgtcgtgcgtaatgctttggagcatcggttcttcaaaattgtttggtccaggtccgagtgcgacgaaacatcgatgcactacgaccgactgtcggaacagatgacatttgacgagttccaaagcaaagccctgcgcgttttgacgatggcacgttctgcaatcatgtacctatgccttgcaatgcatcgagccgaagtgcagcgtgccgaagaagataaagctcagtctatgtcgttcggggtgaaccacattccggaccggcttaaagggtaa

SEQ ID NO: 528786 - DNA, 780 bp, Stenotrophomonas maltophilia
atgccgcattccccggacatggatacccaagttaagttgttcttgttgcggtcgcgcgcgcgaactgccgaaattcaacggcgttccatgatgaaccaaacgctggacattgaagaggagacccgtcatcggatctctgctgaaggttgggagcgatgcctgttgcgcgaagggccgcgacaggcggaagaggtcattcagttgtggtgtgtgttgcgggcaaagaagacggcttatgctgatctttccggcgaccaagagattgtccatcagaaagttcaatccatgcgcacggatgaaaaattgatcgaagatatcgacaagtggattgtcgcttccgcttttcatgacacgcttcgatcaacgcagatcaagaccgccagtggccgctgtccacctttgctgctccaaaagagtccgcagttggagcaaggcacggaacgggttgttgaaatcttgaacaaagagttcaaggcggatggagttgctgattttgactacatggatcgcaactacgaactggaagcccaagctaaacgtaaccgtgaaatgctgttggtctacgccaaagcgctgtggttcgatcacacggtttattcgcgcgccatcaaggccgtggccgatggggatacggatctgctgttgaggtacgaccaagctgtctacgccgcgtacgagcaggcggtatcccagccctcgctgagcgacatcatggtcaaagtgtttgccgcactgtgtgcgcaaactccctacagtgcgcatctgtttgacacagagtga

SEQ ID NO: 528787 - DNA, 492 bp, Stenotrophomonas maltophilia
atgaaaattgcaattctaaccgcagcaacagtcgccgccttgctggcctcgggatccacgttcgccgcatctaaatccacaaccatgaatttctcgttctctgtagcggcaacatgcgaaatctcacttgagcaagacaccttggaaacagctgccgtaggcggctactacacaggtggacgctttgaagacaatcttggcgtgttgtgcagcgaagatcttccgtacatcgtggaagcatctaccgacgccaatggacaggtcattgcaacatcggccacctccgcacgccaatacccagtgacgttcacacgtggaaccgatccatcgagcagcaactattttggtacggacgccaatggactggcgcatgccgccgtgggtacaggggcgtatcagacagttccatttggttggtcttttgggtacatcgataaagtactggcacctggcacttacacaggcagtgtgacttttacggtggtgtactaa

SEQ ID NO: 528788 - DNA, 678 bp, Stenotrophomonas maltophilia
gtggcggactggacgatcttctactgggcctggtggatctcgtgggcaccgttcgtgggatcgttcatcgcgcgcatctcgcgcggccgcagcgtgcgcgagttcgtgatcggcgtagtgctcgcgccgacgctgctgggcttcttctggttcgcggtgttcggcggcaccgcgctgtgggcacagatcttcggccacgccgatctggtgcaggcgctgggcaatggctacgaaacggtgctgttcacgctgttcgacagcatgccgctaccgctgttgctgtcgtgcatcgcgctggtgctgctgatgatcttcttcgtgacttcggccgattcggcggtactggtgctggccagcatgtccaccgacgaggctggcgacccaccgttgaagcgcaagctggcctggggcattgcggtggcattgatcgcagcggcgttgctgctggccggtggactggacgcgctgcagggcatgatcacgattgccgcgctaccgtttgccttgctgatggtgctggtgatggtgtcgctgtaccgggtgctggaccaggagtacacgcgcgagcggcggcaggcgcagcgccagcggcacatgattgacgcgtggatcgcacgcgagatggcggcgcaggaggagacccaggcggaggcggcgcgcgcgcaggatcgggattga

SEQ ID NO: 528789 - DNA, 510 bp, Stenotrophomonas maltophilia
gtgttctacgtggcaacgctgtcgaaggtgatcagccccggcctgcgcaccgcgttcgtgcactgccccagtgccgcacacgccgaagcgatgacagccgcgctgcgggcaacacggttgatgggccatccgctggtgtcggcgctggccagccagctgctgctggatggctcggcgcaatcgttgcttgcgcaggtgcgcagcgaagcacgcgagcgcgtgcgcatggtgcgctatctgctggcaccgtcgctgctgcagcgtgccgagggcctgcatgcctggtgccggataccggcgccgtggaccgatgccaccctggtgcgtaccgcgcagctgcaggggctggcgatcgcaccgtcatcggcgttctgcccgcccggggtacagcatcagaacggcgtgcggctgtcgctggggctggcagcggaccgccggcagctggaaggcgcgttgcggcggattgaccggctgctgttgtcggatgcgttgccggcgattgatcgatag

SEQ ID NO: 528790 - DNA, 306 bp, Stenotrophomonas maltophilia
atgctgccgatcgaaacgatcgctgcacggacattgtgggtgggaggcggcgatgaccgcctgggcgactccggcgtgatgatggccgttgcccagcgtcggttggccgaagcagggcgaggtgatcgcgaccggttcctctactaccccgatgcggggcatctgatcacgccgattcttcagccgagctcccatcgccatgacgtgggtccgttccttgaagtcgggggcaccgccgaaggccatgcgcgcgccgaccgtgaagtgggcccggccgtgctggcgttcctggccgaggcgttgtga

SEQ ID NO: 528791 - DNA, 138 bp, Stenotrophomonas maltophilia
atgcagacgcagcccgatgacgtcaacaccgacgaatatcaggacgactggtgtcccgagtgcggcggcgatgacgtgatcgtgttggacgacggcaatctgtggtgcacggagtgccgcgccgtcattgactactaa

SEQ ID NO: 528792 - DNA, 186 bp, Stenotrophomonas maltophilia; identical to SEQ ID NO: 516605

SEQ ID NO: 528793 - DNA, 186 bp, Stenotrophomonas maltophilia; identical to SEQ ID NO: 516605

SEQ ID NO: 528794 - DNA, 651 bp, Stenotrophomonas maltophilia
atggaaatcgtcgctttcgaagttagtcgctatcgcagcatcaagaaaacggaaaggctttcactagggaacccaaccgttattgtcggcccgaacaacgagggcaaaagcaatatcattcgcgcgctcacgctctgcgttcaatttatctgcgcgccacgcgacagcatcctgactagaacctggtcttacgaatggtctcgggattttccgattgaacttcaaaatagaaaaaagaatttagactctgtatttctgattgaactaaagctcagcacagaggagcgcgatctattttacaaaagggtaggcagcaaaaacaacggcacccttaaaatcgttgtgagcatgggtgcgacgggagcccaattcgacgttctgaaacagggaagtggaaaggaggcgatgcgtactggagcaagcaagatccggcaatttgtgcaagatcaccttcgcatccagtacattcctgcggtccgaacggcgggcgcagcaagggatgttatccatcaactgattgaagacgacctggcgcaggttgaaagcagtaaagaataccagaaggcattgcaggcgattagcgacttgcaaaagccgatcatggatagtttgagcaataagctctctggcaccttaaaggacttcctctga

SEQ ID NO: 528795 - DNA, 210 bp, Stenotrophomonas maltophilia
atgagggcctcggcagatatgagcccggtctacgggggcaaacagcaccgcgaccactccgccgacgcctccctcggcgtcgtaggtacggacggcggtgaagtgcattcgctgcgggaatctgatgatctctgccatgggatcaatgttgcgcccgccgccacctgctttcccacgatgatcgattgcgcatttcagggtggctcatga

SEQ ID NO: 528796 - DNA, 1983 bp, Stenotrophomonas maltophilia
atgaccgaccgccgcgacgacgatttccgcgtgcgccccagcgccccgaagaaccggggtaagggccaggggcagagcttcgtttccaaggtgctcaagcaggccggaaaagccagcagcggcaagtcggcggtgcgccgtcctggggcggctgccaccggccagcgtcccggctcacgcctggggcgcggccatacggcggcgcgcttcgccggcgcgaagctgacgcccatgtcgcggcgcgtgaccatcaaaaccttgctggtcaatcaccaacgggccagcccacagtcgctcgccaagcacctgcgctacatcgagcgcgacggcgcgggtcgcgatggcgaaccgggccgggcctacgggccacaggccgacgaagctgacctcgatgccttcaaggaacgctgcgccgatgaccgccaccatttccgcttcatcgtctcgccggaggacggggccgaactggacgacctgcgcacctacacccggcatctggtggatcgcatggaagccgacctgggcacgcggctggattgggtggcggtcgatcactggaacaccgacaacccgcacacccacctgatcgtgcgcgggcgcgacgacaccggcaaagacctcatcatcgcgggcgactacatcgccgatggcttccgccaccgcgccgccgagctggcgaccgaatggctggggccgcgcaccgagctggagatccagcagaccttggggcgcgaggtggaacaggagcggtggacgagcctggatcgcaccttgaagcgcgaggccagcgacgatggcctggtgcatgtcgaacggctcaacgaaccccgcttgcagcgccagcgcctgctgctgatcggccgcctgcagcgcttgcagcgcctgggcttggccgacgaggcgcagccgggctcctgggccatccataccgatgccgagaagaccttgcgcgccctgggcgagcgtggcgacatcatccgcacgatgcagcgcgccatgagcggacagccgcgcgagctggcggtgttcgagccgggcgatgacggccgcaccatcttcggccgcgtagcagccaaggggctggccgacgaactgcacgaccgcggctatctggtcatcgacggcgtggacggcaaggcccactacgtcgcgctgaacgcccgcgacgagctggcgaactatccgaccggcgccgtggtggaggtgaagggatcggccgacgtgcgcgccgccgacaggaacatcgccgcgctggcgagcgatgggctgtatcgcaccgatcatcacctggcgattgagcaaggccgagccaagcccggtcgtgacccgcaggaagtcgttgcggcccatgtccgccgactggaagccctgcgccgggccggcatcgtggagcgcgtggccgacgggctatggaaggtgccggacgacctggccgagcgtggccgccgctacgacgcgcagcgcctgggcggtgtggcggtggagctgaaatcgcacctacccatcgagcggcaggcccgcgtcatcggcgccacttggctggatcagcagttgattaacggcggccgaggcttgggcgacctgggctttggtggcgaggccaagcaggcgatgcagcagcgtgccgacttcctggccgaacgggggctggccgagaagcgcggccagcgcgtgatcctcacccggaatctgttggctacgctgcgcaatcgggaattggcgcaagccacgaaagacattgccgccgacaccggactggagcataggcccatcgccgacggtcagcgcgtggccggcatctaccgtcgctcggtcatgctcgccagcggtcgctacgcgatgctcgatgatggcatggggttcagcctggtaccgtggcggccggtgatcgaacagcggctggggcagcaactcgccgcgacggtgcgcggtggcggggtgtcctgggagtttgggcctcagcgctggcctggcatcggatag

SEQ ID NO: 528797 - DNA, 888 bp, Stenotrophomonas maltophilia; identical to SEQ ID NO: 496649

SEQ ID NO: 528798 - DNA, 681 bp, Stenotrophomonas maltophilia; identical to SEQ ID NO: 509061

SEQ ID NO: 528799 - DNA, 294 bp, Stenotrophomonas maltophilia; identical to SEQ ID NO: 498348

SEQ ID NO: 528800 - DNA, 2307 bp, Stenotrophomonas maltophilia
gtgatcggacgggccctggccgcagatgccgacgtacttgcccttggcgcgtgcggccttgatcgccatcgacagcagcttcttcactgccgggttccgttcgtcgaacaggtgcgcgacgatcgacgagtcgcggtccaggcccaggctgagctgggtcaggtcgttggagccgatcgagaagccgtcgaagatctccaggaactcatcggcgagcagtgcgttggacggtacttcgcacatcatgatgatcttcaggccgttctcgccctgcttcaggccgttctgttccagcacctcgacgaccttgcggccttcctccagggtgcgcacgaacggaatcatgacccacaggttgtccaggcccatttcgttgcgcacgcgcagcacggccttgcactccagcgcgaaggcggccgagaagctcgggtcgacgtaacggctggcgccgcggaagccgatcatcgggttttcttcgtgcggctcgtagttgctgccgccgatcaggttggcgtactcgttggacttgaagtccgacaggcgcacgatcaccgggttcggtgcaaccgaggcggtgagcgtggcgatgccttcggccaggcggtccacgtagaagctgacaggatcaccgtagccggcgatcttctcgtcgatcttcttcttggtcgccgcatcctggcggtcgtattccagcagcgcgttcgggtggatgccgatgtggctggcgatgatcatttccaggcgggccaggccgatgccggcgttcggcagctggccgaagtcgaaggcacgttccgggttggccacgttcatcatgatcttcagcggtgccggcggcatgttgcccagatcggtggtggtgcgctcgaagccgagctttccttcgtagatgaagccggtatcgccttcagcgcagctgacggtgaccagctggccatcttcgatcaccttggtggcgttgcccgaaccgaccacggccggcacgcccagctcgcgcgcgatgatcgcggcgtggcaggtacggccgccacggttggtgacgatggccgaagcgcgcttcatcaccggttcccaatcgggatcggtcatgtcggcgatcagtacgtcgcccggctgcacgcggttcatgtcgtccagcgtcttcaccacgcgggccacgcccgagccgatcttggcgccgacggcgcggccttcggccagcacgttgccgcccttctcggtcagcgcgaagcgctcgatctgggtggcgtggctgcgcgacttcaccgtttccgggcgcgcctgcacgatgaacagcttgccgctgacaccgtccttggcccactcgatgtccatcgggcggccgtagtgcttttcgatgaccagcgcctgcttggacagttcctgcacgtcctcgtcgctgatcgagaaggtgttgcgcagctcggccggggtgtcctcgatcctgacgcgctcacccgggacatccgagtacaccatgcggatcgccttgctgccgagcgagcggcgcaggatcgccggcttgccggcctgcagggtgggcttgtagacgtagtactcgtcgggattgaccgcgccctgcacgaccatttcgcccaggccgaacgaagaggtgacgaacaccacgtcgcggaagccggactcggtgtccagggtgaacagcacgccggacgaaccgacgcccgaacgcaccatcagctgcacgccggcggacaggaacacgtcctcatgcttgaagccgtggtgcacgcggtaggcgatggcgcggtcgttgtacagcgaggcgaacacttccttgaccttgtgcacgacgtcgtcggcaccggtgacgttgaggaaggtttcctgctggccggcgaaggaggcatccggcagatcctcggcggtggccgaggaacgcacggccacggccacgtcgccgccgccgttgtcggcgctcagcttggcgtaagcggtgcggatgtcctggtccagctgcggctgcagcggcgcatcgatcacccagctgcggatttccttgccggcggcggtcagcgcgttgacgtcctcgacgtccagcgtggccagcctgtcgaagatgcgcttggacagatcgttgtgcgcaatgaagtccttgaaggcttcagcggtggtggcataaccgcccggcaccgaaacgcccagaccggccaggttgccgatcatctcgcccagcgacgaattcttgccgcctacgcgggccagatcggccagacgcagttcgtgcaaccacaggatgttctcgttcaagcgcgatgctccgtttggccatcgcccgaggcgggctga

SEQ ID NO: 528801 - DNA, 963 bp, Stenotrophomonas maltophilia
atgaacctacgtgatctgaagtacctggtagccctggccgaccacaagcatttcggccgggctgccgcctcctgcttcgtcagccagcccacgctgtcgacgcagatccgcaagctggaagaagagctgggcctgccgctggtggaacgcgcaccgcgcaaggtgatgctgaccccggccggccaggaagcggcggcacgggcgcgggtgatcgtgtccgaagtggaacagctgaaggaggcggcgcgacgcagccgcgatccggaagccggcacggtgcgcctgggcatcttcccgaccctcggcccgtacctgctgccgcatgtgatcccgcgcatccgcgagcgcttcccggagctggaactgctgctggtcgaggaaaagagcgacgtgctgctggaccgcctgcgcgaaggcaagctcgacgccgcactgctggccctgccggtgatcgacgaccagctgcatgccgaattcctgttcgaggaaccgttcctgctggccgtgtccgggcgccacccgctggcccgtcgcgaacacctggacgtgcaggaactggccacgcagaagctgctgctgctggaagacgggcattgcctgcgcgaccaggcgctggaagtctgccgactgttcggcgccaacgagaagtccgaattccgcgccaccagcctggaaaccctgcggcagatggtcgccgccgacgtcggcatcaccctgctgccgagcctgtcggtgcagccgccggtgccgcgctcgaacaacatccgcctgctcgatttcaccggcgaaggccgtcccagccgccgcatcgccatgatctggcgccgcagctcggccatgaacgacttcctgatggagctggccgaccagttcaagcgcctgccgcaggcactgttcacgctggaggcgctcgatgccggcagcgatgcaccggccctgcccggccccgcgctgaacggctga

SEQ ID NO: 528802 - DNA, 1989 bp, Stenotrophomonas maltophilia
atgaccgaccgccgcgacgacgatttccgcgtgcatcccagcgccccgaagaaccggggcaagggccagggacagagcttcgtttccaaggtgctcaagcaggctggcaaggccagcggcggcaagtcctcgatgcgccattccgcagccggcggcgcacgcgtcggccagcggcccggctcgcgcctggggcgcggccacacggcggcgcgtttcgccggggcgaagctgacgcccatgtctcggcgcgtgaccatcaagaccctgctggtcaatcaacgcaatgccagcccgcaatcgctcgccaagcatctgcgctacatcgagcgcgacggcgccggccgcgatggcgaacctgggcgggcctacgggccgcagaccgacgaagccgacctcgatgccttcaaggagcgggccgccgacgaccggcatcatttccgctttatcgtctcaccggaggacggcgctgagctggacgacctgcgcacctatacccggcatctgttgaaccggatggaagccgacctggggacgcggctggattgggtggcggtcgatcactggaacaccgacaacccgcacacccacctgatcgtgcgcggacgcgacgacaccggcaaggacctcatcatcgcgggcgactacatcgcccacggtttccgccatcgcgccgccgagctggcgacggaatggctggggccgcgcaccgaactggagatccagcagatcttgcaacgtgaggtggaacaggagcggtggacgagcctcgaccgtaccctgcaacgcgaggtcgacgaggatggcctggtgcagatcgaacgctttaaccaaccccggctgcaacgccagcgcctgctgctgatcggccgcctgcaacgcttgcagcgcctgggcctggccgacgagacgcagcccggcacctgggccgtccatgcggacgcggagaagaccttgcgcgccctgggcgagcgtggcgacattatccgaacgatgcagcgtgccatgagcggccagccgcgcgagctggcggtgttcgagccgggcgacgacggccgcaccatcgtcggccgcgtgtctgccaaggggctggccgacgaactgcatgaccgcggctatctggtcatcgacggcgtggacggcaaggcccactacgtcgcgttgaacgcccgcgacgagctggcgaactatcccaccggagccgtggtggaggtacgcggttccgccgaggtgcgggcggccgacaagaacatcgccgcgctggcgagcgatggcctgtaccgcaccgatcaccacttggcgatcgagcaaggccgggccaagctcggccgcgacccgcaggaagtcgtcgcgacccacgtccgccggctggaagccctgcgccgggccggcattgtggaacgtgtggcggacggactatggaaggtgccggacgatctggcggagcgtggccgccagtacgacgcccagcgcctgggcggcgtggcggtggagctaaaatcgcacctgtccatcgagcggcaggcccgcgtgatcggcgcgacctggctggatcagcagttgatcgggggcggcaaggggctgggcgacttgggcttcggtggcgacaccaagcaagccttgcagcagcgtgccgatttcctcgaagaacaggggctggcccagcggcgcgggcagcgcgtgatcctggcgcgcaacctgctaggcacgctgcgcaaccgggagctggcgcaggtcgccaaggacattgccgccgaaactggcctggagcatcgcctggcggcggacgggcagcgggtcaccggtatctaccggcgctcggtcatgctggcgagcgggcgctacgccatgcttgatgacggcatgggattcagcttggtgccgtggcggccggtgatcgagcagcggctgggacagcagcttatcgcgacagtgcgcggcagtggcgtgtcgtgggaaataggtcggcaacggggcccgtcgccgggttga

SEQ ID NO: 528803 - DNA, 921 bp, Stenotrophomonas maltophilia
atgctcaagctcagcctcgatgccctgcagatcctggatgccatcgaccgccgcggctcttttgccggcgccggcaaggcgctgcacaaggtgccctcgaccatttcctacactgtggccaagctggaggaggacctgggcgtgcagctgttcgaccgggtcggcccgcgtgccgaaccgaccgaggccggacgcgccctgctggacgaggggcgccatctcctgcgtgcggcccgcgagctggagctgcgggtgcgccgggtggcgtcgggctgggagaccgaactgaccctggcggtggactcggtgttcccgacctggctgctgggcccggacatcgccgcgtttcgtgaggcggaggcgccgacccggctgcggctgatcggcgaggccttgtccggcacctgggaggccctgctggaccgccgcgccgacctgctggtcggggcgccgggcgaggggcccagtggcggtggttacgtggtcgagccgctgggcacggtggagttcgtgttcgcggtcgcaccggatcatccgttggccaaggtgccgggcgtgctcggtcgcgagcagctggtcgagcactgcgcgatcgccgtttctgattcggcgcggcggttgctgccgcgcacggtgggcctgttgatggggcaggagatgctgaccgtgcctgacatggccagcaaactgaagctgcaatgcgaaggtgtgggcttcggcttcctgcccgagccgtgcgcgcgcgctgcagtggcgcgtggccagctggtgatccgcgaggtggaggaacacaagccggaggaaacgttctggctggcctggcgcaccggcgaggacggcgcggcactgcggtggtggcgcgagcgcctgcgcaggccggagctgctgtcgcagtggtggcaggcaatggccaaggggtag

SEQ ID NO: 528804 - DNA, 858 bp, Stenotrophomonas maltophilia
atgtccagcccatcgctgccaccggggcagcgatcgcagcagcgggaacagctcgacctgttccgtgcgctaccgggcgacggcatggcgccgcgcgacagtcaggacttgatggcctttccgttcttctcgttggcgaagtcgcggcgcaccgcgccgatcgacttccgcagcgggaacatcaccatccgcgtggaaggcacggccgagcatggcatcgccacgatatgggatgccgacgttctgatttgggcggcctcgcagatcgtggaggcgcgcgacgcgggcattcgcccgtcgcgcttgatacacgccacgccctacgagatcctgcgcttcatcgggcgcggcacgtccctcaacgactatcagcgcttgaaagctgcactcgaccggctgcaatcgaccagcgtggcgacttccatccgcgaaaccaccggccggcgcttgcaccgcttttcgtgggtgaacgaatggcgcgagctggccgacgccagcggcacgccgctgggcatcgagctgatcctgccggactggttctatgccggcgtgctcgacgccgccctggtgctgaccatcgacccggcctatttccgcttgaaaggcggcatcgaacgctggctgtaccgcctcgtgcgcaagcacggcgggcggcaggaacacggctggcaattcgacttccggcacctgcaccgcaagtccggcagcgcggcgcgcttctcggacttcgcctacgacctgcgcgtgctggttgcgcggcagtcgttgcccggctacgtcctgggcatcgagtcgatgccggacgaaaagctggaactgctgacattccggcccgtgccttcaacggcacggggataa

SEQ ID NO: 528805 - DNA, 639 bp, Stenotrophomonas maltophilia; identical to SEQ ID NO: 356367

SEQ ID NO: 528806 - DNA, 264 bp, Stenotrophomonas maltophilia
atgagcggcccgcgcagcaagcgcgtcggcatcggctcacgtccgcccgcgaatccgcacgccgaggcgtggattcgccagggcgatgccgatgcgctcaacaaaggcgacctctacaccgcacgcctgacgctcgacgtgacgcctgcgctgcgcgcgcgcatcaagatcgccgccttcggccagggcgtgaccgtggccgaactgctgcgcggcctgctggagcgggagtttcccgagaaccgcatggagagcacgccatga

SEQ ID NO: 528807 - DNA, 1539 bp, Stenotrophomonas maltophilia
atgtgcatcggggtcggagctgcgccacggcccctgcacattgcggccctggtagccgctggcgtcctgctcgtcggcgttgctgtgccattcggcggcgccgcgcaggcgcttggccatgcccgggctcagcagtgcatggtcgaggcggccggtgtagccgttgtagacgtagctgtagggatgctcgaccttggccaccttgaacgcgtcctgccagcccaggtcatgcagggtgcggatcgggtcttccatcgcataggcgttgaaatcacccagcagcacggcgtccttggcgccggtgccggttggatccgtctgcagccaggcgtgcagctgctgcgcggaggtcacgcgggtcgcattccagcagccctggttgtcattgtggtcggcgtctgcaccggcggcctcgcgacagcccttcgacttgaagtggttggccaccaccacgaacggcgcgccctgcttgccctggaaggcctgcgccagcggcacgcggctgtgctcgacgaacgggccaccggtcagcgtggccggctttccctgcggctgcaggcggttgctgcggtagatgatgccgacccggatcggattgtcgccggggccgttgccggcatcgacgaagcgccagtcaccctgcgcgccgcggtcccggttgagcgcatcgaccagttcggcgatggccgactgcgggccgtagccatcgttttccagttccatcagcgcggcgacgtcggcacccagcgcgttgaccgtggtgaccagcttggccacctgcgccttgtgttcatccagtgtgcgcgcaccgcgcagggtcgggaagccaccgccctggccgtcgccgttgaagaagttctccaggttgaaggccgccacgtgcaggctgcccggcaccgtcggcaccgccgggcgcttcagctccggcagcttcagcacaccttcgacctgcaagcgcgggtgcccctgcgcgtccacgtgcacgacaccttccacgttgcgcagctgcatgccggcgcgcagcaccgggttgcccggcaggtacggcacgctggccgggtcgcgggcatcactgccatcgtccagcaccaggcggcggcgcaggttgtcggccatcacctgctcgtagccggcagtacccggcgcggccacttcggtgggctgccagaggcggccatcgaaggcgacagtgagctggccgaagcgctccaggccatcggtgccggccagggtgagcggcgcggcgatgcgcacacgctggccgtccagcgcgcgccagtcagccggcgcggcggtcagcaccacggtcgcgctgctgcgcgcggcagcgggcgtcgtaaccggtgcggcctgcggctgggcctgggcgaaggcgctggccggcagcagcagggacagggcaagggcgagggaacggcggcgcatcgacgggcgattccagggaagagggcgcacagactaaccctgaaatgcgaaaccccgcttgcgggcgggggaatatgggcgatcaggcctcggtgggcaaagccggtgcggtga

SEQ ID NO: 528808 - DNA, 1374 bp, Stenotrophomonas maltophilia
atgaacgacgtgacgatcatcgaccgctttctggatacgttctcgcgctacatcgactccgggttcgggctgttgcagggcgaggtggcgttcctgacggccacgctgatcgtcatcgacatgaccatcgccggcctctactgggccatgagccacgccaccggccaaggcgaggacgtgatcgccaagctgctgcgcaaggtgctctacgtcggtgccttcgcctacatcatcggcaacttcaactggctggcaggcatcgtcttccggtccttcgccggcctgggcctgacggccaccggctcgaccttgagcatggagaacttcctgcaaccgggccggctggcgaagaccggcatcgacgcaggcacgccgatcctggagcaggtcggcgagatggctggtttccccgaggtgttcgtgaaccttgacgccatcacggtgatgttcctggcctggctggtggtggtcctgtgcttcttcgtgctggcgatccagcttttcatcacgctgatcgagttcaagctgaccacgctcgccggcttcgtgctggtgccgttcgccttgtggaacaagaccagctttctcgccgagaaggtgctgggcaacgtggtgtcggccggcatcaaggtgctggtgctagccgtgatcgtcggcatcggctcgggcctgttcgccgagttccaggtgcatcccgacgagccatccatcgaccacgcgctggtcatcatgctggcctcgctgacgctgctggcgctgggcatcttcggccccggcatcgccaccggcctggtgtccggtgcaccgcagctcggtgcgggggcgatggccggtgccgctgtcggcgctgccggcacggccgtcgccatcggtgctgccgcaaccggcgtgggcggggcggttgccgccggggcgcgcatggcgcctgctgccgccaagctggccggcagcggtgcgcgcgccgcgacatcaacggccggtggtgcccggtcagcgttccgggccgggtccgccgctgccggcggcggggccaagggcgctgcggccggcctgggcaacgtcgccaagacgggcgcgcaggcggccgggcgcggtgccgcatcccgcgcttccgccatcgggcaacgcatggctgcgcctttccgcgccggctggaacgggccgccggccgatgaaggcgcaggcgccgcgtccggcggcggccagtccggcggcgaagccacgtccaacaccgggcagcaaccggcctgggccaagcggctgcaccgccgccagcagctcacccacgccgcgaccaccgccgcccatgcgctgcgcggcggcgacggcggcggctccgggcaaggcccgagcctgcgcgattccgattcctga

SEQ ID NO: 528809 - DNA, 162 bp, Stenotrophomonas maltophilia
atgatcccggccccgcctaccttcatcgcagccccggtgatccagatggcaggcgatccgttcgacctgttcctgcgcatcaacgtgatcgctttcggcgtgtttgttgtctgcgtctgcctcgtcatctggatcgccgatgatcgcgagggcgggcgatga

SEQ ID NO: 528810 - DNA, 702 bp, Stenotrophomonas maltophilia
gtgccagagcgcagtgcggtctgcgcgcgcaatccgcgtgctaccaccgattccgtcgcgaactatctgcgattctccattggctatcaccttgaaacccctaatccgttgcgggcgcaggatggacagtacagcggcagcgtgacgtacacggttggcaacgggcagcagatcgacctggggcagggtgactattccgactcggagctgacactgcagctgttgctggacgtggtccacgacttcaaggtgcgttttgcaagcgagcgtccaaccgtcaagcttgccccggaaggaggctgggcacagtggaacgatcatggcctaaccccggcacgcctctatcaggagctccctttctacctgactacgtcgatggacttcagcatgaagctgcggtgtgagcacgacgcgggcaatcgctgcggcattcgcaatcagacgcttggggaggttgtaccggtggatgtggacgtcaccctgcccggcatgcgcaatctgcgcgatgggcgcccggcgcaggacacaccgctgtcgcccgacgacgcacaggcgccgcgcttcacaccggatggctatctgatgcagcggcggtcgaccttgcggttcaccgcaggacgggacgccgtaacagagatgctgaaggcgccaggctcgcattgggagggcaacatgaccgtggtgtttgacgccaacccgtag

SEQ ID NO: 528811 - DNA, 2286 bp, Stenotrophomonas maltophilia
atgtgtataagagacaggggcgagggtggtcagaagggcgcgggccgcgttgaagcggtcttccggcaacggcagcgggtgcttgatgcgcagcttgtcgggcccttccatggcgtacaggttcggttgcttctggatcagctggatcaccgccatcgggtcgatgttcggcttggattcgaacacgatgcggccaccattttcgcccaggtccagcttgcggatgcccagcgtgttggccttcagcttcagctcggcgatggcgaacaggtgcttggccgcatccggcagcaggccgaagcgatcgatcatctccacctgcagttcgcgcagcgcatcgctgtcgcgcgcgctggaaatacgcttgtacagggtcaggcgggtatgcacgtccggcaggtagtcttccgggatcagtgccggcacatgcagttcgacctcggcaccacgcacttcctcgccggcatcaaggtcgggcagcttgccctgcctgatgctgcgcaccgcgcgctccagcagctcggtgtacaggctgaagccgacctcggccatctgcccgctctggtcctcgccgagcagttcgccggcaccgcggatttccagatcgtgcgtggccagggtgaagccggcgcccagctcgtccatcgaggcgatcgcttccaggcgcttctcagcgtcgggggtgatcgcgcggcggtcgggcgtgatcaggtacgcgtaggcgcggtggtgcgaacgtccgacgcggccacgcagctggtgcagctgggccaggccgaaacggtcggcacggttgatgatgatggtattggcgttggggatgtcgatgcccgactcgatgatcgtggtcgacagcagcacgttgaagcgctgcttctggaaatccagcatcaccttttccagctcgcgctcgggcatctgcccatgggcgatgccgatgcgcgcctccggcaccagctcggacagctcgcgctgcatgcggccgatgctttccacgtcgttgtgcaggaaatacagctggccaccacgcgccagctcgcgctggaaggcttcgcgcagcagcgcgttgtcccactgggtgatgaaggtctgcaccgccagccggttcggcggcggcgtggcgatgatcgacaggtcgcgcaggccggccatggccatgttgagcgtgcgcggaatcggtgtggcggtcagggtcagcaggtgcacgttggcgcgcagcgccttcagcgcttccttctggcgtacgccgaaacgctgctcctcgtcgacgatgaccatgcccaggtccttgaacttcacgtccggctgcagcaggcgatgggtaccgacgatcacgtcgatggtgccggcggcgaccttttccagctcggccttgatttccttggtggtcttgaagcgcgacagcacctcgaccttcagcgggtaatcggcgaagcggtcgcggaagttgcggtaatgctgttcggccagcagcgtggtcggcaccagcacagccacctgcttgccggcactggcggccgcaaaggccgcacgcaccgccacctcggtcttgccgaagccgacgtcgccgcagaccacgcggtccatcggctggctgctggccaggtcgcgcagggtggcgtcgatcgcggccagctggtccggggtctcctcgaacgggaaaccggccgcgaacggctcgtacatcgcgcggtcgacctgcagtgccaggccggcacgcgcctggcggcgggcctggatctccagcagttcggcggcgacgtcgcgtactttctcggcggccttgcgcttggccttgctccactgctcgccaccgagcgaatgcagcggcgcggtttccgccgacgcaccggaatagcggctgatcaggtgcagctgggcgaccggcacatacaggcggtcgcccttggcatattcgatttcgaggaactcgccgggcatgccgccgacgtccatcgcgatcaggccacgatagcggccgacgccatgatcctcgtgcacgatcggcgcgccctcggtcagttcaccgaggtcgcggatgatcgcttccggctcgcggccggcacggcgcgtgcgccgggtgctgccggcgcgctcggggaacagctggcgctcggtcagcaccgcgatgcgcggatcgtccagcgcgaagccatcctccagcggtgccaccgcgatcgcgaagcgcgcgtcgtcggcgaggaagctgggcaggtcggccaccaccggcggcttcagctcggcggcctgcagcacttccagcagcgcctcgcggcggccgggtga

SEQ ID NO: 528812 - DNA, 1146 bp, Stenotrophomonas maltophilia
atggccgaggaaggatttcagcgcatcgccagcgggggcttcgcgcgcggccaccggcagcggtggcagcggctggtcgcccagcgcgtgcgcgtcggcgatgcgcgcatggtcagccgcccacacctcgatgcgcggggcttcgttcaggcgctcgcgcagcagctccggcgacaggtacaacgccgacggcggcagcagcgggcgctccacatcatggcggcgctgctcatagcggtccgcagtctgcgcccagaacgcgacggacgcttcatacgcaccggcacagaccaccggcaggctgccgctgggcaggtagtcgaacagggttgcggtgcgttcgaagaacagcggcaggtagtactcgacgccggccggcgccagtccggacttcaggtcctggtacagcgaactgcgccgggtatcgacatcgaaccgctcgcgcagcgtggccagcacgcgggcgatgctggcttcatccatcggcacttcgcggccgggcagcatgtgcaccgcctcgaccttgtccagcgaacgctggctttccgggtcaaaggcacggatcgagtcgatgtcctcgtccagcagttccacccgcagcggctcgtcggcacccatcgggtacacgtcgagcaggccgccgcgcacagcgaagtcgcccggatccatcacctgcggcacgttgcggtagccggcgctttccaggcggcgcttctcggcttccaggtccaggcgctggccgaccttcaggtcgaagctgccaccgatcacgtagctgcgcggggccagctgctgcagcagggtctgcaccggcacgatcaccaggccacgcttcagcgcgggcaggcggtgcagggcggccaggcgctgcgaaatgatgtccggatgcggactgaagcggtcgtagggcagggtttcccagtccgggaaggcgaccaccggcagggccggatcgccgccgagcagggtgtgcaggtcggcttcgagctggttggcaccgtggttgtcacgggcgatcaccagcagcggggcgtcgtgcgcacgcgcggcctgggcaaggtaccaggccagggcggtcggcgaggcgggggcgcgccaccaggcgcggagctggccggcgcgcggcagcggcggggcggggtatga

SEQ ID NO: 528813 - DNA, 699 bp, Stenotrophomonas maltophilia
atgatggctcggtacttggaacgtttcactctggctcgcgcgaaaaagccgtttcttcagccctatctcgtgaccctcactgttcgcaatggtgatgacctgcgcgaacgcctcgatcacctggacaagtcgctcacgcgactccataagcgtcgtcacggaaagcggtcgaaaagtctgctgaccgccgtgcaaggtgccgtctggagttacgaagtcacctacaccgagggcaagggatggcatccccacgtccatgcggtgtggctcgccacagatctacccgatcagtacgcgctgcgtgccgagtgggaggaaatcaccggcgatagcttcatgtgcgacgtgcggcccatcgcaccagaaaataccgaggaagaggaagccgttgttgacccgtttgcgaagggattcgcagaggttttcaagtacgcgatgaaagcagccgaactaccgcccaaggtcgcactggatgcatacaccgttcttcggggtaggcgtttggtccgttctttcggtgagttctacggcgtccccgaacctgcaaatgacgatctggcggacgacattcccgaagaggaacttccctacatcgatctgctatggcgctacgccggagaaggacgctatgaacacgcaaaaacagttgaccgcacctgccaacaccgagaagggcgaagcgatgatgttgtgctttga

SEQ ID NO: 528814 - DNA, 363 bp, Stenotrophomonas maltophilia
gtgtccgttgagacccttgccagcatccatgccaatccgctccccgaatccgttgcgtcttctttcaactgtcatctcaatatcctcagccgttctgaggctttcgttgatcgcgtctttgctctccacgaaacgaccaacgtcgtcatcgcctggcgccacgccaacatcatcacgggccagcaaacggccgagtgtttccgcaagctccgccgcatctgccaagaagacctcggtgccatcgtcagtaacgaaatcaccccggccatcgaaatcgagcagcgcgcagcgaaagtccccaagcgccagtccaaagccaacgcggcgaaagtagccgccatgctgggcaccaaaacagggtag

SEQ ID NO: 528815 - DNA, 909 bp, Stenotrophomonas maltophilia
atggtcggcagctcattcaggaatctgcagcgcaaagtctcgacctgggctgcctggagcatgacggatgcattgaaacgggaactcatcctcgaagacgcagaaggcaaacttgaacggattgcgatccaggccagcgaagactctttgccttatctctgccagagcctggaggatctgactcattggcacctggtcgattaccagcatcgctcgctcaaccagcgcgagcggcaccccgagttgctcgtcgccgcagctgcccacgcccgtgcacaggtggatgtggccagcctactgattggaaagggtctaggggcccagttcagctgcatgatgcttccagacactgccgccgtctcgctgggtctgtgtcttctggcggcccggcgtgcggaggtgagggttctgttccatcaattgcgcgcagggctggacacgcagcttcttgatctgcgtaacgatggccgtcccggggcagggacgatctatcgccacttctggttcctgatgcttctttgcgctgccgcgttcaaagagcggattgatctgcacaactactcgacccccaccaccatggggccctacgctgatgcacttgcgagctgggataccgagaacgtgggccaggtcgatgacctggtttcggccttggcggagtttcacgttcagcaggcccgcaatagatccgcgaatgacatccgcgagttcgatagggaggatcggatgatctttccctacgaaatccttggatggctccgcctgcgcgaatgggccggccgggcaaatccatctgccttctcccatcccttaatgaaccagcccttggcctggctgcccgccgaaccagtaccagcctggacaaccccgatgcttgatcaagcgctggccgctgccaagggcttctga

SEQ ID NO: 528816 - DNA, 1167 bp, Stenotrophomonas maltophilia
atgatccacatcggagactgcctggaagtgatgcgcggcatggccgacaactcggtcgacgccatcgtgaccgatccgccctacggcttgtcgttcatgggcaagcgctgggattacgacgtccccagcaccgatgtgtgggccgagtgcctgcgcgtgttgaagcctggcggccatctgctggccttcgccggcacccgcacgcagcaccgcatggccgtgcgcatcgaggacgcaggcttcgagatccgcgacatgatcgcgtgggtctacggcagcggcttcccgaagtcgcacaacggcccctggggcggaacggccctgaagcccgctctcgagccgatcaccgtcgcccgcaagccgcttacaggcacggtggcagccaactggcagcagcatggcacgggtggcctgaacatccagccgtgccgtgtgggctctgatggggagcagctgcgcgctggcacaggcgggatcccttgccgccacgataccgatacaccgcgcatccggtccggtgaggccagtgcagaacgccggtatacggaaagcggcagcacaaactttgcagcaacgcccggaccgcgtggaggtgaccccgatggccggtggccggccaacctgatccacgacggtagcgaagaggtggtcgatgcgtttccgcaggccagcggtgccgccgcagcggttcgcggcacagagccaagcgccaagacagataacgctttcggggcgttttctggccgcgcccccagcgatcggcgcgacggcggcggcagcgcggcgcgcttcttctactgcgccaaggccagcaaggaagaccgcgatgctggcctggagggattcaagaagtcggccgccggcatggtgtctaacaccagcgggcagcacatgacgcgccgcgatgcgggctatcaggttgccccgcgggcgaacaaccaccctaccgtcaagccgaccgacctcatgcgctacctgtgccgcctcgtgacccctgccggcggcgtcgtgctggatccgtacatgggaagcggcagcaccggcaaggccgcagtactcgaaggtttccagttcatcggcattgagcaggatcccctctacgccgcgatcgccaaggcgcgtatccgcgtcgctcagccgggcttctcctttggagacgtcgcatga

SEQ ID NO: 528817 - DNA, 219 bp, Stenotrophomonas maltophilia
atgaagttggttctcacctctttctcgatctatccgtcgaccgacggcggtccgccttccgtcggtgctgcgttagacgtcgtcttccccaacaccgatttcggcatccagcacgcgtctggtgccttcggggtgacgttcgagcatccgagcccggaagaactcacgttcccccaggtagagctgctggcccgagagcggattcttgccatgctgtga

SEQ ID NO: 528818 - DNA, 345 bp, Stenotrophomonas maltophilia
atggtcaagaagaacatgaagatcattgatatcagccgagacttttcaaaggtccctgctggcagacacaaggcggacggtgatttcagcggagaagtattccgcgacaagctactggcacccgcactaagagattatgaaagcgtcgaagtcatattagacaatacggagggttttggatcctctttcctcgaagaggccttcggaggattggtgcgctattgtggattcaccaaggcatatcttgataagcacttgcacctgatcgcaacttcgacgggcgctatgcggtatccctcgcgtattgcccgctatatcgagacggccataccacaaggaaagtaa

SEQ ID NO: 528819 - DNA, 987 bp, Stenotrophomonas maltophilia
atgaagcctcacttcaacaggcttggcagaaagatcacccgtcgggttctaacgcccccaccggtgatggacctggacgataactatctggcgacaatcgagtttttcaaggcggcgcgactgatcacgtcaacgaaggggaatcacctgatagatctggcggcggtgaaagacatttcaccggccgcggcgctgctgttggtcgccgagtgtgatcgatggcgtgaacgcacagagcagaagtggctgagagccttcgatattaacaattggacacccagtgtccggcgacggctcaaagagatgggcttcttcgaggttctccatacacgccgcgtgcctgacgacgaggtcgtgccaggggaggacagctacgtaccgttccagactggtcaccgaaatccgggagagccggcgaggaagctacggtcttggattgaagagctcgggccaacagtggctgaccgagagtccctgtacgaggggctcgtagaggcaatgactaacgtgtcacagcacgcctaccctgatgaccgtgaacgagggcagaagcgctggtggatttcagcttccgtgaacgcggctcggcgtaccatgacggtcatggtagtcgaccatggtgtgggcattgcgcggacgttgccaagaagcaagggctgggaggcgatacggcaggctgttccccttgcgtcgctcaaggacgatgcccatatcgttcgggcagcattcgcaaaggatggtgagaataaatcacagaccggcgacgtgtatcgaggtaaaggacttcgagagaacatcaagggctacgttgattctcacaattctggcggccagcttcgagtaatcacaaatcgtgcatcgtacttgtacagccgtgacaacgaaattgaagtagaaaaatcatccgccgttccatcccccttcgacggaacatttatcgagtgggtcattaaagactatggtcaagaagaacatgaagatcattga

SEQ ID NO: 528820 - DNA, 2067 bp, Stenotrophomonas maltophilia
gtggctaaagtagttctcttccagccgcgtagtgagcgaaatgccgagcaaaatgtctctgcgtttatcgctctgtgccggaatgagttgaccatctttggtgccgagcttgccttcgatgaaatggcatgggagatcgcggattctgtcagaatcaaagctaagcgaggcgcgtttcgcgctatttttagctcatgggaatcagttaacgagcgcgtaccacgcccgatgcccgagcccttcggttcgttcgccaagtcctaccttcgatatcagcatgggatgcggccaacgaagtgtatagggtttcggctcgcctccctgcgagcattggcggctgtactggaagatcagggggcttgtaacgtcgcatctgtcactgcggcgacctttaatagagcggctctactcatccgggccaagttcagcccatctgcgggctatcgagtcggttcacaattggagatgcttgcgtcgttcattgatgacaatcgcttagcggctgtcccattgcggtggtccaattccatacctcgcccgacggacgcgaacggtagggtaggagaggagttcgaggctgcacgacaggctaagcttcccagcccccgctcgttggaatgcctagcgctggcctttcgcgcggcgagcgaacctgccgatctgtttgtaacgtcggcggcggggatcatgtgctcggccccggatcgggtgaatgaggttttgctgcttagggcggagcctgaggtcacaacagctcgtcccgatgcgtcgccggcatatgggctgcggttctggccttccaagggtgcagaccccatggtcaagtgggttgtgccatctatgagttcggtcgtgcgcgaggccgtgagaagactcaatgaactatctgcagaggcgcgtcgcgtggcgcgctggtacgaacgcaatcccaagtcgatgttcctcccatcacatctcgagcatttgcgcggcggtgacttgtcaattgcagagctcggcgaagtcctttttgcagaatcggcgtcgcccgcgagcactagggcgtggtgtttgggtaatggcgtgcctctcgagaagcgtcgcggcagaactgtgatcaagttctcggatgttgaggcttctgtcatcagcttcctgcccagaggattcccatggttggatgtcgattctgatctgcggtacagcgaagcgctttgcgtggttcggcgtaatgagttgcatcggaccaggcgtacgttccgttgcgtcatcgaggcgccagatcaggactttatttctactggtcttggtggtcgtacagagcacggagtcaagtccgtcttcgatcatctgggctacttcgatttggacggatctccaatcgtcattcgtactcaccaattcagacactatctgaataccttggctcaggccggtggcatgagtgaactcgacatcgcaaagtggtcgggtcggaatgatgttcgtcagaatgactcatacaaccacgtctctgatcgcgatgttcaggcgcggcttgtggggctgcggcaggaaaggcagcgcgagtcggtgactgaactggcggtcgagccgctgccgcaggtccgcgttagcctaattcctcgagagaagttcgcggaaatgggcatccaagccgcccacacgaccgatttcggattctgcgtccacgacttcgtcatgtctccttgttccttgcatcgggactgtgcgaattgcaacgagcaagtctgcattaagggggatgaggtgggcgaagcaaacgcgcgatctaagctggctgaaactgcagctcttctgggtgaagcggaagtcgccgaggctggtggaacctacggcgcatcacggtgggttgaacaccagagattgacgcactccagacttctagagctgatcaagatcttggacgatcccgcggtggcacgcggcgcgttgattcgattgaatcatgtaaggcctgcatcacggttgcagcaagcgaaagaggcacgccggtcactaacgcatcgagacgagggctcagtgcttatggagtggaaggttgaagtggaggggtctgcatcatga

SEQ ID NO: 528821 - DNA, 402 bp, Stenotrophomonas maltophilia
atgagtagagcaaagaacctcagtgattcggatgttgcgaagattgtcgggatccttgacggctggtctggccgtttgacctgggagggactgctggatgccgtcgaaaagcatctctacgcaaggtatacgcggcaagccttgcataagcacactcgaattcaggctgcttttgagcagcgcaagcttgcactagctaacggtgatcgtcgccagcgatcctttgagaacttgccagagatgcaggtggcgatggatcgtattgcccggttggagggcgagctcgcacggctcgaagcggagaacgctcgcttacttgaacagtttgtcagatgggcatacaacgccagtgtccgaggcctagacgacgtgtaccttaattcgccgttgccagtggtctag

SEQ ID NO: 528822 - DNA, 1764 bp, Stenotrophomonas maltophilia
atgaagagagaatggatcctccagacccgggagacgcgtcggcgtttcgacaactccacgtgggttcccttgcgcgcattggagacgctggaggaccgcggagccgacccgcagactgttgggtacgtcagcgagttctttggctgcggatctgtcgcatttcctccggagcaccgtgagagagcagagcgcttgagttgggggcagatagggatatcgcacagcgttcggccgtatgcctacgatgatgggcactattctcctgtcgatgagttcgagtacaacgacagggagcccctcggggttgagcttgtgtacgaacatgaccagccagtggttggcggtaggaaatggatacttagccctgatctggtgatcgcacttcgcctagtgaaggatggaaacagctgggttcgtcctgaggaagacttcgttgaggtggttcgtgagaagttggaggaggatggaagtcatacgtccatcgagattaagcgtgagttcctgctcgactacttggccgcgaggggcttggcgctgcggctgtcgtactaccgcaggcgcattgagaacgttccatcgttgatcgggaccgagtacgaagaactcgtagatgtcgatgaggaaagggacggagggaggttcgagctcaggcttcgcgagctggaccgcgtctttggagggagctgggcttcatttcgcgtctggaggacggatgtggacccagaagaagatgcgcctgtgatggggccggagcgcgacgacaataccgagtctgagcagaggcaggggcagagaggtggatatgtgggggtcagggtcgagggagagttctggcgagacgaatggatcgatcacaagggacttagcgtgcgtgtcagaggtgacgctgactctgcgctcccgcacttcgtgacggaaacggacggtactcgcgtagcttcccaggacctgaaggacgaggatatcggccgatggctctggttccgtccaggtgtggtaaatgagctactagcccacagaggattctccttaaagtggtacacccgggaaactggggcgatcatatccacatcggggtatcagacgcattttgggatcaactcagcggatttgttgaccatctatgcgtacgacattgcaaaattgccaacttgggagcagcacgtatgggcgtctaacaacgttgctccggaagggaaggtatctccagagctcttgatgtcccaggtcgaggcgcgtcctgcctcgacagatgcattcgaggagctgctgttccagactatgcggctgcttgagagaagctttaaggagcgctatgggatatctcttttcactcatgaaatagatgatcaagccgcgatgcaggtcgtgacgaggtttgttagcgcggataggtcaacacttcttcggcttgcaaaagaattagtgcgagttttttccgaccgactcaacgtgcgtgagctgcgtaaaatcgctgcacgctcagacaaagacaagctgggatccaacaagctgcttgaagatgtgcttgctcagaaggtcggcgttgacaaggcacgaggcgtgtttagcgtggtagccggggtatacgacatgcgcctagccgacgcgcacccagccagcgacaaggtggccgatgctctgaagctagcagggattgatacaagccagtcgttcctgaaacaaggggagcaactcatctacaactttgggagcacgatctacatggtcggcaagctgatctttggggaggatgaacaatag

SEQ ID NO: 528823 - DNA, 882 bp, Stenotrophomonas maltophilia
atgtccagtttggtgcaggaaatccagcgcgacgcgctagaccctaagaccggcgtcagtgacctgcttcgaaaggcgttggtggtgtcaaccaagctcaagatcagtgaggacaccgcttggatcaaggccgagctttcaggctacaccgatgatgctgagctgcctgcctatagagatctgcgtgggctccctcaggtacacaatcactatcatggctacttgccttttaacatgccagcggagatggagcagaagttctgtaggctacccatgggattcagcgtggcagaggtggaggcgcttctcagaggagcggaggacgagcttcgcttcagctttccaccaaaggtcacggcttacttcctgaagcatatggaagtgcaaatgcagccttcgctctttatctctaaaagtgttttccacggtgtcttggacaccgtccgaaaccgcgttctccagtgggcgctcgatcttgagtccgcaggagtagttggtgacggtatgagcttcagccctaccgatgtaagggctgcccagcatgttacaaacatcaccaacaacattggcacgatgcacaactcgcagcttcagcagctgtctgcagggcagcagtcgtaccagatgatggagaggcgcgacgagcttgtatccctcttggagcagatcaaagatcacgccacattcgacggtgtcccggctcaagtagccgtggacattgacacgcttctgattcaactccagtccgagtctcccaagcggggagtcgtggaggagtctctgaaatcgctacgagcggttctggagggagcagctggtggcgtgctttctagctatgttccccagcttgtcggcctaatgggagcaattggaatccggtga

SEQ ID NO: 528824 - DNA, 1674 bp, Stenotrophomonas maltophilia
atggcctacccgtccttagagcagtacaacgaggcactgcagtcccctcagctggtgctactggatcctgagctcaagcgcggtgcgctgagaaccactggtctcggtctgcccttggcgctgtgcggcgggttcgcgctgacgtacgaggtgacggtaggctccaaaaaatatgctttgcgttgtttccacaaagaatctcgtgagctggagcatcgctatcaggcgatctcgtcaagactgaagcagcttaatagtccgtacttcctaaattttgagttcaatcctgcgggcatccggattcaggggggcacctaccctaccgtcaagatggcgtgggccagcgggagcacgttggctgagtttcttgaggcgaagcacgctgacaaggcggcgctgactaggctgcgggctgctttgatgtcattggctgcttacctagagcagaataatgttgctcatggagacatccagccagagaacctgatggtcagtgctgatggcggcactgttcagctgattgactacgacggcctgtatgtggaatcacttacgggagcaaaggcgaccgagctgggccagctcaacttccagcacccgcagcgttcggcgaacgatttcggtcccacgttggatcgtttctccttcttgacgctggatgtggcgctgcaggttctaattgcggctccgacgatgtgggcgtctactaaatctgagccaagcgctgtcgtattccgccgcaacgattttctggacccgacccaatccacgtccttccagagtgctgtggccattcctggcgctcgcgttcatgtggaaaatttagccaaagttgctgcagctcccttttcgaatgttccttcgctagccgagttccttaaggggaatggtataccggcggggccgatttcgatcagcgcggcgcccagagtactaacctatcagggcccctatgtggtcgctgacgccgccaactacggacaggtactgctgcaggtcggcaatcgagtagagctcgtcgggcgcgtccaggaggtaaggcgtggccgtgccaggaacggcaagccatacatcttcgtgaacttcgctgactggcgagggctggcggtgaagctgtcgatctggtccgacgggatagacgccatcaagaccggcatgcccgatgcatcctgggttgggcgctgggtttcggtaatgggcctagttgatccgccttacagcaacagtgttcgcgtcaagaacagttctcggtcgattagctatacccacctgtcgattacgattacttctcctggtcagatacaaacacttgtcgagaaggatgcaaggttccggcttctggtagcagggaagcctgttagagctgccttgggcggtgtcacgacgcaagcaaacagcccaaatgccaacatcatcaaggggatgggcggagcggtgccaagccctggaccgctccctcagccaagcccgaatccgtcgccatctcagagtcggaatcaagcgatcgtagggggaatgcagcggcagtcaacgactccccccccgaggccaccacatcgaccacccgtccccgggggcgctcctcccaggcctgtctcatccaacgccgggtgctggccagtcgtaatagccggcgcattgttcgcagtggtgctgaagatgtgtgcagggtag

SEQ ID NO: 528825 - DNA, 693 bp, Stenotrophomonas maltophilia
gtggctaagcacgaagagtcaccgagcgacaatgaggatgcctaccgcctagcccccgacgtgggtaggatcgttctggccgatggggcgtcagagtcttttgacgcccgcaattgggcgcagctccttgttgaccgcatggctgatgaagatctatcggtggctgcggtcggggcctgtgcgcaggcctacgaggctatgcatgacccggagcagctcacctggtcaaaggcagccgcataccagcggggaagctttgccacgctgctagtcgttcaggacctccctgaatcaaacttggttaggatctccgccgtcggagatagccttgccgtatggctcgatggggacaagatgctggcatcagtcccatatggcagctcggagcagtttctggacaggccgacgttgctgtctacaaggatcgatctgaacgagccggacggtctgcactgttctgtgcacgaatgggagtatgaggagcaagggcacaggttcctcctgtgcatgaccgatgcgcttggtgcctggcttctgtcccatcaagagagaggagatgcgtcagcactggaatccttgtgcagtatccgagaatcgcatgagcttgttgagctcgtagagaaggagcgtgccgcgggccgaatgcgtcgcgatgactcaacactgatcatcgcttcggttaccaggtcatga

SEQ ID NO: 528826 - DNA, 174 bp, Stenotrophomonas maltophilia
atgctggtgcgcacgttccgaccgcaccggctgctgagccgcgaggcgttctcgcagctggcgctggactacaccaccttcggcatggggtatgtcgagcgtcgccgcgccatgtcaggagccgcgcacagtctggtgttcgctatcacgtgttatgtgagctgcctaagttaa

SEQ ID NO: 528827 - DNA, 435 bp, Stenotrophomonas maltophilia
atgaaggtcgtctacagcttgcgcaatgatcttgagaaagatcagtccaggattcgagatacgcaatccttgacgttgaacgatgcgaagccattgctcggattaaaaggcaataaggggctatttggtagcgaggagtggtggtccaatatcgagtctggagtcattgagggtgagtgcgtcacgggtgtaattgcgagcctgtacgttgcggggcaggagcgcctcgatcacccaaacgaattcgagttcaccctaaacgatgggagttcaaggtcggaagcaatcttgacggatgatccaaattccatttctgcatacgccatcggacggaaagttcaaattcactacgcgtacgatgagcttaagtgtcccttgagaaacgggcttcctcagtatctggacttcgttgtgagaatagagatcgaagagtga

SEQ ID NO: 528828 - DNA, 336 bp, Stenotrophomonas maltophilia
atgagttcgaccgtcgagttctttgttgagacgatcgccaaggatcgcactgggaagtcggtgtacgtgggttttgttgtcacgggcggcccgatatgcgtcggagacaagtttgtctcgatgtatgaaattccgaggacactggaagacatccagctgggacgccggcgcacctctccagaaaacgtccgtgacatctctattggtgtggatgcaatagatgcaaacaggcggcgagtacaggcgctacctgagggcgtgaccggtgcactttatctaacgggtgaagacgtggcgtttattggagctcgaacatacttgctaacgtcgggttga

SEQ ID NO: 528829 - DNA, 5181 bp, Stenotrophomonas maltophilia
atgaaccacatctatcgtcgtatctggagtaccgccaagcagtgctgggtggttggcagtgagttgagtgcgttgcgtgggaaaccgcacggtggcggagcacgcttgtcgggaaactgcgctgtactggctgcttgtttcttcttcctgccgctggcgcaggcgatggagcctgcgcactgcgagtccgagcagaccgagtgcgccccggatgcttctgcgacgaacacggtgcgcatgaattcgttgctcaaggcaacagatgacctttcccgcgccggtctcctggccgtaggtgagacgatctggggtgacggtatcaagcgcaacggcgatcacaacactgcgtttggctaccgcgtcgaggtgaccggtggctacaacactgccgtgggttcgaatgcacgcgcgcatggtctgggctcaaccgcgctgggcaacaattcctggggcagcggcgtcaacagcgtagcagtgggaagtggcgcgcaggtcaccaccaatggcggcgtgggtgccattgccattggcgcagacgctcgtgctggaacgagtggcgtctccggtgctgtatcaatcggccatcaggcggtcgctcgatacgatggggtggcactggggtaccgtgccaatgccttggcctataactcggttgccctgggaaacggttccacagcctatgaggacaatatcgtatcggtcgggagttcgagcaacaaacggagaatcgtcaacgttgcccgcggcagtacgtcctatgggagcaccgatgccgtaacgggcgggcaactgtacgaaacaaaccagactgtcagcgccattggaagcgtggctggcaccgcaaattcgaacgccaacaccgcgctgagcaccgccaataccgccaagtcgactgcggacaacgccctgctcagagccaatgccctgactgggctgctcaatcagacgtctgcgtccggcaacgtccgcctcggcgcaagcaacagcggcaccgtactggatgtgcgcaacagcgcaaacgccagccgtaagatcacgggcgtggcagacgccacgctgagtacgaccagcgcggaggctgtgtctggcaagcagctgaatgccaccaacaccaatgtagcggccgcacggtccgtcgccgactccgccaagaccaatgccgacagcgcgctggcaaaagccaatgtgatttccggccttctgagccagacgtctgcctcggggaacgtccgcctcggcgcaagcaacagtggcaccgtactggatgtacgcaacagcgcaaacgccagccgtaagatcacgggcgtcgcagacgccacgctgagtacgaccagcacggaggctgtgtctggcaagcagctgaatgccaccaacaccaatgtaacggccgcacggtccgtcgccgactccgccaagagcaatgccgacagcgcgctggcaaaagccaatgtgctttccggtcttctgagccagacgtctgcctcggggaacgttcgtgtaggtgcaagcaacagcggcaccgtactggacgtccgcaacagcgccagcgccagtcgcacgatcacgggcgtggcggatgccacgctgagcacgaccagcacggatgctgtgtcaggcaagcagttgaatgccaccaacaccaaggtggaagatgcacagcgcgccgcagacgcggcaatcgcgcgcctgaacgcatccgccccggctatcgggctggcggcagaggcggaggggagcggaagcaccgccagcgtagcgatggggcgctcggcgaaggcctacaacaccaacagcatcgcagttggtgcagatgctcgggccagtgtcgacgccaacggtgacaagagcgctgccaccggtgcagtcgctctcggtgctgcaacgcgtagtggcaacggcgcggtggcggcaggcctgcgtgcttcggcagtgggcgatcgcgccgtggccgtaggcaatgatgcgacggccgcggcgacccatgccgccgcgctgggctacaaggcagatgcgagcggcaatcaggccgtcgccattggccgggaggccgccgcatcgggtttgtattcgacggcgcttggcaatcttgcaaaggcgggtgccgaaagtgccattgcgttgggcgaccgcgccctggcatcgcacacgggaagtgtcgctctgggcaacggctcccagaccaccggcatcaatcaggtctcggtcggcagctccagtatcaagcgcaagatcgtcaaccttgcggatggcgctgtcagcagcagcagtaccgaggccattacgggcaagcagttgaatgaaaccaacggccgggtaacgactgcacagaatgccgccaacggcgcgcagaccaccgccaatgccgcacaggttgatgccaccaaggccttggctgaagtcaccgttctgggtgggttggtcgggcaggtttcggccacggggattgtccgcctgggtgaaaagaacagcggcaccgtactggatgtgcgcaacatcgcgaatgtgaaccgtaagctgaccggcgtggccaatggtgcgatcagtgccagcagctacgaagcagtaaatggcaggcagctcaatgccaccaatgagaaggtggtagctgtggaaggcatggctacctctgcggctgcggatgcgacactcgcaaaggtggatgcggccaaggcgctggccgaaacagcggttctgggcgggctggtggcgcaggtctccgcctctggcgatgttcgtttgggagagaaaaacagcggtacgaccctgaatgtgcgtaacagcgccaatgccgaccggaagatcagtggtgtggcggatgggggagttgacgcttccagtagcgaagctgtgtcgggccgccaattgtatacaacgaacaatcgaatttcggatttggagaacgccaatctgtacgtgagtgtgggtaccgattcgttcagcgagcgggcggatgcggcctcgcttggggtggcaattggagattctgcgaaggccggagcggagggagccacagctctgggggcatttgcgagggcgctgagcaagaactcggtagcggtgggccgtggggctggggtatctggtggtgccgctgatggttttgcaatgggggccggcgctcaggtgcacgcaatcagtggggttgcaatcggagcaggtgctgttgtcgaaggctcagcggctggctctttggcgttgggtgcagactccggtgcagacgaggctggaacggcctcttttggaaatgccacaactcaacgtcgactcaccaacattgcccgaggcaccgccgaccacaacgccactaccgtttctcagctcaatgactccttcgccactctcggtggtggtgcaggcatggatgccaacggcaacatcattgcccctacttatgcagtgcagagtggaactcagggcaccgttgaggacgcgctgatggcactcgatggcgctgtcgtcaccgcaggccgtcgcgcggacaaggtggaaggccggctgggttcgatcttccaggattcaccttcgacccgcgccgacggcatgagccagatcgtgctgaatggcgtgaatggcatggtgctgaccaacctggctgacggacgtgtggcgccgggaagccgtgatgccgtaaccggcagtcagttgtacgccgcagagcagaagatctcgcagaatcggaacgatctggaggcgatgcgcaaggagcgggaggtgggcgagcaggcaatgcgtggattggatgcgagcggcccgatcgatttcggcggtgcgcgtttgactggcgtgtccgatggttcggtttctgcggatagtcacgacgtggtcaccggtcgccagttgttcggcgtcagtgatcgggtatccaagatcgagcatcagggtcgcttcctcaaaattgacacggatcagctgagcgaagatgccttcgctggattcttgggtgttgccattggtgactcggctcgtacgcagggcgaggggggcacggctgtcggttcgtttgcctcttcgctgggcgtaaactctgtcgctataggccgtggatcttccgtgtcagcgaactctttgaatggcttcgcggtgggggctggtgcacatgtcgcgtcgacgaacggagtttcaattggtgtaagttcgagagttcacgcgggcgcggagggatcattggccttgggcgtggggtctgaagctactgaggcaggaaccgcatcctttgggagtgcaggaactgaacgccgcctcgtaaacatcgccaacggcaccgccaaccacaacgccgccaccgtcggccagctgcgcggtgcactctccgccctcggcagcgaagtcgatgccaacggcaacatcgtcggccccagcttcaacgtgcagggtcagtcccaatccacgctcaatggtgcattggaagcgctcgacggcgcagtcgtcagcaccacctcgcgcgtgaaccaggtcgaatcacagctccgctccgtgttccaggaaactccgtcggtgcgtgcagacggcacccaccagctcaccctggccggtgccaacggcatggtcatctccaacgtggccaacggcctgatcgcggccggcagccgcgatgcggtcaacggcggccagctgcattcgatgcagcagcagatcaacggccgcatggatgggctggagcagcgtatcgacggtcagccgcaggcccgcgccacggcggcagcatccacgccttcgccatccaccgaagagaccgcgccggcgccggagaccggcggctcgccgcagatcgcctcaaccggtgaaggtgacaagccagccccgcagccgaagtcgaagcaggacgacacgcccaagccgcaggtcgataccgccgagctggagaagatgcttgcccgggccaacgagtacaccgatggtgcgatcagcaacttcgagcgccgcctggacaagatggacaagcgcttcaaccgcatggcggcaatgagcagcgcacagagtgcgatggcgatgaataccgccggcctggccacctacaaccgcctgggtgcgggcgtgggttacagcgagggtgagtcggcgatggcggtgggctaccagcgcgtgctgaacgagaagggttcggccaccttcagcctcaatggtgcgttcaccaacagcggtgagcgcagcatgggcgtcggcgtgggcatcggctggtaa

SEQ ID NO: 528830 - DNA, 681 bp, Stenotrophomonas maltophilia
atggaaccggtgaatccgaggcatccaaactcagagtctttcggcgtgactctttttgacgccgatagcaagaagcacgctcttcgcctcaaggtgacccacttatgcgacccagaaggagggtccggtgagcactccggcatcgaagtggcgattgagtacgtcgacgggccattgtcgtcgatcctaaccgcagatatcgctcgatggattggtacagcagagacgaaatctggtgatgctgatcggtcggcaagcgtggacgttggtggaggcgtaagagagttgccgcggcagctccgtggagcgggtctcggaaccgtcgcgcagtccatcgttgtaatctgggcaaggctaatatcggagaggccggtgcagcacattacgttcgcgcggagcgacgtagttgatccaagaactggaaggatcgatacggaggccatgaagcgtaggctcagcttctgggagaaattcggcttcactttcgaacttcaggacgagggcgttacaggacgatcgaaacctatgagtagccactatctcgttgtaccagatgtgcagagccgtagctgccggggctggaccttggagctgtcagaagagctggccgcattcttcgattcagcagtaaggatgctggaattccccgatcaggagaccggatcgcaaggctcaaattag

SEQ ID NO: 528831 - DNA, 903 bp, Stenotrophomonas maltophilia
atgggaaatactcgtgggactattgagctggtcggagaggctaccggagttctcatagggagtgagatcctggatgggattcggcgcggggcacttgttcatggtgccaatgaggaccgcgttagaggatgtagctgcgatctgaccgtcggcacgattttttggaaaggaaagatacttcgtaggcgaactggggaagatgatggcagtcgaggcatttcttcttggctgcggaggcagtggagagctgtgggacgctggctagggcagctgaatgaacctaagcatgttgtagtccctcctggaggagtggttggaatatttactgctgaaacgctggatattcccctcgacatgtgcgcgaccgcgtttgcaattaatgccatgagttcgaaaggcttcttggtcctaaatcccgggcatgtggaccccggctttaggggctccctgacggtaaaggcactaaatattagaaaaaccaatatcaccataacgcaaggtgagcccatattcacggtggtttttcagcggcttggtcaagagacgggtgaattctccaacgcaaaatcagtagaagatcgcgagagagattttcacaacgaaagcgtccagtcgtcaccggatacattagggcaaatgattagtgtagacccgagtgggccttaccccacgcgagagcaggtcaaagagatggtgcgatcagatgctatcaatagggcaactatgattctctctttggtcgccgcaatcgccgcaattggcgcatggatgtttccaaaaaattctgaagtttctcctaggtcgatgccgagccctagtgcttcttctcagagtgcaaccacattgaacaagaagggcgatggtgagctcgccggcgggcttggtgaacatgaaaggcggtag

SEQ ID NO: 528832 - DNA, 780 bp, Stenotrophomonas maltophilia
  misc_feature (506)..(536): n is a, c, g, or t
atggtggtcgcgggcgctgagcccttcctgcatcgcgtgcggcgggttcattctgcgtggcgccgggccgatgcccctgcgtacgaatgtcctccggcgccggccgttggccgtcacctccccctttacttcgtacgcaagggcatccgccctgcgttcggagttcgtcggcgcctcattgaaggcagattgttcgcagccttacccaccgcaagccgagcctcgtcggggcgggcagggcccatcggttcgcggcggatcaggacgaagacatgtgtgtggcggatgcattctgcgcggcgcagggcggagacccttgcgtacgaatgtcccccggcgccggccgttggccgtcacctcctcctttacttcgtacgcaagggcatccgccctgcgttcggagttcgccggcgcctccttgaaaggcggccgcgcgtgctgcgctctcctcaccgcacgccgagcctcgtcggggcgggcaggggtctgggcaaagtaaaggaggnnnnnnnnnnnnnnnnnnnnnnnnnnnnnnngaagacatgtgtgtggcggatgcattctgcgcggcgccgggggacatttgcccaggcccctgcctgtctcggcggggcccttcagcctgcagagacgtcgcacgaagacgcgcttcggtatcgaaacgacaagcaaaaaaagacccggcagagggagggatctgccgggtccggattgcgtggggggagggacccacgcaatgagtgttgcgtcgcgtcagtggttgttcgcgtccgccgttga

SEQ ID NO: 528833 - DNA, 276 bp, Stenotrophomonas maltophilia
atggcgcggcagatggaatcggcatgggttcgaacgggcacattgatccgagtcgcggatccttccgccgtgaatgcatggatctatgccaacgtcggcaatggagactccttgtcgtacgatctggctccattccattcggcgtatggaaacggacttcaggtaatagccggtcaagccaagcaggagggcgtgaccaaagcgagttactatcttgaatttgaagggcgcgactgtgtcaaacatccgtcgccgcacttgtgcatggaaatgtag

SEQ ID NO: 528834 - DNA, 753 bp, Stenotrophomonas maltophilia
atgggcctttcaggctgcgcgaccactgtactcccgaaagggcttgcctccgccggatacactgaagtggtttccgtccccctaggccctttccgctacttccatacggcgtccatgcttcctgggaaaaacgccgtaggcaccacctacttcgtccgctgcgcgaacacggagcgggccatcaacctacagatcgcggatgggcttgcaattgacgccgaagaggcctgcacgcgtgtcgatgcggcggctgccttgtccgaatcatggataccggcagcatcaaaccgctatcggatcctccttgcacaagaaggcacggcagcaggcgtgcggacaagatcgctcggtcgctttgccacgggaaggacgcttgcactcgcgtcagccgtctacggcgatccgcatcagaccttcgcgaatctggttgacctggtggcgcacgagggccttcatgcattgggccacgctacaaggcatcctcgagcgctcgacgaaagaagcgcttactacgcgggtctatgcgcgcagcttcagatcaaaaacggcctcatcaccgaggagggcttgccgggtgcccctctcgcgtccggtgaccgggcggtacgctactcctcgcaggcggcctatcgcgtgcgactggaaacctacccgttgctggcgggcgaaggcattcggctcggggctccatccggagagtcgatgctgcaacggtgccaggaggtcagacgcgagatgcatcggcttcagtaa

SEQ ID NO: 528835 - DNA, 246 bp, Stenotrophomonas maltophilia
atgatccggattgcagaagaggttggcgtaatcgaatccccgttcgcccttcaaccgtttcggatcgatggcgagccaacctctgtctccgaaatcgagaatgttcccgtggtgtatgtcaccgtgcagcgggaccacgtcgcccggatcggcaagaagcctccgcgcggtgtcggcacaacgggcgagtatttcgccttcgcgtccggcgatcagcgcctgaaaaccagtcagacagcgggataa

SEQ ID NO: 528836 - DNA, 429 bp, Stenotrophomonas maltophilia
atggcgctgtgcgcttcgccggcgttcctggcgcagcaagccctgccggagagcctcgaggcgctacaggcgttggacgccgtggcgtacagccggcatgggcgaggagcggagtggaaggtggtggtcgacggccggacgcatgcgctccggccgaaggcgcggatgctgctggacgacatgcagggggtgctggttgcggccgtcgcagggctaggtgtggcgtggttgccgtactggctggtgcgcgatgcgctgatggatgggcagttgcaggaggtgtttccggcggcgtccagtccggtctatccgatccacgcggtctggcagcgcatgccgcacctgccgttgaagacgcgcgtcaccgtggacgcgctgctgcaacagctgcccgggcgtttgcaggacgtggaggggccgcgggcctga

SEQ ID NO: 528837 - DNA, 225 bp, Stenotrophomonas maltophilia
atggccaacacccatgaaccgccgacgccgcgcaggagccaggcgcgagtcccgcgatccggggaggcgccctactgtgccttcaaggatgaccgggcacgcctgcacgccctgatctcgcgtgacattcgcatcgtcctgaccacgctcgtccttgccctatccggcgtcttcggcgcatcgcgcctgccgataggcgcctggctggcggagctgttcagctga

SEQ ID NO: 528838 - DNA, 672 bp, Stenotrophomonas maltophilia
atgacgacgaagaccaaaatccggctcccgcgccccaagatggccgaacgcgcggcggagcaaatggcgaagcatttcccggattacatccgcgaaccgctgtggaaccgaaagaccaacgacggctactccaccattccccgcacgcttcccatcgccatgcaggcgatcgacatgcaatcgaagggcaacgcggccgggcataccctgttctgcctctgggcgcgcgcacccgaccatccgctcatcgtcatcgagtcgccggccatgttcgcggcagaagcgggctacaccggcgagcgcgccaccgacacgtggcgccggcgcatgaagcgtctgcgcgagctgggcttcattcggaccaagaagggcaccagcggcgagttccactatgtgctgctgctcaatcccaatgtggtccttgcgcagctggatgagaagaacgccctgcaggccggcctggcggaccgcttcgaggaccggctgaccgagattggcgccaagcgcgacattcacgaataccagcagcgcatggcggaactggacgccgccgagcaggccgacgaatcgccagacacgccggtcaccccaggcaagaagccaaagcgcgccaagggcaagaacccggccaagagccaagtggcggagacggatcatggccaacacccatga

SEQ ID NO: 528839 - DNA, 462 bp, Stenotrophomonas maltophilia
atggcctcgatcagggtcctgctggtgggtgagcgaacaatggagcgacttgcgatggagtcgcgcctgtcgatcgatgcgcgggtcagcgttgaagtggtcggcgacgcgtgcagcgcggcaacgctggtggaatggcggcactacagcctgctggtggtgaatgtcgtcggtctggggcggtcgctggtagacctgatcaacacgttctccgagcactcgcgcgaatcgcgtatcgccttcttcggtggcaggtccacggcgatggtgaaggccgcagagctgattgcccaggcgcgggggctggacctgctgaaggttcccgggctggatcagcccgaggatggcaaccgggagtaccgccggttcgtcggtgagcgtgtctgcgccgtaccggtcggctctgtgcatgaacgttgccaggcgctgcccgtcgtgacgcgaccctcgcttccggcctga

SEQ ID NO: 528840 - DNA, 276 bp, Stenotrophomonas maltophilia
atgctgatcaaggccaagaaggccgcgcttccactggagctccagcgtttcctggaccgggtcgcgccgatgctggaaaagggtgccagtgcgcacgacattgcgcgccgcacgcagatgcgactgcaggatgtacagctcgcactgcacggcctgaaacaggccaggaaagcgtggccggcgtttgtcggcacaacgccaccggcgcgccctgccggatatggcgtgttctcgtggctgctgcgcccccgtgctgcgcgcgctgcatcggggtga

SEQ ID NO: 528841 - DNA, 732 bp, Stenotrophomonas maltophilia
atggcgtgttctcgtggctgctgcgcccccgtgctgcgcgcgctgcatcggggtgaacggttgcagggtacgggctcccagaccgctgcgaccggcaagaccgtggtggtggcggacgagcatgccatcttcgtgctcggcatggtgagctcgctgcgggtgcttccgcaggttgtggtgaccggccagaccacccgtcgcaccgtcctgctggaactggtggaacagcagcagcccgacgtggtcatcaccggctacaccctgcaggtggaaggcagcacgcaccccggccacgcaccgatcgcggatatcggccgcttgtcgccgagcacccgcatcatcgccattacatcgcaaccgagcgacgcgctgcaccggcgcattcttcgtgcgggtgcccacctcgtgcaggacaagacctgccccatcaacaccctcatccggggcgtgatcgacacgctcaagagcggcgctcccgctgctgccgacaaccagcgtccagtgatcgtcggcaccggtgccctgtccacctgcgagcagcaggtccttcgactctatctttccggcatgaacgtcaccgccatcgcaacgctgctgcagcggagcaagaagaccatcagcgcgcagaagatcagcaccatgaaaaagctcggggtatcgagcaaccaggagctggtgcttctggccacgaccttccccccgcccgaatggccggaggcgggcgggctttga

SEQ ID NO: 528842 - DNA, 618 bp, Stenotrophomonas maltophilia
atgcgggaagctcttttcctggcgaccgtcaaggccgcgccggcggccagtgcagcggcgagcgctggcgacgactggaagtggctggtgccggtggccacgctgattctcggcttcggtctgaaatggctccaggaccacctgacggaaaaaggtcgccggaggcacgcgaaggagttacggcgagagcaacgctacgacgccctacgcatgcggcgcatagatgctgagcgcgcgaacctcatctccgttcaacccctattgctgaagctcatgcggacggcggcagttgttcacctcgaggacatcaaagcgtacgacaggaccggcgagtgggggacgtacaagttacctcctcaggttgcggaggatttcaggctcgctatagccgaggtcgtgccgatacacgcgagaattcacacgcgcactgtttatgaacagctctctgagtaccgggagctgctgtatcaagtgaccaactcggtggcgaaagccgaagcgcgagctttatgggagcaggtgcacccgatctatgaccgcctgcacatagctctgggtgatgagataaggaagctggaagacgagaacctgcagctcggagatccatcggcgcgctga

SEQ ID NO: 528843 - DNA, 1548 bp, Stenotrophomonas maltophilia
atgagaatggataggaagtggggaattttggctctttcggtcggactgaccttgggcagcacctacacagcaggtgcgcaacaggatcccgaggccgtcccgatgctatcggatcagaataagctgcttgtcacgtcagagattcagaatgatgtgcagcggttcgtcaatgcccagaagcgaatcgatggacaaggcaagaatatactggctcggatcaccccagatccgtcgcgccagtggatttatgtggatcttgatggtgcctttctacccaagggccgaagcgaaatgggggaggaccttgggcaactcattagggatattcagaaccatgtcgtggatcttcttacaggcatcgtagagttcaaggccgtcgtcatcagggtcgatggcaagcgcctggatgagatttatcctcctcgctacaaatccaagcagagggcacgcgccacttcacaactgactaccccagtagatggcttagtcgtgctcagtccatcgcacggaaaatactttcactacggcagtaacaaatgggagtatcagcgcccgctctatgtgaactccactgtcgtccatgaggacactattaccccgggctacacctcgatgctgcagagccttctgacattgaggagcccgacgcatgccacgtcaatacgtcagactcgagacattggcaacactgcgattgatcctaacagcggcttgaaatgggcagagctcgctgcacgctattacttggctaggctctatcccaatgaaaccgggatgtggaatcagtatcctaatggaaaaccgaaccgtgcagacctccgtgagtatgatgacgatattgctgttcgcccaaattttgcaaacttcctaaacgctgaaacaatgatctccatccacacggatggtagcgacacgaacccgtcagcacgagggctgtctgtcttcacgaatctcaacgatccaaaatctgtagcgcttgccgagagcgtcaagtgctacgtgcaggagcaaatcaaacagcgccctgattacccaacattccccatccgctcaggtcccaatgatggagtgggctacggggaggtccgggaggcggatatggagaccgtgttggttgaggtgggcttccatagcaacgccgaagacgctgcactacttcagaccacagagttccgtaccatttcgatgagaggtatcgaaaagggctatcgcatgtacagagaggggaaggcctgcataccttttgccattacatcggtaggtccggctgcaggcaagtcccccggcaaagtacctgtggcgttcacctatgtgggttatccgcagggagcaatgaaggcagatgtggagattgttaagtgcgcaccgggcaacacctgcaacggcgcgaaaggccttccggtcacactcgccgatggaaagctgtcatggaactttacatgtggcaacgtcggcgcaaacgcgacgcatacagtaaggacgaagctctatgatgccgatggtgtcttcgcaaagtctgtcgaatcagccgtgacctgccagttgtaa

SEQ ID NO: 528844 - DNA, 450 bp, Stenotrophomonas maltophilia
atgccaagcgcctctggacgtggatccgccgccctggctgacatcacgcccaacaccaagcagcggatcgggttcgccgccgcaccgctgacgctgatcggcgcgttggtggccgcccttgccacgaacggctcggcgcacgaaggacgccgctacacgccgtactacgactcggccggcatcctgactgtctgcgcaagcgtcacgggcccggcggtggtggacggcaagcgttacaccgacgacgagtgcacccgggtggggcatatctttccgaagttgctggagatgtacgaccagctgacccgcgaccagcacgcgctggtgcggacctcgatcgtgctcgtggttggcgctgcggaggcggctgggcctgccgcacctgtaaggtccatggggccgccacggcagccccttcctagaagcctctttcaatcgaggcatgagtga

SEQ ID NO: 528845 - DNA, 285 bp, Stenotrophomonas maltophilia
atgccggcctcctttcactgggggaactgcggtgagcatcaaagaacagatcacaacggactggcggtcgcaggttcgaagatcggggcggcagccagcgccaccgcagcgacctactcgccgggctacacgttgagcgactgggcgctgaccggcgcgatcgtgttcaccgtcgtccagatgttcaccgtcaggttgaagaactggggcgactggtccgcttggtggtccgcgcgcatgggcaatgccaagcgcctctggacgtggatccgccgccctggctga

SEQ ID NO: 528846 - DNA, 558 bp, Stenotrophomonas maltophilia
gtgaaaagggatgagtatgtgttggcagttctggagcgcgcggacagactagccgcagcctatggggctgcgcgtaaggtcgttcacgacagctcggggcagctgactgacgctattggcgcaagggatcttaggtccgtcaaagcgatcgcggcatctgcaatttccgctttcgagactgccgaggaaccgtataagtggctcgccgctcagctggatcatatccagcagctgtgcggtgctctgcccagggaagacgcactggttgttctgaaggtctttcacgcaatgcatgccagcgccgatggcctgctgcggtacgcagatgcagctgagcgtatggatgccaaccttggcagtggacacgcgacctcccaagacagggcctttcgcacggtgcttgatagcaacatgaatgtgctgattaagcgcttggctgggcagcccgaagacgggctccctcttaatggcattgcgggatgggcggtaagcaatctgagggcgtcgctgccgatgattcaggctgtcgacgcggacggcgggcattcacctggctga

SEQ ID NO: 528847 - DNA, 384 bp, Stenotrophomonas maltophilia
atgcggccgcggccgctggacctgggcaagcccgctgatcgctggcgccttcgtctggtgatctacgacgcggcgcacgagctggtgtggccagagcggcgtcagtcgttcgccggcctggccaagtccgcgaagatgcgcaagggcaactacatcaagggccacaagttcgccagcgctgtcctgcaggaagcgcttcacggtggcaggacgggatttcggaaagcgctgtggagcgcccagagctcgcgatactcagtgcttgagggtgagatggtcggcagttgctgcgatggcctgagtatgcagggtgtgaaactccgtcatcattgcggtgatcttctcttgtgcttccttccatcgctcaaggcttacgggatctga

SEQ ID NO: 528848 - DNA, 501 bp, Stenotrophomonas maltophilia
gtggcgcatctggtaggggtaccggtaccggacgccagccttgcgcagagcgcgctgccattcgccggcgcggatgctctgatccgaccgcggggagccatcttcgacagcagcgcgccagtccaatgcggcagctgtggtgccgccccgaccggcctgttcccgcgcggcgcacagatccagtgctgcagctgcggggcatcctcagccgtgttcgttggccacgatcctgccggtgctctggcggcggcgctggatgtctggtgccgtcgctcaccagttcttccgtcgccggcggacgacagtgcaggccagcggcgccgtggcgcagccccggatggattcgacgacgagggcaatggtgacgtcctcgagctgctatcgcgtctgctggtcggcgggagctaccgcatgccagtggaggggcgcagcgccttggcgccgctgggcagtagcgacatcgccggcgcggtcggctatatgcgcaatccgctggagtag

SEQ ID NO: 528849 - DNA, 513 bp, Stenotrophomonas maltophilia
ttggcgccgggcgaatccgtatggttgagccccgcaggccccgtttggccagccgcgggtggccagcaacagatcacctccattgttgacgaccaagggctgatccaggagtcgaatgagggcaacaaccagctggctcgaatcatccaggtctcggacaagccagaccttcggatcaccagcgcccattcacagccgctgcgtccgaaatccggcgatgcaacctcgttcaccgcaaccatcgagaatgtcggctcggtcgccgccagcgcgccttggattgggctgatggccatgaagaacgggcagtgtttcattgaaggttgcgtatggggcggcctccagaactacaccctggcacccggcgccagcgtcaatgtcaggacttacaacgacgtctggcgcccgaccccaggggtgcactccatccagctgctggttgacgatcagaacaccgtgagcgagtcacgggaggacaacaacagcatcgacatcatggttactgtggattga

SEQ ID NO: 528850 - DNA, 1239 bp, Stenotrophomonas maltophilia
atgagcctgtcggacaaggtcagcgccgagaccttggcgctgcgggcgaagccacgtaccgttacgcgcctgaaccgccgaacgctggtcttcctcgtgggcggcctgtcggccgcagtcctggcagcgacgttgtgggctttgcagccccatcggcgcatcgtcgaacatctgaccgagctgtacaacgtcgagcgagtgtccaaatccgaaggactcgacaccctgccttcggactattcgaagctgccgacgaaagtgccggagctgggtccgccgctgcccggtgacttggggtccgccatcgtagcttcgcagcagccggtagtgcccacctatgcgccgccaggtcaggatccggaagacaccttgcgcagagaatccgaggccgcggccgcctcgtcggtgttctttcatgccggcaagcagggccagactgcagcagcggcgtccggggagggcgcggcgatcccgtccttgtcgacctccgtcttcgacccgatggcggccggcccgctgtcgacctccgcacaaccggtcgatccgagcgttgtgcagaaccagcacgaccaggaagcggccttcctgaagtccgggtctacggaaactcgcaacagcggtgacctgcgcatgcctgtctcaccgtaccaggtgatggccggcacggcgatctccgcagcgctgataacgggcatccagtccgatctgccgggcgatgtgatcggaacgatgaccgagccggtctacgacaccgccactggcaaattcctgctgatcccgcagggatcacgtctccttggccgctataacagccaggtcagctacggacaaagccgcgtacaggtggtctggaatcgggtcatccttcccgacacctcctcgctcgccctggacggactcgtgggaaccggccctgcgggctacgccgggctcgaagacggcgttgaccgccattggggacgcattctgtcgaccgcggcgctgacgaccgtcctcggcgtcggcgccgagctggcagctcccgagaaccgccaggacggcaatcgggtcgtgctcgccggcaggaacagcgcacaggacagcatcaaccagctcgggcaggagatgacccggcgcaacatgaacgtgcagccaaccctgaccgcgcggccaggcttgccggtgcgcatcatcgttgcccgcgatctggtgttgcgtccttatcagccgctatttctcaatcggggagcgatgcgatga

SEQ ID NO: 528851 - DNA, 219 bp, Stenotrophomonas maltophilia
atgagcgccaccaagaagttgcgccttgggccgttgcccaagctcgaatccacgcgggtgacctttgtctgccccggtggcctgagggcggatcttgatcggtatgccgcgctccacgcgcagacctatggagagccggtggacgctgtggtcctgattccgctgatgctcgaggcgttcatggcgagggaccggggatttaggcgccggaatctgtag

SEQ ID NO: 528852 - DNA, 738 bp, Stenotrophomonas maltophilia
atgcatttcacctcaatgggcagaaacctggagcgcatgcgcgccgctctcaccgaatggatgattaaagaggaaatactaggagacgcgttcttcgtcgacatcgaaacctggcgatcgcgaggcgagtcctatggtgacgactcactcctagtcttggctttcgatggcagcacacttcataccatgttgaactccgggggggacaccgaagaattcgacgacctgattgattcgttcggcttcgggtatgagcttgggcattcttggagcatgggcttctaccctatcgaagggtatgactactctcgcctctcaggcagctattcgtccaagctgcaagatgaaagatggcgcaagaaggcagcggctgtaaaagctcgcgcaggacatcaatgtcaggattgcggagccacgaagcccttggatgcccaccactgctactacgcgactatgcgagaaggctttgagccttgggaatatccacttagtgccttgcgcgccttgtgtcgcgagtgtcacatacggcgagagaaagcggagattcggcttcgcgcgtttgctgcatctctgacgagccaagaactcgacgcgctgcgccccgcaatcagtcacgccatctattggcaccaaacaaaggcggtgttctcgtcgctctccgctttggggccagaagagcgacaccttcaggcagcgctggagattctcagaaacggccgcaacgatcctgaccgctga

SEQ ID NO: 528853 - DNA, 1884 bp, Stenotrophomonas maltophilia
atgttctcgccatccgtaacgttcttgtatggcccggtgggaactgggaaatcaaccgttgcacgtctcatcgactactgcctcggcggggagctggagcgcacaccagccgtccagaaggaatttgtctcagcacaattgttcgcggattttgatgtccacacatgcacgtttgagcggtcagcaacagacactcagtacgtacgtgtctcctggtcagttggcgacaatgagatcgagtcgataaatgccccgctcgaggccgatgccgccacgcccatccttggggacagcgtgtacaatcttagcgacttgctattccatctgtgcggcgtaactcccattaaggtgcgtaagcgaatgcgagacccggactctccgatgatccggctcagcttccgcgacatttggtggtactgctaccttgatcagacccatttggactcgtcattcttcagaatggaggatccgttccgaagtcgcaagagccaggatgccatgcgtttctttacggggcttcattccgaacgacttagcgaactagaaacggagctgtaccgcgcgatcgaccagcagaagggaaagcgcgaggccgcacatcagatccgtgagttcatggatcggttcgagttgggctccgagctcgacgtcgaaagccgcatcgagaatgccagacgggagctttccgagagcgagagccgcaggagcaagctggagcgcgagcgtctagaaattatccatccgacagatcccaagcgcacgaagttgcgggaaatgagcgaggagctttctgatcttggcgcagcgatcaaggaaaccgaaattgccatttctgagcagcgcgcgttacgggccgagctgatcacagccaaagtaaaggccgaccgtacggagcaagcaggcaagctccttgacggcgtcagctacatgcgctgtcccgattgctcaaccgatatctctctgcggcaggtcgaaacgggcaaatgcaggctgtgctgctcggagacagagcttaacggccctatggatagcttggaacttgaagctgctcgccgcgagttgaatgatcgcatcgatcagctcaacgactccattcaacgacgagagcgagcactggcgcaatcaattcgaaatttcaatatactcagagccgagaagatcgaccttgaccgcgttttgcagcaagagctctcccactacgactccgccttcatcgagagcgttcgctctctggaccgtgagaatgcgacgttgactgagcgcatccgttcactcgagaagctcagaaagatgccggaatcaatcagcgagctagaagatcaggcggcccaacttcagggtaagatcgaccgtctgagggcggccatcgaactggagggtaagcacttgcagaatgccgatgagaatgcagccgccattgccattaatttcaaggcagtcatgttgtccgtcggctttccaggggtttccgaagaagatgaagtcattgtcgatccgcgctcatggcgccccgttatcctgcacgatgatcaggaatggactttctgggaagcagggagtggtggcaagaagacgctcttcaatgtttgctacgcattggctgtccacgaaacagctagggaccgcaatttgcctgtgccgaatgtcttgatcatcgacagccctaccaagaacatcagcgaagacatgaatcccgacttggtcaaatcgctgtatcgagaaatctatcgtcttgcgtctggcgccggcgacaaggctatccagttcctgctcatcgactccgacgtagtggagcctgaggaatatcttccaaactttctgcaaagggggatggccggagttgagggtgctccgagtctgatcccttactacgagggaccgtag

SEQ ID NO: 528854 - DNA, 549 bp, Stenotrophomonas maltophilia
atggacatcgttaaagcagtcgccgcccttgacgctgccccgggattgcatttagcaagaatcctcttattgttaaatgccttttctaaagaagatgatgaaggttcgatagagggactgacgaagctcgccaagctggactttctcctgcgctacccggtgatgctcgacagggcacttcaggcaaaggggaagagcacgagagaggttcagttggaagatcacgagcggcagagcgtggaatccgagatggttcgataccgatttgggccttgggaccatcgttaccgcgaattcctgaacattctgatagccaaaaatcttgttgcggtgtctatcgaaggcagaaaggtagtgatactactgaccaagaacggtcgggagatcgcacgccagcttgcggaggaccccttgttcgagccctacgcgcgaaggtcagcactactgaagcgaaacttcgatttgacaggcactaacctgatgcgcttcatctatcagactttcccagaaatcgtttcgcttcgttcaaacaaggccatccccacgtga

SEQ ID NO: 528855 - DNA, 1248 bp, Stenotrophomonas maltophilia
atgtcgacaaaggattctgcaaatcccgcgccggatcaagttcttgcatctcatgatccgggcgatgaaacggcgcggcgatacaggtttcagtacacttgggcagcaatagactgctgcatgctcttggatgaaacacaagatgtcgttgaggttttctgcgagcatcatgaagatatcttaatcaagcatcgcaataacaccttcaccggcgagcaggtaaagactcgagaatcgaatcagcccatctggaaagcgagcgacccgcaagtaatgggcgcatttgcgcgctttgcccaaatggaagatcaataccccgatcatttttgtgcctaccgattcctcaccaaccatcccctctacgtggcgaagaacgcccagtcactcggatacatcatcgcgacgattgccaaagcgcaagcgctttcggatctcccatccaacgcaagcacatgggtcaagcgcatcgcgcgcgacgcaaaagttacggaatccgtggcatttcaagcgctaaagaagtgctcggcgacagataagctacccaagctgacggactcacacatgcgccttatccaaaccttggttgagtgttggccgacagcttctgattgtgtacacacatctgtctcacgtgccgctcattccttaatcgatgagtgcgcgagagcatcatcccttgatcatgagcaactgcttcccgcttatataatttcaaatgaagcacaagaagtcaaagtcctatcacgcatcaatggcaagcgcattaccgttgatcgcctattggctattctcgacgatgaaataaacgcccctgccccattgtctggcgagccctcaaagtggatcgagcctggacagggcagcaccgacttgatgttcaagaagcttgatgcgggcggattctcggctgtctcccggagttcggcggagaacttacgggataaagccgattacctcggaattacgtggacgaagaagctaggtcgcgacaaaggacttgagcgatacgaccatatccgatcaatcgctcttaccgacgctgcacgggccttcgaaaataccaagagccatggtgatccatttggacccaccatgcagaaagatctgctagagcgcttccagaagcgtaaagcgcaaggcgaacaactgttcgattgcagcattgagcaccttgagggattcacctattcactcacctctcagtgcaaggtgcagtggagcattgacaggccttgggaagatgattga

SEQ ID NO: 528856 - DNA, 1716 bp, Stenotrophomonas maltophilia
gtgagacgatttgaccagaaggaatttcgtgccatcgcctgggcggccgagccggacaaagccgcctggttgctggatgccgagggcgccattgagttcctgaagagtaacgcgacttgcgaggagctggtgatctacgccagcgcgggcgcggtgctgatccatggggtcctggccccgacggcgcaggttactccggcagatcagaccgacctgctcggtgcgcacgtgatgtcagacgacagttggtgcatccagaagtcatggggtggagggcaggggcacaggatctatctcgaaccgccactgacgcatccgggatgcaagtcgctggtcggaggcgagaagctgatcttccgccgctcgttcacaggtgtggataccggcccagcacctatcgaactgagccagaagctggtgcacagcctagaactatactgggtgcccgagcgtagcgcttactcgcgcctcgatagtaagggagatattgaagacgtaatcagggtgatctggctcaaagccccggaatcggaaaccggcgcggttgttgtgacgatgctgatcaaggaactggcgacctacatggcgttgtcggacctgtcgctggtcatcaagttcgatttcactcgattcgatcccgataacttcgctggatgggcgcaggatcgccaatcgagccgcaagctgggccccgatctgttttacagcgccggccgctcgacaaatgcgagctatgccaacggttgcatgatcctgagagcggccgtcactgtggatgaattgattcagcagtggaaagaggaagaggacccgacaacgaagcagtatgcgacgttcaagatccaggactggaagaatcagcgcagtgtcgagacctcctgcgcgccagagttcttgtccaactacttcactcagtccgataagccctatgaaatctcgcccgtcttcttccgacccgatgtactggctcgtttcaagaacgatccggagaagtacgacttgaccgaccgcaccatcagctgtcgcaacgcctggtacctcaaaacgtacgacatcaacgaagcaggccaagtgcacacctatatcggctatctggctgacttgccttacgaagagcagttgtactggcggtccttcaacgagtggcccaaggcgccaatttcgaagcgggcgttggagaacgatttccaaggccagttcagtagtgaatacgacccgctgcagatgctcaagtacaagatccggcaactcgacgaggcgccgccgccgtggtggaagccacgcggaagcgagctttcggatgcggctcggtatcccgcgaccgactcggtatcggagtggggcgatgagatcctcgcgctagaccagcttctggtggagggcttcctgcaaaggccgctgcagaagcttgctgccgaagctggacgcatgatcgacaaacagtggcaatccctgcggctgttgcaggactatctggaagcccaaggctgtaacgcagaggaggcgaaggtggtgatggagcctcttgcccggctgcacaagctgcgtagcgttctgaagggccatggggcgccatccgagcgcacggccgcgtccaagcaggcgcgtactgaacatggcacgttgcgtgcgcacttcacagcgctggcaggggaatgcgacacagccttcataaggatcctcaccatcttcggtgtcgctatcaagctcgattga

SEQ ID NO: 528857 - DNA, 369 bp, Stenotrophomonas maltophilia
atgaaaaatctagacgacctcctaggggggggcaggggcaacgagccgacgttcagcaccatgtcggacgtctcggagcagattggagagcgccttcgacgccagcgcgtggctttcgagtggcgtcagtcggatgtcgcgaagcgagcaggcgtgtccgtgcaaaccgtaaaggcgatggagaagggtgaccctatctcgggtgagagccttttccgcttgctgcttgcgtttgggcatggcccggacctcctcagggtgcttgaatccccccactttccaaacctcaacgctcacaaacgctacgtggaaaatgccagttcggccgcttcgcttcagaagcgggtcaggagcaaggtgggggcatga

SEQ ID NO: 528858 - DNA, 1287 bp, Stenotrophomonas maltophilia
atgattctcgaaaccgcctggctggagtctccggtccatcgattggaggtttggacccatcacctgccgctgccggtactggtgggtcacctgaactacgaggtgcgtgctggacggagcttttttgagtggagccatcaggcaattcagctgggtatcaatctgtctccgctcaagctgccgaccggtgccggcgtctggtctagcgagcaacagcccaaccttccattggattacgaggggttgccaggcctgttgaacgacgcccttccagatggctgggggcgctatctaatggacaaggccatggcccggcggcggattgacccgcagtacatctcgccagctgctcgattggctttcattgccgatcgggcctggggcgccttgagcttccgcccggccatggaggaggaggtcgaaggggaggtgtccctggtggctttgagtgaggaggtggaggctgcaatcgaagggatgctggacgacgtctccaacgagttgctgaccgccggcagttctccccaaggcgctcgaccgaagctcatgctcgatctggatgccggcatgaagcaagctcgcacgagctcccgaaccccttcgcctggctacgcctcttggctgatcaagtttgcggcgcgtgatgagccgcttgatgcgccgatactggaacaggcctgcatggaatgcgctagggaggcgggaatcgcggtgatggatagcagtttgctggacatcaatggtcagatcgcgtttgccacgcgacgcttcgaccgcgcggggccgcatcccaccttctgccacacccttggagggttgatgcacttctcgcacagacagatcggcctggactacgtcaacatcgcgcaggtcatgacgcgtctaggcatgtccggagcggcattcaagcaggcctacagccgggcggtctttaatgccgtcatgagtgttcgcgatgatcatgcgaagaactttgccttcatccttgatggagggcagcagtgggggctatcgccggcctatgacttgacctacatgcaggggccgggcggctatcacaccctgacatttgcgggtggggacgcaagggatcccaccaggagcgatcttctgcgcttggccgactcctatgggatcgaagcacccgatgcgtccaggatcatcgatgggatgcttccccaggcggcccgtttcggcgtcctggcaaagcagttcggcgcacggtcaacggtagtcaatcccgtggtcaagcgcctgggcgaaattggcaagggtctgaagcgatga

SEQ ID NO: 528859 - DNA, 762 bp, Stenotrophomonas maltophilia
atgaaaaaccgagacattggagcggagatcgcggccgcgcgagctgcctatcgaccgccaacgcttcacgcgagggtcaatctcttcgctattcgatgttttcgggacacaggagacggggactacattgctgcgcgattggcgatgagagcgaggctgtatccgcagtatctggcggcagccgagcaggcggtcgagaagtatctaaaatgcatccttatgctgaatcgctgcgacacaaagcgccttggccacagactggcggacgcgttcgacgacgttcgaactaagctgtcacttgatttagagctgacagaggtggagcaggagacgttggacaacctcgtccgctgggactttgatcgctatctggttcgctcctaccaagtggaggatagcgagttgggtggcctagatttgctcgtttggcgtctacgacagtattgcgagccccttgacgtggcccactacgctgatgccccgtccgcggtgctcttcaggaagaatgtggctgcgattgccgcccgaagcatcgccacacccaaggtagggcatctccccaacggtgatttggagaaaatcctggcagacaggaatcatcctgccagagaagggctggtgtggcgaaatctccgatttaacaatgccggccgaaagcgcgcacgcgtgtctgcgggctggcgagtcgtgaactcgcctcttgatatgaccgatgatcaggctgttgtggaagacgctaagcgttggatgaagctgggctga

SEQ ID NO: 528860 - DNA, 498 bp, Stenotrophomonas maltophilia
atgagttggcctcaggtcataagtaaaggaaagaaatatgatctttcccacttggaagatttctctagagacatcatcattgaaggcgcgcgaataacgctttcgatatcttttggcccccatgtcttctgcgacgagaaggcaaacggcgatcagatcccatttttggcggctgagcgctatttctgcattgcgcgatacgaagagagctttaacgtagttcaccacatggccaatcgcttcgaagctggccatgtcagggtcttcaagaaaagcaagaaaatcaacggcgactgggtatccgaggaacagatgtatcagacggaactcgaaggcgttgccattttcatgataatccgccaccccgacccgggcgtgcttcatctgaaagtaatatcctcctatccgctcaaaagcatccacaccctgccgaaaggcaagctctacacggtgatggtcgcactcaagcgtaagctggcagacttgcccctcatctga

SEQ ID NO: 528861 - DNA, 789 bp, Stenotrophomonas maltophilia
atgccggcatcgcgattgcgtgcatttctggaactgtcgatcgacggcgccgaacgggcagcttccatcatgcggcgccattcctgcgcttggcaggcggtgagcgacagccacgccaggtcttcaggcagcagctcgcgaccttcgggagtgatcaggcgatcaccgaggaaagaaaaaccggcccaagggccggtcaggtcaatacggtggtgcgggtcgaactcaatcatgccgcgatctcatccttggccggggactgaggacgcaggcaagagccgagccagaggcccagccattgccatgcagagccaacaaaggcccagatttgacgaatacgccatttcgcataatgtatattatgttcaaactcctgagggggtggctggcacggctcttgcctcgccccctgaccctgttgcggcatggagcctgattgtgcgtgatcggaacctaaccggcccttgggccggtttttcgtttaaggctggccgactggtcacacccgaaggccgcgagttgctgcccgaagatctggcctggctgtcgctcactgctgcgcaggcgcaggaatggcgaaggttgatggaggatgcttcgagctcgaagattcgagctcgagatcgccggaaacccttggcgtacaaggctgccgaaattgtagatctccgagatgctgtccggcgacgcaccgaaaagcggttatccggggtgatggctggtcccgacgccgagccacctgtggcagtcctgccggtaccggggccgacacgccgccagcgcgtgtga

SEQ ID NO: 528862 - DNA, 858 bp, Stenotrophomonas maltophilia; identical to SEQ ID NO: 528804

SEQ ID NO: 528863 - DNA, 858 bp, Stenotrophomonas maltophilia
atgtccagcccatcgctgccgtcgaggcagcgatcgcagcagcgggaacagctcgacctgttccgcgcgctgccgggcgacggcatggcgccgcgcgacagccaggacttgatggcctttccgttcttctcgctggcgaagtcgcggcgcacggcgccgatcgacttccgcagcgggaacatcaccatccgcgtggaaggcacggccgagcacggcatcgccacgatatgggatgccgacgttttgatttgggcggcctcgcagatcgtggaggcgcgcgacgcaggcattcgcccgtcgcgctggatacacgccacgccctacgaaatcctgcgcttcatcgggcgcggcacgtccctcaacgactacaagcgcctgaaagccgcgctcgaccggctgcaatcgaccagcgtggccacgtccatccgcgaaaccaccgggcggcgcttgcatcgcttttcgtgggtgaacgaatggcgcgagctggccgacgccagcggcacgccgctgggcatcgaactgatcctgccggactggttctatgccggcgtactcgacgccgccctggtactgaccatcgacccggcctatttccgcttgaagggcggtatcgaacgctggctgtaccgcctggtgcgcaagcacggcgggcggcaggaacacggctggcaattcgacttccggcacctgcaccggaagtccggcagcgcggcgcgcttctcggacttcgcctacgacctgcgcgtgctggtcgcgcggcagtcgctgcccggctacgtcctgggcatcgagccgatgccgggcgaaaggctggaactgctgaccttccggcccgtgccgttcacggcacggggataa

SEQ ID NO: 528864 - DNA, 495 bp, Stenotrophomonas maltophilia
atgtatgacatcgccggcgcaatcgatgcctgggtggcagtggcaggcgtctacggcgccggccaccggggtcagcacggacgcatcattgatggccctgtgggctggttccagtacctcagcaaacacgctgcacgcggcgtttctcactaccagcgttcgatcgacaacgtgccagaggcgtggcagaaaaagaccgggcgggtatggggtaaaggcggagattggccagtgcaggaaaaggtcaggatcaaccttcaggatcagcacggcgacggtgggtggttcgcttatcgacggctcatgcggtcgtggcggttggccaacgccaggtcatcaggggatgcgtaccgcatccggtcagcgcggaagatgctcacctgcaatgacccagtccgcgcccgcctgatcggcttcatggagtggtcgccctacgaggtgcagatggcccttctggccaacgtggctgcccgcgggtactcgatcacctgctga

SEQ ID NO: 528865 - DNA, 468 bp, Stenotrophomonas maltophilia; identical to SEQ ID NO: 515751

SEQ ID NO: 528866 - DNA, 1245 bp, Stenotrophomonas maltophilia
atgcccttcaacattcaggccgagcgggagcgccgcaccgcgctggcaaaggaaacccgcaacctgctggacaccagcaccggtgacggaaacaagtggacgccggagaaccaggccaagtacgacaacaacatcgccgagatcgagcgcatcgacgcggcgatcgagcgtcatcagaaggtcatggacctgacggccgacgaagcactgcgcgagcagggtgtgcgtgaacacgacaccgccaaccgcagcggccgggagctgtccaacgagatgcgcctgttcgaccgctgggcacgcggcggtgacagcgccctgagcgctgaggactggaagcaggtcaacgccgccatgtcgggcaatccggccgtcaacccggaacagggtggctacaccgtgccgaccacgctggccgagcagattctggaggctctgaaagcgttcggtggcatgcgccaggtggctgacgtgttcagcacggccggcggcgagccgatgcagtacccgaccagcgatggcacctcggaagagggtgagctggtcgccgagaaccagtcggcgaccgatcaggacgtggccttcggcaccaagggcctgcaggtctacaagttcagctccaaggtggtcaccgtgccgtgggagctgctgcaggacagcaccgccgatatcgccggattcattgagaagcgtctgcagacccgcctgggccgtgtcaccaatcgcaactacaccgtcggcaccggcgtgggtcagcccatgggcgctttcaccgcagcggccgttggcaagatcggtgcggtttcggcgctgccgatcatcacctacgacgacctggtcgacctggagcacagcgtcgacccggcgtatcgccagctggccaagtggatgttccacgacgacatgctgaagctgatccgcaaggtgaaggacgaccagggccggccgatcttcgtgccgggctacgagcagggcaatccgggcggtgcgccggatcgtctgctgaatcgcgacatccagatcaaccagcacgccccggccccggcagcaggcgccacctcgatcgcgttcggcgacttcagctactacaagatccgcgacgtgatggcagtgaccctgttccgcttcaacgactcggcctatgtgaagaagggccaggtgggcttcatggcctggatgcgctccggcggcaacctggtcgacgtgggcggcgcggtgaagaccttcaagcacggcgctgcggcttaa

SEQ ID NO: 528867 - DNA, 630 bp, Stenotrophomonas maltophilia
atgtcgtactcgcttcccccgctcccctacgcctgcgacgcccttgagccgcatttcgatgcgcgcacgatggagatccaccacagcaagcaccaccagacctacgtcaacaacctcaacgccgccatcgagcaggctggcatcgccgagcagccggtcgaggcgctgatcgccaacctggatgccgtgcccgaggcccagcgtggcgcggtccgcaacaacggcggtggccacgccaaccacagcctgttctggaccgtactcagcccccacggtggtgcacccgatgatgagctggccgccgccatcgaccgcgatcttggcggcttcgatgccttcaaggacgccttcaccaaggcggcgcagacccgcttcggcagcggctgggcctggctgaccagcgatcgcgatggccgcctgcaggtggaaagcagcgccaaccaggacagcccgttgatgggtgcagccgtgggcctgtcgggcaacaccccgatcctcgcactggatgtctgggaacacgcctactacctgcactaccagaaccgtcgcccggactacatcggtgcgttcttcaacatcatcaactgggccgaggtcggccggcgctaccgccaggccaaggcctcatga

SEQ ID NO: 528868 - DNA, 387 bp, Stenotrophomonas maltophilia
atgatcggtgaaaccaccaagtcgaccagctggggcagtggcatcgagagcatgggcatcggcttcgtgaagtacacgctgggcccgcacctgaagcggatcaaggacgagttgaaccgcaagctgttccgcacgccgcgctacttcgttgagcacaacgtggacatgttcatggccggcgactcgaagacgcaggccgagtacttcagcaaggcgttgggtggccctggcacgcaaggctggatggtcgtcaacgaagtccgccgcctcaagaacctgcctcccatcgagggcggcgacaagctctaccaaccgaaagaacccgcgccaccggccaagccgggcggagatgaccctgaaaggaaccctgacgatgccgattcctaa

SEQ ID NO: 528869 - DNA, 210 bp, Stenotrophomonas maltophilia
atgcggatcaagacgaacgacgcgaaaggactgccgctgcaacatctcggcctgcagtgccagtcgcacaaagacctgggaattcaatctggcgacatgatcgagccagagttctatcttccacatctcatccgctcgacctcattcatgacttgcttgtctaatgaaccgaactcgtccggaattgtcttctccgtgaagaaggaataa

SEQ ID NO: 528870 - DNA, 639 bp, Stenotrophomonas maltophilia
atgactattgccctcaaccgagttgcagcaactagattctttgtatgtgtcgtggcagctcttgggtccgggtgtgtggattcgcccacttcatatcgtgtcgatggtgcgaagaccgacttctgcattcctagcgatatagatgcaacaccttcccggcggggccatcaggatcctgtggctggtggctttacgctgcatggctgttactccacccatagcaaggcttgtattggccccgataacttgatctcggtagcagtggtggccaaatcgtactttcctgggagaaggttcggcgacctcccccaaggatcccatctgcgtacgagcgctattgaaggctggcaggaagcgaaggtactgcagaagggattgcttgccgttcccgacggcggcgacaagagccacatttacatatggagctcaagagcgcgtggcgccacacagcccatggatgacgatgagctaatggcatcctgcgacacgttgggcagtgtttcctgcagtcgtgtgctccatggggacgactttggtgtcacttattccttcttcacggagaagacaattccggacgagttcggttcattagacaagcaagtcatgaatgaggtcgagcggatgagatgtggaagatag

SEQ ID NO: 528871 - DNA, 933 bp, Stenotrophomonas maltophilia
atgaatcgagccagcgtagctacccgacacttgatctcgctgatgctgatctgtgggccgctcagccctgatgtgcatgcacagacgatagtcacgtacgtacacaccgatgctttgggaaccccagtggcagagacggacgcatctggaaatctgatagctgaatcattctatgacccatacggggccattctcgttgcaggtagcgatgatcagccaggcttcaccggccaggtgtcagatgcgcagacgggactcaactacatgcagcagcgctactatgatccgacaatcgggcgctttctatcggtcgaccccgtggctgctcgaccacgcggggacaatttcaatcgctattggtacgccaacagcaatccctacacaaaccgggatcccgacggtcgcgagtgtagcggcaagggctgctgggtcaccgttgaggaaagagcggccgccgtgtcgggcgattggaaggcgtattatcagttggcgggatcgggtggcgataaatacgcggtacgcgcaggcgaagtggctagcaacagtggtgccacccctctgaatggtcggctttcagagattactaacagaattctcgcagattctattgctagaaacatgggcgccgactccaggactatgacaagcacgcaggcaattgcggtcgcgttcaagatggaagccataaggattgatcttgcgaaagcgcatgtgcaggcgctggatcaggcaggcgcaaccgagaagaacccggtgatgttagacaggagtgtcatcggagaattccacgagcgagtctttgagagaaatggagctgatcccaaagcatttggcggatacaagacggatgctctggagaccgtaatcaatgttcttggcgcaacgacgcgagatgtatatgactattgccctcaaccgagttgcagcaactag

SEQ ID NO: 528872 - DNA, 753 bp, Stenotrophomonas maltophilia
ttggccaacacttccgacatccagcctgagatcgtccatggcgacacgcaggcccaaagctatccggtcttcggcctggcccacatgctgggcatccagctgatgccccggatccggaacatcaaggacctgacattctttcggcccgaaccgggtagggcttataagaacatccaggcactgttcggggacagcatcgactggcaactgatcgccacccatctccacgacatgctgcgggtggtgatctcaatccgattgggcaagatcaccgcgtcctcgatcctgcgccggctgggcacctacagccggaagaacaagctgtacttcgccttccgggaacttggcaaggccgttcgaacgctgttcttgctgcgctacattgatgacaatgagatccgcaaaacgatccatgctgccaccaacaagagcgaggaatacaacggcttcgtgaaatgggtgttctttggcagccaggggatcattgctgagaacgtccaacacgagcagcgcaagatcatcaagtacagccagctggtggccaacatgatcatcctccacaacgtggaaggcatgagccggaccttggccgagatgaggaaggaggggattgaactgacgcccgagatcctggccggcctgtcgccttatcggaccagccacatcaatcgcttcggcgactaccacctggatcttgaaagggaagtggcgccgctgagctacacagccaaggtgcttgaacagaccccatag

SEQ ID NO: 528873 - DNA, 315 bp, Stenotrophomonas maltophilia
atggcactgccggcgccggagggcaaatcggccctgcagctgcgcctgcgcatggtgctgaccccgtttgcccgcacgggccgcggcgcggccaaggcccgaggccgaattgaagagatctgcttggccccgttccaggctgtgcgcctgaacaccgccagcagcgagtaccagttgactgctcccaccgatcccgaaagggatctggatgaaatcctggccacgttgctcgatggcatgcaccgcatggccgatacgcaccagtgcttcctggaagcgtcgctcagtacagacgacggccggcactgggactga

SEQ ID NO: 528874 - DNA, 384 bp, Stenotrophomonas maltophilia
atgaccgatgacgaaaaggcgattcggcaagtcgtcgagacctggatgacagcgagccagagtggcgacctggcaaccgttcttgcgttgatgaccgacgatgtggttttcacggtgcctggacaggagccattcggcaaggaggcttttgccgcagcgtcttccagcatgggcgatacccggatagagggtacgaatcagatcgtcgagctggagacgcatggaagctgggcattcatccgcaacaagatcgacatgacggtcacgccgcccggcggcggctccatccgtcgatcggggtacacgctcacgctgttgcgcaaggagtccgatggcaagtggcgcgtggcacgcgatgccaaccttctgacgacacatagctga

SEQ ID NO: 528875 - DNA, 210 bp, Stenotrophomonas maltophilia
atgacccgcacaactaccagccgcccacgcatggcggcgatctacgctcccggcacagtacgcgcccgccgctggcacggcgatggcgacgtgcgcggctaccgcccgccctcgggctggtcagcccgcgccgacctgaccgacattcaccccatcacgggccgcgccttgccgcgtgccgtgtggtgggtcatcgagacgaaggaataa

SEQ ID NO: 528876 - DNA, 294 bp, Stenotrophomonas maltophilia
atgcagaagcgttccgttcagcccggccgaccggctggcaccgccacctatgacgccgagttggcccgtgccttcggtgcagcactgcgtgctctgcggaaggagcgcggcatcgcgcaggaatcgcttgggtacatggccggcgtggagcgttcgcacattggcaagatcgagcgcggcgagcacatgcccacgctcgcgctcatcttcaagatcgccggcgcgctcgaatgcagcacggcggtactgatgagcgaggctgaaagccagctcgcagcagcggcccagccgtag

SEQ ID NO: 528877 - DNA, 348 bp, Stenotrophomonas maltophilia
atgaacctgctcatcaccgaggacgaccggacgcggctactggcccacggggaggtccgcgccgctggccgggccttcgacccggtgcccgtggtacggctgttcacgccggacgcacatgtgacctggctgctggccgcgctcgaccccgctgatggcgacaccgcctggggcctcattgacctgggtatcgggatgccggtacaaggcaccgtcaagctgtccgacctggccggcatcgtcgggccgctcaagcggcccgtactgcgcgacctctatttccggcctacgcgcacgctgtcggagtacacccgcctggccgagcaggacggggccatcccggactga

SEQ ID NO: 528878 - DNA, 705 bp, Stenotrophomonas maltophilia
atgaccaaaccgcgccggagcacccgtaccgacggcgagctgacccgtacccgcatccttgaggccgccgggccgttgttcgctgcaaccggatatgcggaaaccaccagcaaggccatcgctgcggaagccagcgtggaccttgcttcaatcaactaccatttcggcagtcgcagcggcctctatcaggccgttctgattgaggctcaccggcggatcatcagcttcgacgatctacaacagatcgtcgaaggtgcgcttcccgcgcgtgagaagctgaagtggtgcatcgacagcctggtcgaagccgcagcaggaaacgatggctggcacgcgcggctcttcgcgcgcgagttgctggcgccttcgtcgaatctgcgcatcctcttcgaagagacgctagaaccgaagttcgtcgtcatccgccgcatcctgagcgaggtcacgggaattcccgaaggcgacccggcgctgctgcgctgcatgatcaacatcgccgcaccctgcctgatgctgctggtcgccggcaacggcggactgcccggccccccgcagcaggtcctgcggatgccacggcaagagctgacgtcacacctgcacatcttcgcgcttgcaggactggaggcgattggccgcgaatatgccgaacgtaccgcgaaagctcgtgcatcgcccgcaaagcgacgcaaggctcgtgggacttga

SEQ ID NO: 528879 - DNA, 261 bp, Stenotrophomonas maltophilia
atgtcgcccatcaaatccaccagtaattttcatatcaaccctcaaagaatcgcagggcaaaagccctgcgatccagctaactatttaccaagccatctgataaaactgataacccgcataaccagcaccagcgataccaacgccggcaacaaaacctttaccaaacgcgattccaatcccaatgacgaccggcacaactgcaccgtcgacgctctcaatttcaagaccggtcaattcacgcacatcattctcccgctttga

SEQ ID NO: 528880 - DNA, 312 bp, Stenotrophomonas maltophilia
gtgcgcatcctgctgcgatctgacaatggcttggtgttcagcggccgcgactacacgcgactgatgcgcagctatggctcgaagcaggagttcatcacgccacactgcccgcaacagaacggattgatggagcgagtgatccgaacgctggaagagcaatgcgtgcactggcatcgtttcgaaagccagatgcacgctacacggttaatcactgactgcatcgccttcgacgaccaacagcgcactcatcagtgcgctgaagatgatgaccgcagatgcggcctataccgctacattaaccccatgacctga

SEQ ID NO: 528881 - DNA, 330 bp, Stenotrophomonas maltophilia
atggagttgtactggcgcttgttcaccaattgcacatcgcagcaggcggctctcaaggtcgcggcgcggatgtttgagcaagcaggtcttgaaatcagcaatctccaggccgagccatatcacaagggtagcttcatggtgagtgcctgctcccgtcatgccgcgcaatcgtggcctgaatttgtggttcttgccctggcttcggctcagtccaccggccgcggatggctcctgagtggctcaattgcagaagagctggatgcttggtccaatcattccttggtttccggtgtttcgtctatccatatccatgcggaaaggcaggagtga

SEQ ID NO: 528882 - DNA, 1824 bp, Stenotrophomonas maltophilia
atgagtagctttgatccgttgaaggatcttagagtggggcacatcgttgaggtgtccggcacgacggtcagaatcgagctggacggtgacgtaacagagttgacccgaacattcgcgggacgggtatacccaataggacagatgggaagtgtcgttaagattcacttcggtcgaaatcttgttttcggtttcgtaaccctgcttcgcatgcgatctgaggagttgatcgagcaaggtaaggttattccgcccgaggctgatcaacgaatcatggaggtcgagttgtttgccgaaggagtatggcaagcgcaagcgtcgagattgaagttcaagcgaggtatatccacctaccctctgcctcgtcaaggcgtttacttgttgacgcttgatgaggctacttcgctttatgaagctgctgaaggggctagcgctgaggagttcgatccattggtcccgttcggtacgtatgttggagccgacgggacggtctgtcgagcaaacatcgaccgcatgttcagtatgcattgtgcggtgcttggctctaccggttcaggcaaatccggtgcggtagcagcgctactgcatggcgtacttgagcacaatgccgtagaggggcggccttgtcggcccagggtgataatgattgatcctcatggggagtatggctctgcgtttcgggatcgtgcggtgctatatcgagcgtatgacccaatcaatgctggcgaggctgatggtgttttggtggatttgccttactggctcatgtcatcagatgagttccggatgcttgtaatagggaagacggagcaagaggcgacaagtcagaacaacattattttcaaagcgttgacacacgctcgtatggttgttgaagggcttgtggatccctcgccctccacgttcgctgcggtaaccgatggtttggagccggatgcaccgaggccggcgcagggcgtatcgcaagcccagttggacgcatttgacagtgacaagcctcgcccgttctcgcttgatgagttctttaaccacatcaagtttcgccaagctgtgaaagctaacggagacccgatatccgcgacggactttaacgcaaagtacaaatcaattttggacaagctgggggtgctgaggcgggatccccgcatccacttcatgatgaagagttgggtgggtggttcggcgagtcttgcggagattcttggtcaatttgttggggatgtggaaaactctgagcatgacttaagaatcttggatatctctggtcttcccaatgaggttgctggtccgttaacggcagcgctcgctcgactgcttttccgttacaaggtctaccagacacccttggagcgagagcgcgatccggttcttcttgtctgtgaagaggcccaccgatatgtgccagatcgaggtgaggctgagtacgccgcagctcagtctgctatacgaagaattgcaagggaaggtcgcaaatatggtctaggattaatgttggttagtcagcgcccggctgacgttgacagtactgtgatagctcagtgtggaacatggctggtgctgcggctgacaaatcatgcggatcaacaacacgtttctcgcttcttgccagacggcctctctggaatgaccaaatcgctcccaaatttgggtcaacaagaggctatatttgtaggggagggggcggcgctgcctgctagggtaagggtgcgagacctttcggaagaccgattgccacactctaagaatgcgttgtttgcaaaaggatggtcactccagaggcttaccagggaagagctagatgccgtggctgttcgaatggcagggtga

SEQ ID NO: 528883 - DNA, 1170 bp, Stenotrophomonas maltophilia
atggctaaaggatcagttgatcttgttgagcaagtagatcgtcattttgatagcagtaaccaagcttggctactaggggcgggtatcagcttcgatgccggattacctctaatggcaggtctgacagcgcaggtgcggagtttgagtcaaggccagccacatcaggggttgattgatgcggtagttgatgagttgccggcgagtgcgcacattgagcatgtgctaagtcagctgggagactactcagcgatagctgctcgggttgcgactaacagcgttgcaatcggaggccgggattactcgttgaatgaccttcagcatgcccacgaagcagtcacgaacgccatcgccgagactattcgttggggttacgtggcggcgaatggtgaggtgcccgcgctggtagggagccgtggttcgtcgctgacgaaagttgagcatcattcggcgtttgtgcgtgcgatcttcgaaaagcggcatgctggcctttgggataggcggcgaccgatccatttctttacgacaaattacgacactttgttggaggatgctctttcgctcggaaagtactcccattgggatggatttcatggaggggcggttgcatatcggagtcataagtacggtgcatctccaaaattcgaggggatgcgagcagcagtagtcaagctccacggctctatcgattgggtgttgggagaagagggttccgtgtggcgagtgcgggacgctgacacctatcctgcgcatcgtggccgcgttctaatccacccgcagtcaactaagtatgtgtctactcagaaggatccatttgcggcccaattcgatatttttcgaagggtcctgggtggcccggacgagctcgtgcttggagtggtgggctacagcttcggtgatgaccatgtaaacgaagagcttgatcgcgcgctttctgctcccggtggcaagatcacgttgattgccttctgtcgagagaatgatgctttgcccgcttgcttgcgaacatggcttgcgtcgcgacatggtgacagcgtctttgttcttacggagaaggcgattcactggggcggtagggagccagctcacgtcaaagtccagggcgagcatgggtggtggaccttcaatggagttacatcgttccttcagaatggaggccattcacatgagtag

SEQ ID NO: 528884 - DNA, 747 bp, Stenotrophomonas maltophilia
atgattcagaacactagaaacaacagcgcttcgcgaattcaccgtcgaatgcagaggtggaatgaaatagatccgaacaaagccgccctatcgggatggcagcatgtactggaaatcgaaccaagaaaaggagctcgcggatacattcaagcgtccgagcggattctcattcttgtcgatgaactcgacatactacgtgacaagctgcagctactaggattttccagcaacgcctatggtccggccttcgccaaacttgacaatgctctgtcaccccagcatctcctcaacccaagtgggaatatccgacaatatttgagcgaggacgttttcgcagtccttatattctgtagtgaggttctgccggatgaagaggacggcatcgcacttgaagaatttgctgaaattgttagtattatcaatgatttagagctactccttgcagacaactcattcccatcagagttgaaggcagttctgcggcgccatatacggcttgctgaaacggcactagcagactatccattgagaggcgcgtccgcaatcaaggaagctgttaaatctgctacaggcgacatattcttcagcgagtctgaagtatcgaagcttcagcccgatcaacgaaattcgcttagcgcactttggcggaagatgaacgccgtggcagacaaagtgataaaggttgacaacatcattcaaatcagtggacgcgcagtgaccttccttgagaatttcgcaaaagattga

SEQ ID NO: 528885 - DNA, 642 bp, Stenotrophomonas maltophilia
atggacgtctttcttagtgtcggcgggactgcaaatgaactgcaagagtcctttgtacaagcggtcgaagctcgcctccgcagcgaaggcctgacgcccaaaacggtaggaagaagccacttcagctcagacgccccacttaaagctgtaaatgaccttcttgacaagtgcgcaggaactatcgtaatcgccctggaaagaatatatatacagcagggtttagagcgcaggtccggccccagtgaaaagccgctttctggcgtaagcttaacgacgccatggaatcaaatagaagctgctttatcgtatagccgagcacgcccccttctcgtcatcgtggccaacgagatacgtcccgaaggtcttctagaagcgggctacgactggtacgtacagcgcctggaccccaagcctgagtcactaaacacggtggaattcaatggaatcctcgccgactggaaaagaaaactaaacgaagctcaacacaacgcaataataacaaaacccagactggcgactatgagcataggcgacatcatttcacagctcaaaccttctgagctcgcaaagatcatcgggtccattgttgcgttcacaaccgcgatattcgccctcggcgcctgggcagtcacactaacttag

SEQ ID NO: 528886 - DNA, 882 bp, Stenotrophomonas maltophilia
atgggacacgagttgtggacatcaccggtcacgggctatcgccgtcacggcacgcggctgaatgactttaacgatgttcttgggtgcaggtccatggtgagtgacatctgcgagccactgaaatgttgcccggctggcgcgcccgcagatgaaatgcgcgtggagctcgagagacttgactttaccgtcgctggtgtaaaagaccttgagtcgggaccggtgattggtttcgttgaacgagattcccttactcacggtaaggtccgcgatcacctttgccctctatcaatggcagctgcaattccaaacaccactaatgtcgtatgtcttctgcagcaattgcagagaagtccattcgtatttgtggagaacgactcggttgtggacgcgatactgacttgggcggatatcaacaagcccattgttcgcatctacatcttcggcctaatttcgctgcttgaaatgcacctcagcttttgggtcgcttctacatatagagatgatcaatggaaagccgtacttagggatcgaagagtcttggctgcggtagcggtgcaggaggggcggagaagatttggtcaagtgctgccgctgattcagtgtcttcagttatgtgataagcgagatcttgttttgcaatccgaagcccttaggcagctattcgggttgagttcgaagaattcaggggaaaagttcttcaaaagcgtcgaggcgcttagaaattcgcttgcacacagtcagtacgatatcgtagttgggggtgcatggggtgagatgctaagcctaattacccgaattcaggcggcggtgcagctatccgatctacatgtggagaatggtgctatgcagagttcggcaaggttctcaagcctcctttggtga

SEQ ID NO: 528887 - DNA, 4923 bp, Stenotrophomonas maltophilia
atgaaccatatctatcgtcgtatctggagcacagcgaagcagtgctgggtggttggcagtgaactggcacgcacgacggggaagggcacttctggacggcgtgccactgtactgatggggtgcctgatttcactgtcattcgcggctggttccgctgagctggattcagacggggagcagttggatctggttgaaaccacacagactctcgctttcgcagaacctgcccaagaggcgccaactgtgggcatggctccaatgtcggcgcgtgcgggccaaaacgcaattgagcttggctatctggcaagcgcaagtggaactggtggtattgctattgggcttagagcgaagagcaacgaagcctggagtgtggccgtgggctcggacagtcacgcggcggccacgaactctgtggcggtgggagactcggccaaggcgactgcgcgtgctgcgattgctttgggcaagagcgccaggtcactcggtgagggcgatattgccattggtggagcagcgcagacagtgggagttgatgctggtatttcacgaattgcgatcggtgcaggggctaaggctggaactcaaggccgcactggggcagtcgctttggggggcgcgtccacggccgagttcgatggtgtttccattggctacaactccaaagcgtcaaaggcaggggcagtggcgttaggagtgcattccatagccgatgagatgaacacggtatcggtgggcaacaagaccatgaagcgccgtatcgtcaaccttgatgacgcccgcttgaccagttccagtaccgatgcagtgaccggcaagcagctctacgcaaccgagcagaagatcggatcattgaatggcatgctgaaggcgggttcgcacaccgatgccttcgtaattgggacaggctctgtgtccgcctcggccaacacggtgtctgttggcagcgcaagcaagaagcgccgcatccagtatcttgccgacggcgtgattggtgccggcagcacggatgccatgacgggtaaccagctgcatgccaccaacacgaaggtggcggctgtcgagaaaactgccaatgccgcgaagacggatcttgtagcggtgcgcgaaatcgcgcagaaggccgccaatcgtattgacgcggccacgctggccctgggcaagggggccactgcagagaacggcagctacggcgtcagcaccgcactcggcaacaacgcaaaggcgtacaacggccgcagcgtagcgctgggcgacgacgcgcgcgctggtgtggatgcggacggcaacaaggtggcgaaccagaacgcgggcgtctcggtcggtgccggaacccgtagcgccaacggcgccgttgcaactggcttccgcgcaaacgcaagcggcaacttctctattgccgtaggcggtgatgccaaggccgaggccgagcacggtacggcggttggttatctgagcaaggccagtgccggccaggccactgcactggggcgtggtagcgaagccactgcgcagtacgccactgccctcggcaatctggccaaggcaacaacaaccagtgctgtggccctgggtgatcgcgctcaagccaagcatgacaacgcagtagcactgggtgcaggctcggtgactgcctcgtccgactctgtttccgtggggagcagtagcaagaagcgaagaatccagtacatcgcagatggtgtggttggggccggtagcactgatgcaatcacaggcaatcagttgcacaccaccaaccaggccgtgaccaaagcccagacagcagcagacggcgcgaccaccactgccaatgccgcaaaggtggaatcgggcaaggcgctggccgagacggtcgtgctgggtggcctggtcaaccagaccgctgccaatggcagtgttcgtctgggccagaagaacagtggcacgcagctggacgtgcgcaacagcgccaatgcgaaccgcaggattctgggcgtcgccgacggagccatcaacgcgaccagcaacgaggccgtgaccggcaagcagctccatgaaaccaacgcgaacgtgaatgcggcacagacgacagccagcgcagcgaaggtcagcgcggacaaggcgctggccgacaccggagtgctgaatggccttgtcggtcaagtcgctgtcaacggcaacgttcgtgtcggcgagaagaacagcggcaccatgctggatgttcgcaacagcgcgaacgcgaatcggaagctgagcggtgtggctgatggagtagtcagcgccagcagctatgaggccgtcaacggcaggcagctcaacgccaccaatgacaaggtggctacggtggaggacattgccaggactgcgggcacggaagctgccgtggcaaagggggatgcggccaaggcgctggccgagacagcggcgctgggcgggttggtggcgcaggtatccgcgactggcaatgtgcgcctgggtgagaagaacagcggtacgacgttggatgtgcgcaatagcgccaatgctgaacggaagatcagtggtgttgcagatgggctcttgagcgcaagcagtgccgaggctgtgtctgggaagcagctgtactcaaccaattcacggatatcggctctggaaggtgtgggtcagtttctgagtattggcgaggctcccatcagtgagcctgctgaggcgggagccggaggcgtcgccatcggtaactcagccaaaacaggttctgaaagtgggaccgcagttggcacgcgggccagagcaatgggtaggaattcaactgcgattggaaggggagcgaccgtttttgaggaatccgagaatggatttgcaatgggggcaggtgctgaggtgggagcggcaggcggcggcgcaaacgacggtgttgctattggtgcgggtgcaaagatcggggttggagcgcatgggtcgctggcacttggaagagatgctcaggcaaatgaagctggagttgtatcgtttggcaacagtggtatgcagcgccggatagtgaacattgcacgaggcaccgccgaacacaacgccaccactgtctcccagcttaaggattcattggccaccctcggtggcggagcaggcatgaacgctagcggaaacatcgtcgccccgacctacacgatgcagggcggaacgcagaacaccgtggaggatgcgctgatggcactcgatggcgccgtcatcaccgccggccgtcgcgcagacaaggtggaaggtcagctcagctcgatcttccaggattcaccctcggcccgtgccgacggcataagccagatcgcgctgaatggcgtgaacggcatggtgctgaccaatcttgccgacggtcgagtagccccaggaagccgcgatgccgttacgggcaaccagctgtacgccgcagagcagaagatctcgcagaatcggaatgatctggacgcgatgcgcaaggagcgggagatggggctgcaggcaattcgaaggttggatgcgaacggcccgatcgacttcggtggcgcgcgtttgactggcgtggccgaggggaagctgtcggctgacagttcggacgttgtgcgcggcagtcagctctatgagaccaatagccgtgtgtcggccgtggaaggtatcagccagtacgttagcgtgggtgcagctccaggctatggccctgctcaggctggcccggttggtcttgcagttggaaacttcgccacgaccggcagcgatggaggaactgcagtggggacccatgctaaggcactaggcagaaattccgtcgccattggtcgcgcttcggtcgtgcacgaggattccgatagtggatttgcactaggaactggagcggaggttggcattgctggaggtggtgcgcgaggaggcattgctatcggtgctggagcaaaggtgggcataggagcggatggttcgctggcgattggcgaaggatctcaggcgaatgaggcaggagtggcctcatttggaagtggagctacttatcgtcgtctggtaaacatcgccaacggcatcgccaaccacaacgccgccacggtcggccagctgcgcggtgcgctttccgctctcggcggtgaagtcgatgccaacggcaacatcgtcggcccgcgcttcaacgtccagggccagacacagtccacgttgaatggtgcactggaggcgctggatggtgcggtcgtcaccagcacctcgcgtgtggacaaggtcgaaacccagctccgttccgtcttccaggacactccctcggtccgcgccgacggcgtcaaccagctcaccctcgccggtgccaacggcatggtcatctccaacgtggccaacggcctgatcgcggccggcagccgcgatgcggtcaacggtggccagctgcattcgatgcagcagcagctcaatggccgcatggatgggctggagcagcgcatcgacgatgccccggcaccgcgtgccctggcgtcgtcctcggtgccgaagccgcagaccgatgaaacttcggtggtaccggaaggcaaggattcccagcaggtcgcttcggtaggcgagggcgacaagcccacaccacagccgaaggccaacaaggacgactcgccgaagccgcaggtcgataccgctgagctggagaagatgctggcccgcgccaacgagtacaccgatggggcgatcagcaacttcgagcgccgcctggacaagatggacaagcgcttcaaccgcatggcggcgatgagcagtgcgcagacagcgatggcgatgaacaccgccggcctggccacctacaaccgcctcggtgcgggtgtgggctacagcgagggtgagtcggcgatggcggtgggttaccagcgcgtgctcaacgagaagggctcagccaccttcagcctcaatggggcgttcaccaacagcggtgagcgcagcatgggcgtcggtgtgggcatcggctggtaa

SEQ ID NO: 528888 - DNA, 1224 bp, Stenotrophomonas maltophilia
atgtctaagatcataaggttggcggttctaagtgaccttcatttctcctcgggaaatcagggggtcaacgcaacttatgtaattttggatcgacctgaagttagaaagcaaaatccctaccgtgatctgattgaactcatcgattcagagaacctccgagccgacgttgttctgtgtcctggagatattacttatcaggctgatcagaatgcgctgcgatctgcttgggacgcgctaaataagatagcgggggggctgggagccgcacacctcctgaccgccacaggaaatcatgacatctcgtcccgtgatgtgaaggacgcgagtcccgaggtttgggaatttctaaaagcactgagcccatcctatccttatccttctggatccaaagtgcaatggcttagttattgggcccagcactacatgattgtagaagcgttggatgttcgtttcgtgattttaaattcgtgcaactgtcactcgagaggaggggatgagtggaagcatggtcgcgttactgatttcaccatcgcaacgcttatgcgagagcttggtgatatgccaagatcaggtttaaacgtactactttgtcatcaccatccagcaaagcatccggacctctcccaggcgagcattgactacagcgaaatgacgcaaggtagcaagctcctatccgagttgggcgaacgtgatgaggcttggcttgttattcacggacacaagcatagtcctaggcttgagtatgcccaaagtgggggaagtgaggcgccagtaatattttctgcgggaagcatgagcgctgtgctgccgccaaactattttgcaggtgcagcgaatcagttctacatcatcgagatcgaccttgatgacgtccaggataatggtgttgttggtaaattcgaagtatgggactggcatgaggggcagggctggaatcgctgccgtcaaagtggccgatcaggcgctcgaatatcagatggtgctggatttggatatagagcgaacttgacaggcgttgctcgtgatattacggcaagtattggagggtctccggtaaccaagtggaatgatctggttgcacgtatgccgctactaaaatacttgacgccggttgatcttgaaaaagtcaaggcaaagctaaaggccaatcatgagattgaggttctgacagattctgaaagctggctccctcaggagctgcacagcatgagtaaagtgtcatga

SEQ ID NO: 528889 - DNA, 1809 bp, Stenotrophomonas maltophilia
atgaataatatggttctaggcgaacattacaatgcgcgcgggcttagccctgaaatggttgcaaagaccttcgtgcctcctcctcagttcgatatagtcgctgctcccagtaattcggttctggttggtcctcgtggtagcggtaagacaactctacttaggatgctggatcctagagccgtcacatcctggcaagccgatcagggaaggaataaggtctcatacattgggatatttgttccagtggatgtggcttgggtgagttcacttgtcaatacactcggcccagaccacggggaagatgcgcatctagcgcacctcgcggtctacacattggcagtggcgcgcgcgctgatcgatgtgatgcgctggcgcggaagtgagggaacgcacgatgagtttcgagtgagcatgagcctcgagcaagaaatcactctagctcaggcactgtcggagatattctttaatgaaaggcgtgcgaagacacttctcgagctcaggttgcttatttccagagagctcgtcgccttgccgaggagctggaggcgaggagattcacagcttcgtgagggtctggttagcgggcttgcgaatccgcttgctagcgctgcttcagcgtgcgattcattcaacgtaatttttgagcaacccgatcggaaatgggcaatactctgtgatgagctggagctcgcgccaaaagctgttcaacaaatgctgttttctgggcttagagctgcgccatctccactaattctaaagtattcaattactccgcgtaggcagctgccgcttggagatgaggccgatcgcccactacccgcaaacgactttgatgttatccctcttacctatgcgacaagagaggagggtattcccgagcgagatcgggcaaaattctgcgccgcgctctggagaagcattgttttggagcgtgcgcctgacgttgccgaagccctggagaatccatttaaagtcctggtcggtctatcgaatcagaactttttatcctccactgatgaggcatccgacggccttgaccgaaactttgggggaatctttaggtcgcttgctcagaaggatgcctcgtttgccaattttatggcgaagaagggtgtagatctttcaaacttagatcttgtctctcaatccctaaaggattcggtggtacgaaaggtccgaccgttggtggaaattagagatcaccactttggtgaaagcgacggtgtgtccaggcggaaagggcgaaagtcgtatgctccgtactgcggggccagaagagtttttgccgtttctgaagggcatccgagatggctcaagtacactttgggatcaatgattgatggacttaatgacaaagggaagattcgggttcccgagcagtccagggaaatcgagcgttcgattcatagaattgaagcccgtgttagagcgctgccgtcgtcaaatctgtcgacatatcaggtgattgatctggtaggccgctattttcagtcacaagttctagggcgtgaattcacagctgatccctatctgagctttatcgtcgacgatgatgttcctggtgaggtcgtgggatgtctcgagcaggcactctacattggtgtagtcattccgatgcaggttgacatcgccactgttttcacaaatggattgatggggaagaggtttaggctatcaaactggttagcgccactttacaagctcccattaattacgggtaaggcggccaagctctcaacgatagtctcatctggctccttgagctcgccgttggttggtaaacagtactctctggagctaaataggtga

SEQ ID NO: 528890 - DNA, 918 bp, Stenotrophomonas maltophilia
gtgactatctctattcttccttctgaatccacacagagctttgatctaattattgcggtttgtggttatgaatcgagagcgcgctccatcataggtgccgataacgctgttgctgtaaggaaacttgccatcggatatggggctatggaggaggtgtcattctccgaaaatctagccgctttcctggcgaatggctatgagttcaaatctgtgagtgatcaggattttgaactgttcatagaggatgtcattcgccaggcatcggctgatgcgagagccccgaggattttgctggacatatcttgtatgaccaggctaaggcttgctcaagtaatggaggctctctttgcggttggggcgtttgatgttgatgtgtactatgctcttgcggagtacagttctccctctggctcggaaccgacctatgagtacctctgtcctgtcactgagtatctctctggatggactggagacgcgtcgaaggccgttgcaatggtctcgggcttgggttatgagcagatggctgctattggaatcattgagcacgttgacccatatgagacttggctcttcttcccgcagagtccgatctctgaatatgatagatctgtcgaagccgcgaatgatgtgctgctccaggggtttcctgagtcaaacttaattaaatatccggttctcaatgctcaagcggcatttggcaagttgttttcgttggttgattctcttcgtcgggactaccgctgcgtaattatgcctttaggtccaaaaatattcgctctttctgcaatcattgttggctgctacttccgtgatgtctcaatctggagggctagcgcgggaaagcacaccgtcgcgcgcgatcgagttgcgtctgacctagttgagcggtttaggatgaggttctccaaagaggattga

SEQ ID NO: 528891 - DNA, 1188 bp, Stenotrophomonas maltophilia
atgattcgtggtctgtacctgttgctggcagctctctggatatcgccggcgcctgccgcggcccaggtcattgaaaccaccgttaccggtgaatttcgaccgaacgccgccaatcccggaaacaccgcatttgtgaacaccacgcctcgaggcgcgttctgcaactggcgaccaacagagtgcgacaaggcgggagcttacatcttcgacatcggggccggagagttctggcagaagaccggtgatggcgataacgagtccgcgcgcgacaccacctacgttcgatttccggccccgcgtgcgttcatgcttcgagatgagatgacgggggagactgcacaggcgcgcgtcagctttgttgccatctcgctgcggctgaacttcaagaatggggcggatccgtggtactacggtgtcactggtggttgtgccgcaatacgtggcgcaggtggtgtgggatggtcgtttggcggatggggcgtgcgtgatccctccaatccccgggaatgcttcagcacgcagcgccgcaacggacgaacctactcctatcagaacgtggggattggcatccaggtcgaactgccggatgcgattaccctgaagaacggccgctacgttgcacagcaggactggactacgggcggcgcagaggccgacatcgacctcggggacaacatcacaggggtcaagatgatccgcatgaactttgtgtttgaggttgcccacgaccttgaagtgctgttcccttctgaggcgccacgggtgaccctggtgccggaagggggctggcgtgcctgggtcgaacatggcatccgtccgcccagcatgtcgcaggagctgccgttctacctcacgtcgtccatggatttcagcctcaagctgcgctgtgagcacgaactggacaatcaatgtgggatccgtaatgcgcgcagtaacgatgtcgttcccgttgcggtggatgtcaccattccgggtatgcgcaaccggggcgatggcatgccagtacagggaatgcgtcttccgccgggtgacgtgcgcgcgcctcgccttacgcctgatgcatacatggtccagcgtcgctcaacgcttcgattcatcgccgaaaaagacgcggtggacgagatgctgaagtcacccggctcgcattgggaaggcaacatgacggtggtgtttgacaccaatccgtga

SEQ ID NO: 528892 - DNA, 2571 bp, Stenotrophomonas maltophilia
atgtccacatctccgcatcgcaccttgttggccatttccgtggccagcgcgctcttcgcagcaggtccggccatcgcgggccagctgatcgccgatggcaccgtggaaacgccaaccgccacggcatacgaaacgaccctggacaatgagcacgccttccatgcgcgcaatcgtggtcagatcatcgcaacaggggagctcgaactatcgacgtcgggcgatggcgcggcaggcgtgttcctggagggaatgagtcacgtctcgatgcttggggcggaaggcaagcgcatgtccgtgcgcaccacgggtctcaacgctgcaggcatccatatcaatgacggcacgcttaccgaggccagctacctggacatccagaccgagggagatggttctgctgggatggaagtagagcatggccagatgctgatacgggacagcaccatcaaaaccctgggtgaggccgcgcacggaatcctcaaacagggggttggatcgggtacggtggaacgcgtcctgatcaccaccgggggggatcacgcgattggcatgaaggtggtctccagcctggtcaacgtcaatgacggtacccgcatcgaaactgctggcgagcaggcgcacgggctggtgatcgaaggggtagggaaggtcaatctgtggaacagccaggtcattgccaacggtttggacgcctggggggctgtggtcgacgacgcgggaagcctcgcgcttgacggcgccctcattgaaagctcgttggctgggcgcgggggagtgcgtgtacgtggtggcgctgattcccgccttgcattggccagaggttctcgcattgccgggttgaacaacatcgccgtctcgctcgatgctgccgtgtccgggcgatttgctcttgatctggcaggttcctatctggaaggcgacattgtgcatacccgtgaggaccttgaggccgggcgggtttcgacagcgaaagttcacgtatcgctcaccggcaattcggtgtggaccggcgcctccacgctgcttgaaagtgtgtcgctgacggacagctggtgggtgatgggccgcgggtcagcagtgggcgaactgcaggtaagggacggtcttgttgctctcatgacccctgcgcatgcggagaacacggtactcagcgtgaccagcgatctgcacgccagcaacgctgtcttccatttttcaggcgcgctcgacggcgacgactcacggatcggtcgcattcacgtgcagggtgatgcgtttggcgatggcagggtctcggtggacaatatcggcgggttgggtgcggagaccatcaccggcatcccgttgttccagatcgatggagcatcccttgcggatttcacgttgaatgggcgtgtggttgccggcctgtatgagtacttcctgcacaaaggcggcgtgccgggcggagaaggcaactggtaccttcgttcggagattcctgcgcctcctgtggacccgtgtgagtctgatcccacggtaccggggtgcccggtcgatccgatggatccgggcgaaccgacagccccggggaatcctggcggccccgggattccaggcgcgcccggcgacccgcaggaccccaatgacccgaccgggccctggacaccgggcgacccgattggccgcccagggccgctgctgcgatcggaagcgggcgcgtatcttgccaaccagcaggccgcgctgaacatgttcgttcaccgcctggccgagcgccgtggcggcatgcgggccgaggacgaccgcacggtctgggcacggcttgacagccagcaggccgactttgatgcattggggggtcagttgttggtggacggtggatcgtcggtgctgcaggtcggcagcgacctgctgcgcgctggcaatgcgatctacggcgtgatgctcggcgttggtaatgccaacagcaccgttgtatcggagcggaccggatacagcgcgaagggacaggtacgtggcagtgcgatcggcgtgtacggcacgtggcagcaggacgcgggaggggatcagggcttctacgcagatggcagcctgcagcatgggcggttcaagaaccgcgtgcagggtatggggctgcatcgcgagtcctatgattcgcgggcgatcatcggtgccttggagggcggctacattgctccggtctggcgaggggcatcggcgacgctgttcgtacagccgcaggtgcagctcatctacagccggttccacgcagggcagcatgtggaacgaaacgggacgacggtgggcaatgccaaggcggggggggtggctgggcgcatcggtgcgcgcgtgttcggtcactcgatggcactgggcaaccgcgtgcagccctatctgggcgtgaactggttgcgcggcccagcgaccaatgcgctggatttcaacggtcagacccttgcggtcggcatgccgcgcgatcgcgttgaagtgcagggcggcgccgaactggagctgggggaacgcgtaggtgcctggggtggagtaagcctgcagcgcgccgaccagaactatcggaacatcattgggcaggtcggcatcagggtggcctggtaa

SEQ ID NO: 528893 - DNA, 684 bp, Stenotrophomonas maltophilia
atgaacgcaaacgcactgctcctggcggcgacggtcgcctggtgcctgccgcagctggcccacgccaacaccaacgaaggttactacgccactgttcgcatcgttgatgccgatcaccgtgcccgcaacatggatgccagcgcccgcccaggcattggccgctttgtggcaggcgacgaacaccagcgcttcgtcaccggtgccgtgggcctgggatacgcgcatggcaacggctggcgcaccgagggcgagtacaccctgcgccgcagtgacacctacaccagcggatcgagcacattcgccaccagcttcaacaaccatgacgttacctcgcagcggctgatgctcaatgtctatcgcgacctcgccatcaacgaggcgtggtcgatctacggcagcgcgggtgccggtcttgcacagctgaaatctgccggctggcagggcaacgagggccgtcgctatggcagtaccacgcgtactggcctggcgtggtcggccggggtaggtgtttctgccgtcgtttccaacggtgtgcatatcgacctgggctaccgctacgtcgacatgggcagtaccgaaagcggctggaacacctttggcaacgcacgcggcctgcaggacgaaaagatgcgcctggacctggcctccagcgagttccacctgggcgcccgctgggcgttctga

SEQ ID NO: 528894 - DNA, 531 bp, Stenotrophomonas maltophilia
atgaacaagcttgcaattgctctgtccgccgcgctgtcgctgggcgctgttgcgtcggccaatgcggccgacgccaccatcagcttcagcggcgccatcaatgccacatcctgttcggtgggcttcgctggcgtggccagcggtccgctgaggctggcgactgtcactaaggccaccgtcgagtcgggcacagagtcgtcccgtacaactccgttcactttggaagttggcagtacggctaacacgtgccctgccggcaccatggaggtgaagttcgtggatccgtcgggttcggtcgacggcaagattggcaacaccgccgccagtggcgctgccaccaacgttgcggtggagctgatccataaggatgaggtgctgaccctcggcgttgacacgatcgatgaaacgcgggccaccgcgggcgtgtaccagtacgtaatgcaggcacgctacctccgcccgaaccccgccgtggatgtggtcgctggtgacttcgtaggcagcgtcggcgtcgaactgaccctgcgctga

SEQ ID NO: 528895 - DNA, 744 bp, Stenotrophomonas maltophilia
atgttgcgcactatctcattcgctgctactgcatcgcttgcgctgctcgcgtcgagcggtgtgtcgaccgcggaagcccgtatctacctcgacagcacacgcatcatcttcgctgagaacaagcgtgaagccactgtccgcgtcacgaacgagtcaaacaacccgtcattggtgcagacgtggatttccgaggaggcgtctggctctgagccgaaatcctccactgtgccgtttgtcattcggccgccactgttccgtatcgatgggggcaggagccaggtcattcgtatcatgcctgcgggggtacagcttccgcaggatcgtgaaagcctgttctggttcaacgtccgagaggtgcccgcagctgcacgtggcgatggtggtacccagcagatgctccatctcgtcctcaacaagaagatgaagcttctctaccggcccaaggcccttcgtgctgacggagccagccaagcgcccgctcaactgcaatggagcgttgtcaaggacggccaggagtgggagctgcaggccaccaacggttcgccgttcttcgtcaacgtaaacagtgtcgacgttacaagtggaaaggtcgatgttggcacgggcgcagttccgccaatgggttcggcccgctatcggctgagccatgcacaacgccaatcgctcggtcagagcatcacgttcgaatatatcaacgatatgggcggtgtgcgcagcatcagtctgccgctctcccagccctga

SEQ ID NO: 528896 - DNA, 2589 bp, Stenotrophomonas maltophilia
atgaaccgtccatcttcgacatcgatgctgcgtcaccaccgcctcgctgcggccgtgcttgctgcactgctgccggtcggtgcgatggcggcccctgcgctggagttcaatgcagacttcctgcatggagcaggtgctggcctggacctgagccgcttccagaatgatggcccgctgcccggcacctacagtgccgacatcgtggtcaatgacgtgctggtgggccgtcacgatgttgaggcacgtgcaggtgaagatggtgaggtaactctgtgcctggatccggcgttgtttgcgctgatgtcgctggacgagaccaagctggacgcctaccgccagaaggatgaaggccgcgatctgctgccgttgccggagcaggcaacatgcgaggcgatctcgcgcttcatcccgtcggccagcgtgtacctggacagcggtgagcagcagctgcaagtctccattccgcaggcctatctgcgctcgaaccgtagcggctgggtggctccggaccgctgggatacgggcatcaatgcggcgctcatcaactacagcgtcaaccacaatcgcttcgagagcggcggccgccagagtagccacaccggcgcgaccatcgatgccgggctgaatctgggtgcctggcgcttccgccacagcggctacttttcgcaggacagcaacggcaatcgcagctacagcgcaagccgtagctttgccgagcgcgaaatccgtgcgctgaattcccagctgacggtaggggaatcatccactgcgggcgacctgttcgattcggtcagctataccggcatcaatctacgcaccgatccgcgcatgctgccggaagtgtttggcagctatgcgccgatggttcgcggcctggctcagaccaatgcgcgggtaaccatccgtcaggcaggccgtgtggtgttcgaaaccacggtggcaccgggaccgtttgagatcgacgacctgcgcaatacggcgggcagcggcgatcttgaggttgaggtcaccgaagcagacggtcgtgtggagacctttgtcgtgccgtttgcctcggtgccgcagttgctgcgtcagggccagcagcgcaccagcttgacggtcggtcagctgcgcaatgatgcgatcgacgcgcccgcgttcgttgaggcgaccctgcgccgtggcgtgggcagtggcttcaccgcgtttggtggcgcgaccgttgccgatggctacaacgcgatcattcttggcggcgcgctgaatacccgtctcggtgccttctctggcgacgtgaccttctctgatacgcggctgccgtcgccgatggagggcttcggcaagcgcatgcagggccagtcctatcgcctggcgtacagccgcagcttcaatacggccaccagcttcaccttggcggcctaccgctactcgacggagggctatctgtccttcagcgatgcggcgcgcctgcgccacgatctggccaacggtaactcaggctccagtgtgacgcgccagcgcagccggatcgacctgaccgtcaaccagcgcctgccgaagggctcgctgtacctcaacggcagcaccactgactactggagcgagaaccgccgcaccaccaacttctcgctgggctacaacggccagctgggccgtgcttcgtacagcatcagtgcccgccgcacgctggaatcgtcgctgttcaaccgtggaagccagaagcagagcacgggtgcctatctgagcgtcagcgtgccgctgggccgtgcgccagccgcaccgcgcctgagtgccagcgccagcagtgaccgcaacggcggtagctaccgcgccggtgtcaatggcagcttcggcgatggcatgcagggcagttacaacctgtcctacggccaggcacccggcagcaccaacattggcgcgaacgtcgcctatgccgcaccggttgcgaacctcaacgcgtcgtggagccgcagcgacaccagccagcagctgggtctgtctgcatccggtggcgtggtgctgcacggcgacggcgtcacattctcgcagcgcctgggcgacacggtgggcctggtccacgttccggatggcccgggtgcaggtgtcggcagctatcgcggcgtcaagaccaataagcgtggctatgcggtggtgccgtacctcagcgcctatcgcatgaatgaaatcgcggtcgatcccaccggtctgccgatggatgtcgaactgaagagtggctcggtaacggcggtgcccaccgccggtgcggtggtcaaggcggtcatcccgaccgccagcggccgcactgcgttgatcgaggcgctggacaaccagggccagccgctgccattcggcctggacgtctatgacgaggccggccaggtggtcggtgtggtcgggcagggtagccgcctgtgggtgcgcggtatcaatgacaaggggcaactgcgggtgaatccgggtgcgaatccggcgcagagctgcaccatcagctatgaccttggtgctgcggccagtgaccagctgtacatcagcagttgcctgcgtgccaacgttgctgagcgcaatgaacattccgaaagcgagatggcgcctggcgccccgaactga

SEQ ID NO: 528897 - DNA, 1017 bp, Stenotrophomonas maltophilia
atgatgaaactggcctttgtcgttggtgggttgctgcccttcgctggagcaatggcgtgcactgcggaccccaatgagcttatcgagagccggaacctggtgtaccaggatggcttttccgtgggcgctgtgattacagattggtccaatggcgctcagggaaactatcttgagggttgtgccccgaacgtatgggtctcgctatccattgtcgcaacgtctgtgccggtcggtaccgtcgatgaaatgccggtttttgctaccgacaacgccaacgtcggtgttcagttccagtatcagtacaataggggaagaggggaaggtggcggcccgtcttggtcggcttggtacgatctgagcacgaccgccgcgacccatgtcaccagaagtttcgtagggactcaccccatcactgagtatgttggcctgaattaccgcgcgcgctttgtggcacttagggccttcagcggggatcagcgggtcggaagggtgcaggttgccgatgtaacggacctgacctacggaaatgcgctcaaccagcgggtctttacagggttccggctggatgcgcccatacagcgcagttgtgcgttcacaggggcggttgacgggcgaaaggtcgagcttccgtttacgcatgtttcatccctgaaggatgaaggcgacgttgggcgagcggccgaattcagctggagcttccaatgcgactacggaaaccagggtgaagaggaagcaatggggattaaatacgaagccggcaccacactggtgaatgcagaacaaggcttgatgagtgtcactggaggcgcaacgggagtggacctgcaggtgaggcgtcgtgatggtggaacgatggtgcctgttgtgttcagcacgcctggcgaaagaccccgatggattaagtacgaggcagaggaaggcaccgagtacctcgacgtgcgctataggcgcaatgcggatcctctggttgccggcgaggcgaatggttcgctgctgatctacatcgagccatggtga

SEQ ID NO: 528898 - DNA, 717 bp, Stenotrophomonas maltophilia
atgcgcagattcatatacatcatggttgctggccttctggcagtttgccccttggcacaggccgatctgggcgtggagcacagccgtgtggtgcaggctggcgactcaccggtttccgtgcgggtgtggaacgacggtgtccgtgactccctggtgcaggcatggatcgatgtgggagacggggccgcgcgtccggagcagttgaaagttccgtatgtggttgtcccgccgatgttcaagctgtcacctggccggaatcgcgacatcatgattcgtgcaatctccggccagtccttgcctcaggatcgcgagtctgtgttctggctcaatatccttgatgttcctgccggggttcgacaggacacggcgccgaagcttgagtacgccgtaaactggcggatcaaggtctttcatcgtccgaaaaacctgaagggctcggttgacacggccgcatccgtggtggactggcagatcgagagtagcggtgagacgtctcgcttgattgctcgaaacccaacgccctttcacgttagtctggcacggctcgatctagacggacgacagctgctgcttgagccaagcaacgcattgattgcgcccttctctgagtggtcattgccattgcacggcgataccgagggcgtgcagttgaacttcagatgggttgatgatgctggaagggcgcgtaacggccaggcaagcgtttccggtcggtag

SEQ ID NO: 528899 - DNA, 738 bp, Stenotrophomonas maltophilia
atgttgaatcgcacgctgttgacgctgcttctggcctcgctgtccctgccggctagtgcagatctgcaggtcaatgctactcgcgtggttcatgagcaaggcagcaccgcagcaaccagcatccgggtgcgcaacatcggcagcgacccatcgctcattcaggcgtgggtggaccaaggcaacggggagttgccactggaggctctgcgaaccccctactttgtgacgcccccactgttccggctggatgcaggcaaaacccgtgacattcagatccgcgaagcggagacccgcaccttgcccactgatcgagaatcactgctgtggttgaacatcgccgatgtccctgcccgcacaactggcgccaacgcgccgacgctcgaatttgcgatgcgctggcggctgaaagtctttcatcgccctgcggggctgactggcagccccgaggaagcacctgcggcactgcggtggagcgtcaggaccgatgctactggccagatcgcgttgcatgtgacgaaccccacgccctatttcgtcagcttggccgacctcaagctgggagccctggccctctccattgaagcagatcgcgcccaggtccccccattcggcgaatggtcacgaacattgccagagaaacccagcgtccctgcaaatgcgctcgacgtgaagatgacatgggtcgacgacagggggatcgaacacagcgctcagcgcccgcttgatctgtctcactga

SEQ ID NO: 528900 - DNA, 1038 bp, Stenotrophomonas maltophilia
atgaaaaggaccgtcttcatctggcgatacgtcgcactgctgtgcctgttggcacccgcgggggcggtggaggcggcctgctcggccgggccgcaaaaatggatggcggcgctggcaggctattacgattcctacgaggcaggcgatgttgtagtcgactggatgacagcgccggtcgcgtactacgtggattgcgatcccatttcaagcgcacagatgatgcttcgctccgcaaccgggtttgccgggttccaccaggggcgcaccacgttccggacggaccatgaaggtattggcattcagatggagtaccgctatgtgcaatccatcaacggcgcgggccagccggtctactccgaatggcaggagccaggaacagcaggcacccccatcacagcgcatgcgcactacgtgaaaggcacccccacggcacccatcattgttgaagtggactaccggttcatcgcgctgcgtgagttctccggggaaaccattgccatgggcgatctggaacccttggtggcgtcggaccgcagctacggtttttcgctggagcaactgtcggtagagggcccccaacgaaggctgcgcgagatagccagctgtagcttcagcgcaaggccgcccacctcgctgcgcctgccagacacccacacctccctcctgaagaatacgggtgacatgggagagccggccgatttttccttcagctggagctgtcgcgccggcaatcagggccatagcggcaggggcgatttccgtttcaggtcggccgacgccatcactgactcagctggacacctggctaccagcggcgacgccaaaggcgtggacatgctggtgaccttggagcgctccgacggaacccaggagcccatcgtttttgagacatggtacgcaaaccacttgagcccgggtacgggcggcctacccagcagcggcagccaggccatgcaggtgcgcttcatccgcaacgccagccccctggtgccgggaacagccagcagcaccctgaccatcgaagccattcccttctag

SEQ ID NO: 528901 - DNA, 1173 bp, Stenotrophomonas maltophilia
ttgggcgccgccaaggccatcgccgcgatgacccgccattgggttccccgcgcggagcccttgcctgtgtcctgtacggtgtggaacattcgcgcattgctggcgcaggtgctcgtcatgcctgaactcttccggtcgtccttgcgcctcgcagcctgggtgtccttggtgcctcgtacccgtcgtcggctgttggcggcagcgtgcgccttcctatgctgcccgttgttggcgcatgcagcctgcagcggcggaggcgtcaaccctcgcttctccgcgccagcgaatgtcgaattcagcggcagggatgtgccattgaatggcgctcttacaccgtggctggtggcaaatggcggcgcccccactgcggagttccattgttcgtccagtgatgtcatcagccatagggtggaaagccatggtggcttcaacatcgagcgctaccacgaaagcggtgcttcctatgtggtgtaccccaccggtgtggaaggcgtgggctttgtgttcctggtcgaatcgtcgcgcggtggacagggcaggccttctgccctgggctacgacgaggtcttgctcagcgagggtgacacacctgccggggatgtcggcacccgcatcatggtcaagtatatccgcacgggtgatctgcccagtggcagcaggaccactttggcaaggatgatcatgcaatcccgtttgtacgatcgttccggtgggcttttcactgacgaaaatctatggattggctcgggtgttctgacaatccgcgatcgtcccagctgcaggatgcggggccaggatgtaccgatggggtctattcctgtatcgaggttcaaaggcgagggttcgcatgcgggcgagcgccgctacgagctggtgctggattgcgaggcgggtgttgggcaggtgaactatcaggccgtaccaaccaccgtggtgatcaacagcgaacagggcttggcagaagccagtggtggtgtagtaggcgtggcctatcagttccttgatggcgacggctcgcccatgcggttctacgacacgaaggagttcgggcgtggctcctccagcacggaggtgctgaccaaggcattcggcgtgcgttaccagcagaccctgcccaccatcacgccaggtgatgccaatgcgggcctggtgttcagcctcactttcccttga

SEQ ID NO: 528902 - DNA, 720 bp, Stenotrophomonas maltophilia
atggccatgagtacaaccttgcgctgcctgattgctgcgctgccgctgctgtttggtgtggcagcaaaggcggaagtctccgtgcaggggacgcgtgtgatctatccggcagggcaaccggaagtagcagttgttctgaaaaatgaaggacaacgtgcctcgctgatccaggcatgggtcgccgatggcggcattgagcagaaggccgaagcctcccgggcgccattcgttctcgacaagcccttgttccggctggatgcggggcaatcgcaggttctgcgcgtgcgcggcctcccggagcgagcaccgaaaggagatcttgagcacctttattggttgaatgtaatggacgtgcccccgcgcgaaaccaccacgggagagaacaccgtgcagctggcgattcgtttccgtatgaaggtgttctatcggcctgctggcttgggcgcgccagagaaccccgcggccaaggtccgcttcaaccagacgcaggatgcactgacgctacacaacgattcccggcactacttcaatgttgcggagatgacgctggtatctgcagcaggcgagcgtccacttgacagcttctatctcgcgccgggagagacgaagaccctggcctatccggctgggtacaccgggccactgacagcggtgcgctacagctgggtggatgatgacggcattctgcaccaggaaaatcctgttattaagcgcccgtag

SEQ ID NO: 528903 - DNA, 444 bp, Stenotrophomonas maltophilia
atgtccgatataaaagtaactgcactgcctgccgcaacagagctgtcaggaagcgaaatcatctatgtggtccagggtggtgagagccgaagggctacatctgctcaactcgctggacttgcatccggaagcgccggtgtcaccatcacaactaagtcggccagcgccacgctttcgttgaccgacggcggatggctcgaaatggatgtcgccacggccaacagcttgacgattcccccaaacagctcggtcgcatttcccattgggacagttcgtaatgtccaccagcgcggagcggggcagaccacaatcgtcgctggcgctggcgtcaccgtccgaacggacgagactttgaagctgaggaagcagtgggccactgccgtgctggtgaagcgtggcaccgacgagtggattctggccggcagtctggagccggcgcagtga

SEQ ID NO: 528904 - DNA, 1626 bp, Stenotrophomonas maltophilia
atggccggttttcctgtgtacgtagacctctccgatctgccgagcgacgtatgggatggcctggcataccgcgacggacgcgacctgcgagccaagaacgccgccggctcggacattccgtttcacctggtgcgcgtggaccccggggcacgtggcggtgccatgttcgtgaggctcgaccttagcgccgtcgcagtaacccagttctacctttcctacggtgacccggctgccggcgccgtgccggccaatgcgccgaatggcgcaaatgcagtgtggtccgactaccaccgcgttttccttttccacctcaccgaatccgactcaacgggggcgggctcagatgcgctgcgccaggcgcgcatcaagctgtttgagctagtcggagagaagacgggcctcaccgagcatcaggggctctgctgggacggagcgcactactacgtagtcgataccaatgcgctgcacaaatacgacgctgggtggaacctagtcgccagcaacagcaacccgattggggatgttggcaacggcaccaaccactgcggcgatcccgacgtgcacggcggggtactgtatgttcctgccgagagctacaccagccccaccgtattctccaaccagcgcatcgcgaggttcaaggccagcgacctgacgttcatagattcggtggatgtgtccgcgcagggcgacgaggtgtccacggtggctgtagacgttgagagaaacacgctgtggaccacccgctacagcgatttggcccagcatcgaatcaacggctacaacttgcagaccctggcatacaccggttcgagctcgggttccccgggggcgatgcgtgtgcagggcatgcagcgctggcgcgacaagtggttcgtcaatggcgacacggcggactacacattccgcgtcaccgagaacctgagcagcgccctgcgtacgtggaccgacattcccgatgccgctagctcgcgcgccggcaactacgagggcctgggtgcgaccgatgacgagcttctggtcctgcgggatgaaggcgcaagcaccacagtccacaccatccgcccgttgtcggtcgaggctggtggtggttttgaggggatcagcagtccggagggtgctggttggatgaaggcgggcgggctgaccaatcaggccaccttcaccatgggtgcaaccatcattggcaaggcctttgacgtggcgaaccaggcgctactctcctttaccgctgagaccacggccaataccagccgagtgacgcttgcatatcgcgggacaacgggaaagctgggcgtatgggatacaccgaatgcttggcttgaatccaccgccagcccggtggcgggcgcgagaacgcgagtccacgcccgttacgtgggtacgacctcgcgttccttgttcgtcaacggcctacgagaggcgcacgccgcgccgatcgccgccgcgcctgcgggcaaagtcatgctctacatgggcgcggaggaccagagcatttccgagccgttcgccggcaggatgggcttcgtctacctgcgtgcggctgcgctatcggatgcctggatcgcggccgagtgcgccaacctggccagcccgggaagtttctattccttcagccctgcctga

SEQ ID NO: 528905 - DNA, 1029 bp, Stenotrophomonas maltophilia
atgcgatacaaccctgcgctagacggtcttcgagctatcgccgtaatactggtactcgcctttcacgcgcggctgttcggtggatttggcggattcctcggagtggacgtctttttcgtcctgtccggctacttgatcacacgcatcctcgccgagcagcacgcagtgactggttcgctgcgggtgggcgccttctacgttcgccgcctgcgccggctgtaccccgcactcctgctgctgctggctgtgtacctggcggtggcgccatgggcgttcccggaacggactggccatctgcgtgatgccgttgtcgccggactctacctttcggactacggtttcgccttctggcgggtgccgtggtacctgcagcacacatggagcctagccgttgaggaacacttctacctagcatggccgctcgcgctgcttgcggtgttccgactgcctcagcgctggtgggcaacgtcagtcttgctactggcagtagcggcgaccctctggcgctggcacgtgacactgaacgatgacgcgtggtaccagccgtattaccgcttcgacacgcgcctctcggggattctgctcggtgctgctgcggggctgttcaacccagctgttccgaaggctgccgcgccgctgggtgttttcctcctcgtcgccgccgtgacccaggcccatgtaaaggagctcaccgccctcacgacttggatgctgctggccgagatcggcgccctgctgcttgtgttaagcgcccagcacgtgcgcgccctctcttgggggcctctcgtatggctgggaaaactctcctacggaatctacttgtggcattacccgatcatgtactggtttcgcggacatgagatcactgggtggcgcagcatggttctcgggtccgccgctgcagtcctttgcgcggcggtttcatactacacggtcgagcggttctctcgatcaggcagggctgaaggaatagaaacttcccgggctggccaggttggcgcactcggccgcgatccaggcatccgatag

SEQ ID NO: 528906 - DNA, 1347 bp, Stenotrophomonas maltophilia
atgtcgaagacaaatgctgaccttctttcggaccatgagtggtcctgcgcagttcatccacctggccgcccgcaactggcgttcgctggaacgctgcgatactcaccacttgatggcctgacactggagtactcgtcacttcccgacaaggaatatgacaacgaaattgatcacctgcatggagtcaccacatcaggcgacccatttacgctcgtaggaaaattcagcacagagcgggcaggattcagggctcgctcatcttcgttctatcacgtgggaaagcactcattccaatacgccatcttcggccatcacatcgatcgtgcttgcaagtttgagagctttgagttggatatctgcgggcttagagattttcttacggcctccgactactctgcgctggcgtcttttgaggtaaaggctctatttgatacccgcacatcttacgggcgtattagtggcatacagaatatcagcaccacccctctgcctcgtcgcctttcagaccagatccactgcatggaagaagatgagctggcaatgtctaagctccaaaaggcattcgacgccatcaagttagagcatcccgaattcagaccattcgtcaaggtcaaatcggagtaccgaattctcatagaatgcgaagaaggcgctacgattgagcaggcatatgagacgtgccaggctatagccgatctattctcaatctttttctttgggccggcgccgctgcacacattgaccgcccaggtgatcgacacatctggaaaacgccattcatgggaagtgttcccagcgaagctcagcgaaactggatcgatcaagcgggccactgctacgaagagctatcaccatcttccgataaatttcagcgacatagacctaggcgaagccatcaagaattggctcagcaccaaagatgatttccgtacgctagtttgctccctgcaaagcgcaaccacacttatctcacatagtgaaattctctccagaattgtgctcagcgcagcgcaattagagggcatcgcaaagaaagccaaaaagaataaagattcggaaaaataccagtatgcgatcgatgcacacgcaagccaacgaatgatagacaagctctgctcacttctccaacgcgaccaagcccagctcggcaaagcaattggagacctcagaaacgacatagcgcacatgggccgcacaagcaaaatcgctcacacgctcaacacaagggaaaaatacatggcatgcattgcgttcgaagcaataattattagctatgtcttagggtcgatcggggttagtaaaccggccctcgacaagtaccagaaatgcttgcttggcctcgcctaa

SEQ ID NO: 528907 - DNA, 432 bp, Stenotrophomonas maltophilia
atgataattggcctgacgccactttttgacatttccgtcgaagccgtgattgcgcgcggtttggcgaatcaagagcgcatcgtgcttcgggctaacatggagacttacacggccaacattggcctcatgcttggatatcggcagaaggatgaagctcttgtcccgctgcgcgaccgcatgtactggctaggcgcgggaacgataaaagctggaagcaccattaacatctacactggctcgggcgaacagacggccttcgacagtggaaatggcacctcaacctacaatcttttctggggacttcagttcgtagcatttgacgtaccccaagtggagcccgtgctgtttagacttggggaagcgacagttggtgcaaggccactgcttggcccgaacataccgggcccacagctcagattagggcccaggtag

SEQ ID NO: 528908 - DNA, 1155 bp, Stenotrophomonas maltophilia
atgaaaacgcctgaacagattagcctcttgctggcgcgccagtgggaaaaagcgcaggcccgcgtggacctgacacttgatgccgccgcgtggccacggatcgtagagatcccgcaacccacgccactgcagctggaacgggacacctccgtcgtgcgtgcgcatctccagcactggcgtagcgttgctgtaggccacgtacgctggcagccacgccgctaccgcagcgtcgcatctgccatcgagctgccggtcgcgtgggagttcgccagcctgcaggaatgggcggcggcggccggcgccgacgtccagctccaagcgcagcggttgcagttcctgcagcagcatgctccccaggatatgcgcgggctgctggcgcgccgccgcgccctatggcgcgaacgcagcgacgaagacgtagttcgcgcgtgcgcggtggcggcactgctaaccccgggtatcgcccaagggcagccactacggtcgctggccctcggcggcatggacacgaagttcctcgaacgccaccagggcctggtcactgccctgctcgaccagcgcttcgacaaccaggccagtgcgcagggcctggctgccttcctcggtggccaggactgcggcgaacactggctgcgggtggtgccgctgacagcggggctgctgcccttcgaccagatccgggtgcgagccagtgagctgatgcacgcgccgctgcccggcacacggctgctgctggtcgaaaacgagcactgcgttcacttgctgccggcactgaccgataccgtggctgtgctcggttcaggcctggatctggggtggctacaggctccctggctgcgtggccgcgcagtgtgctattggggagacatggacagctggggcctgctgatgctgggccgcgcgcgcctgcacctgccggaactgcagcgcgtactgatggaccgccccatgttcgatcgctactgcgcagcactggcagtgaaggagccggttcccaccgattccaccccacccttgggactggaccaagacgagcaggcgttccatcgccatctactcatgcaaccgaaggggcggatcgaacaagagcttctgccccgcgaggctgtgctgttggcattgcaggcctggggagcgacgcacggggcgcagtga

SEQ ID NO: 528909 - DNA, 3294 bp, Stenotrophomonas maltophilia
atgagcgactcatccctgctgcccagcagcgtcctgaccgatctggacctgtacaactgggggccattcgaagggcgccacagcgcatgcatggacctggccggcaccgccatcataggcccgacgggcagtggcaagaccaccctgatcgacgcgctgatgacgctgctggtggccgcgccccgatataaccttgcctccactggcggacacgagagtgaccgcgatctggtgtcctatgtacggggtgtgtctggtgccggcaacgacagcagcgataccgcccacatcggtcgcccgggcgccgtggtcagcgcgatcgctgcgcgattcagcgacggtgcgtccaccgtccgcgtcggcgccgtgttctggttcgatggcaccagttctgcgctggccgacctgaaaaggcgctggctgttctgcctctccgacgaacccggactggacgcctggctggaagcacatcgcgatggcagcgcacgaggcctgaaggaactggaacgccaggtcccaggcgtgaaggtctatgaaacaaagcagacgttcctgtcccggctgcgcagccatttcgaggtgggtgagaacgccttttcgctgctcaaccgtgccgccggactcaagcagctcaacagcatcgacgaggtgttccgcgaactggtgttggatgaccgttccggcttcgaaggcgcgcgcgcggtggcggacgagttcacggtgctggttggcatccgcgccgaactggaaaccgcgcgccggcagcgcgacgcgctgctgccggtggagcgcacctggaaggactaccaggcggtgcaggccgagaaccaagcggcccaggaactgcagtcgctgctgccggtttggtatgcggagcgtaggcacgacctgtggtcagcatggttgacagagctgcagcagcagcgcacggaggtgcaacggcagcaacagcaggccgagcaggacatcgcgcaggcgcgcgagcgggaaacccagctgcaggccatctacattggcagtggcggcgcccaactggaagtgctccggcaacgcatcgacgcacagcaggtgctgttggaccagaagcgcgagcgggccgcacactaccgtcagatcgccgccggactggatctcccggtccctacggatgatgcgacatggcatgacaaccaacgagcgctggccgaactgcgcgacgtccagacacaggcatcccagcaacagcgcagtgccgcttgggaggccggcgcacgctggcaggcgctggacaacgaccggcagaggctggccgccgaactggcgcaggcacgccgccataccacgtccaatgtcccggtagcccagcagatgtttcgcctcgagatggccaatcatctgcaactggacgagaacgaccttccctttctagccgaacaggtgcaggtcctacctgagcatgcgcaatggcgcggcgcgatcgagcgtgccttgggcagcgaccgcctgcgcctgatcgtgcccgcggcacgattcgcgcaggccttggcctggatcaacagccgggacaacaagctacatgtgcgcctgctagatgcgcaaccatccgcacgggcaccctcgttcttcgctgacgggttcgcgcgcatgctggagtacgcccccggcccgcaccgcgacgccgtgaaggccttggtctcaggaaaggatcgccattgcgtagccgacacacaggcgctacaccgcacagcacatgcgatgaccgtgcagggcggtctctccggaagtggcggacgattcgaaaaacaggaccagaagccactggaccgcgactggatgaccggtttcgataaccgtgaccgggtgcagcagctggagcgatcagtgcgcgaaaatgccgaggacactgccagggcagacactataaagcacgacgcggtccagtgtgccgagaccaccgagcgtggcctgcagctgatcacccagttgcaagcgatgcgtctggaggacttcgatcatggccggattgaacaggaactgcagcacctgatttcccagctgcaagagctgacgtcccccagctccaagattgaacacgcgcgcctggccctggaagcagcccaggcgcatacgcggatgaagctggatgaacgcgcggccttgaccgcctcatccgcgcagttcgagaaggacatcgccgcagctgcgcagcagatggacgcagctcgcaccagtatccaggcgccactggacagtcagcaacggcaacgtgcagctgcttacttcaccgctcccctggctgccgatccacacgcgttggatgcccaggagcgtgtcgccagccagcgtatggccgatgaggtcaaacgcagttcgacacgcctgaacaccctgacccaggcgctcctgcgcgagctggccgccgccaaggcgcaagataccggtgcgctgagcgaggccgggatcagcgtggaggatgttccggcctatcgcgcccgattgaccaccttggtggaagaagccctgcccgagcggctgagccgcttcctggactacctgaaccagtcctccgaccagggcgtcactcaactcctcagccaagtggacatcgaagttgcacagatcgaagagcgcatccacgcgctcaataccacgctgtgccgggtcgacttccagcaggaccgctatctgcaacttgagccccagcgcgtggagcacgagtcattacgcacattgcagaaggcacggcagtacctgcgagcggcacagttgaaggacgacgaaggcgaagcccactatgaagcgttggcgcaggtcgtcgcgctgctgcgcgacgccgccgaacggcgcaagacccagggcgcgctggctctgctcgacccgcgctaccgcctgcgtttcgcagtgctggtctgcgagcgcggcagcggacgcatcattgaaaagcggaccagttcccaaggaggcagcggtggtgagaaagagatcatcgccagttacgtactgacggcatcgctgagctacgcactgtgcccattgggcaatgaacgccctctgttcgccaccgtggtgctggacgaagcgttctccaagagctcgcacgcggtggccggccgcattgtgcgggcacttcacgaattcggcctgcacccgttgttcgttaccccgaacaaggaacttcgcctgctgcgcaaccatacgcgttcggccatcgtggtccaccggcggggccgccaatcgaccctgacatcgctgagttggcaggcgctggaggatcacgcccaggtacggcgggccgcagagtccctccgcagatga

SEQ ID NO: 528910 - DNA, 651 bp, Stenotrophomonas maltophilia
atgccctccgttcccgatccgaccccagcgccgtcgaccacactccccttggacacgctggtgcggcaagctctgcttgaactgctccgccacggccttgtggacggtgcaaagcccaatctgtaccagattgtgctgagccaggcggataccatccgtgcggtgctggccaacctcgacctcgacgtccgcatcgatgacatccgtggactggcctatctggtcgtggccgatggcggcgatgacttggatgagtggtcacacccgctggtacgcaagcagcgtctaaccctggaacagtcgctgctggtggcgatcctgcgccagcagttcattgcccacgaaattgagtcgggcgtcggcgccctccccccacagctggatatcgatgacctgctgccgcatctgcaggcctacctgggtttcctcggcagcgaccagcaggagcgcaagcggctgttggcactactggaacaactcaaaggccatggattggtatcggacatcgacgagcaggaacgcgtcaccatccgtccgatcattgtccaccttgccaacccggaaaacctgcaggccctgctgcaggccatgaacgacgctgccgatcgcgcgggtgaatccgctgacaacaatgcgcgggaggaggcatga

SEQ ID NO: 528911 - DNA, 1398 bp, Stenotrophomonas maltophilia
atgctcagctgcctgcagacgctgttcgagggcagttcggacggcgttccggtcgaggacgcgcagacggccctggccgacctgttcagcgcccacgccggcaacagcgaactggacatccaaggggatcccgcagcagtcgcacggcgtgaactacgcgactggattcggcgctcgctggtgattgaacgcgagagtcggctgcacgccaccgatgcactggaaagcgcgcttcgcttcatcggttcattggaaggacggatcatgacctccacggcctcgcgcttggcggtagtgcagcgcgagatcgagcatctggatgcgcgattgaatagcgacccggaagcccgcgcgatacaattgcgtcagcagatcaaaacactgcaggatgaactgacacgcgccgaggccgggcatgtcgaagtggccagcgcacaggaagccagcgaggcgatccgtgaactgtacaccctcgccgtcggcctgcgcgcagacttccggcgcgtggaagactcctggcgcgaggccgatcagcgtctgcgtcacgacatcgtcgccgaaggcaatcatcgcggcgcgatcctgcagaccttcctggatggccatgacgaactcctccagactccagaaggacgggtattccagaccttccacctgcaactgcgcgatgacgtcgaattgcatgccatgcagcggcgcctgcgcaggatcctggagcacgagggcgcgcgcaatgccctgaatccaccacaggaaaccgaactgcgactactggtgttgcgcctggtgaaggaatcagccgtcgtgatccgcactcgctcgcgcagcgagcgcgatgttcgtgggttcctgcgcaccggcgtggccgccgaacacaaccgcgtgggccagttgctgaatgacgtgttccaagcggcgcagcatgtcgattggtcgcgccagtccgaacgacgcgctcactcgccgttgcctccaatcgccttctcctgcggtggtctgcccttagtcgagcgcctgcgctgcaaggacctggatacagaaacgcgccgcgagctggcgctggagcgccgcgccgccgacatcaccgaggtagaaccggacttctgggacgcgcttgatggcctcgatcgggaagcactggtgcacgacacactcgactgggttcgcgaggccggcacaccggtgtcgcttgtcgaactggctgcggcactaccgcccacgcatgatctggagagcctggcggtatggatcggcatggcacgcgaagccgccagtgacttcactggcgacaccgagcagctgaatgtgctggcccgcgatggtggcacgctgcgcttcacagtgccgcacgtccggctggatccggatgccttgaacgacttcgcgtgggaaccatga

SEQ ID NO: 528912 - DNA, 297 bp, Stenotrophomonas maltophilia
atgctcaaagactacccggatcatatcaaacaactacagcaggctctcaactctgtaaaagacagaagaataaagtctgtcccgacttttgaggctgcagtctggactttggaagacaagcttgatgggttcatccgcgaagctcgcattgagcttgccgatgccgaagcatccaacgatccgcaggccgttgcccgggccaaggaaaaggagcaactgatgctcacatcctccttcaagcgccaatggttgggagatgaatcgatccacacgttctattcggcgactgaaaaatga

SEQ ID NO: 528913 - DNA, 795 bp, Stenotrophomonas maltophilia
atgctgcacatccacctgctgctgcagtggtatgcattgagcgatccgggcatggaggaagcattgcacgagatcgccccgatgcgcttgtttgcccggctcagcaggcttgatgcgattccggatgagaccacgatcctcgacttccgtcggctgctggagacgcacggcctagcagcgaagctgcttgaagcggtgaacgcggaccttgctcgcaaaggccagagtatgcgggcgggcacgctcgtggatgccacgatcagccatgctcccggctcgaccaacaacgccaacaaggcgcgagttcctcagatgcaccagacccgcaagggcaaccaatgttacttcggcatcaaggcgcataccggcgtaaatgagttttccggcctggtacaccacgtgaagtgcacagctgccaatgtaagcgaggtgacggtcacccatgagctgctgcgcggcaaagaagactccgtactcggcgacagcggctataccagtgcagacacgcgagctgagctgtccaattgcaaggcaacgttcttcagcgctgccaagcgatcgaaggtgaaagccattggcaacgctcgcgatcgcaatcaggttgagcgctgggagcgctgcaaggccagcctgcgcgccaaggtcgagcatccgtacccgctaatcaaacggcacttcggctacaccaaagtccgctaccgggggttggccaaaaacaccgcacaggtgctcacgcagtttgcgccatccaacctgtggatggtgcgccggcagctgatgtcggcatggagatag

SEQ ID NO: 528914 - DNA, 225 bp, Stenotrophomonas maltophilia; identical to SEQ ID NO: 345547

SEQ ID NO: 528915 - DNA, 738 bp, Stenotrophomonas maltophilia; identical to SEQ ID NO: 345546

SEQ ID NO: 528916 - DNA, 264 bp, Stenotrophomonas maltophilia
atgcagcgtttcgagcgcctgtcgctggtcatcgtgctgggcagctacgccatggactaccacctcggtactggcaagacgccgctcacccgggtggtcgaagcctggcgcgagcactggccgcaagcgttccccctgcctcaccctagcccgcgcaacaatcgctggctggtgcgcaacccctggttccaacaagacgtgctgcccgcgctgcaagcacgcgtccaggcagtcctcaccgccaaccccaaggaaaccccatga

SEQ ID NO: 528917 - DNA, 885 bp, Stenotrophomonas maltophilia
atgcgcgaaatcagcctggaccgtctgcgcacgttggtggccattgccgacctgggttcgtttgccgaggcggcccgtgtgctgcacctcgcgccacccacggtcagtttgcatattgccgacctggagtcgcgggttggcggaaagctgttgtcgcgcacacgtgggcgcattcagccttcggcgattggagaaacgctggtggagcgcgcgcggcgcctgttggcggatgcggagcaggcgcttgaggacgtggagcgtcaggtgcagggcttggccgggcgtgtgcggctgggtgcctccacaggggccatcgcacagttgatgccgcaagctttggagacgttgggccaacgccatcccgctatcgatgtgcaggtcgcggtgctcacgtcgcaggaaactttgaagaagcttgccgagggctctttggagatcggtctggtcgcgctgccacagaccccggtgaaggaattgcggatcgagccatggcggcgggacccggtcatggccttcttgccggctcgctgggaatgcccggatgttgtgacccccggttggctggccgcccagccattaattctgaatgacaaaactactcggctttcgcgcttgacctcggagtggttcgccagtgatggacggcagcccacgccgcgtattcaactgaactacaacgatgcgatcaaaagcctagtggcggccggttatggtgcgacgttgttgccgcatgaagcctccacgccattgcccgataccaggatcgtcatgcggccattacagcccttattgtggcgtcaacttggtattgcccaccgtggtggggacgtcgagcggcctacgcaacatgtgctggatgtgttgtgggggttgagtgcgggctag

SEQ ID NO: 528918 - DNA, 534 bp, Stenotrophomonas maltophilia
atgcgcgacatcgagggaatagataggatcgtccgcacgctcagtcctcacctgaaggagatcgaggacaacttcgatcgcgagaacgaacacttcaaatcgcttctttcccaagatcatgagttgattggccgcgttcttaagtgccatctgatcgttgagaactatcttgatagattcctgaacgaccacgtcaattgctcggacttgtctgaagcgaagttgaccttttttcagaaggtcaagctgctgccgtctcatgggagcgctgtcgccttcgtcaaacccggcatcaacaagctcaatagcgtccggaacaggtttggacacacgctgcagccagagcttcatctacatgatctcgaacctatgctgcaagtattgcgcgctgttcgtccgtccattcagtacccatcagcagttgaagtgatagaggcgtttactaccgtggcatgcacgtggctaattgtcgtacctccacatctccgagatgtatggcaggaagcattcgccgacgtcagaaccgacctgtga

SEQ ID NO: 528919 - DNA, 858 bp, Stenotrophomonas maltophilia
atgtctgaatctcagcttccagacgatcgcataattgtcgagagactgcggcaggagctcgccaaaactgagccatctcgccgacgtagaatcatagagaagttcgttcttgccgcgctagggagcattccttgggtcggcggatttctcagcgctgcgtacgagtacacagccgaagaggggactctcaagcaggactctctgcaaacgcaatggctggaagagcatcaacgcaagatttctgcgctgcgtgagacattggccgccatcgagaagcgcttcgaagcgatcggcgattcaatagacgaccgaattcagagtccggactacttggtccttgttcgaaagtcattccgagcgtgggacactgcagatacagaagagaagaggcgctacatcgcaaaccttgtttccaatgccgctggcacacgtgtttgctcagatgacgttgtaaggctcttcatagattggctggagatgtatcacgaggcacatttcgcagttatacgtgagatctatcagtaccctggtgcgactaggtacgacatttggtctgctatctacggagagattcctagagaggattccgcggaggctgacctctacaagttgctgattcgagacttgagtaccggtggcgtcatccgacaggaacgcgacacaaattctatgggccagttcgtgcgcaagcgaccgcagaagagtggagcaggcaagcctgcatccacaaccatggaatcggcgttcgaggggacaaagccatacgtccttacggaattgggaaagcaattcgtccattacacgatgaatgaagttgtcactcgaattgagggcgaagagaacggacgaagtacctag

SEQ ID NO: 528920 - DNA, 1056 bp, Stenotrophomonas maltophilia
atggacgttagcaccctgcccaagtcgtcagctgctgagatgaacttctctttcataccgcaccagcgctttctcgctacccagtgcagcttagtgagatcagtttcgagagctcgggcaggagactttgtttggttgatagcgccctcctggtcgggaaagagcgagttgcgtcggcgcctgctgcctgagcttggagggagtccccagcattggccaacaggccacttgccgctgatctccgtcagggcagtcctgaatcagggcgataagttcaatccgaaagatttcgctttgcgcttgcatcaggaaataactgagcccgacaccagttggactagtgctatagaaactggcggagatcctgaccaaacgcatgcggctgcagagcagcgagcctcctcagtcttctggcgtgaagtgcgtgcgagaacagcggagagagagctccgcctttcgtttgaacgcatgtccagaatccgtgggttgaaatacatcgtgatagaggaggctgcgaacatctgcagggttccgaagagccagagttcgcgcaactacatgcttggcatcatggcgcttattgaagagattggatctgtagcgatcatgataggaacccatgaggcgtccacgctctatgaggattcccaagaggtcttcaacaggtcggacatcctctacatgcgtccgtacggtctgaatgacgacgatgacctgcgatcctacgcctctttgatcaaggcgatcggcaagggattgccactttcaaaaagcagccttctccaagaaaatctagagctcatcgccctcaatggagggggagtctttggcccaactctgcggtacttgatgcgggccaatgaggagcgttgtcgtagtggtgccaagaccatcggactcaagcatctgcaagcagcgtcaggaaccgataggaatcacaggctactgtggggagagatagaagcattcaatagacttgccgatggtaagcgctctctgcgccttgcggacttcctgaacatcaagggctcatcgcctagtgaaggcgatctgtga

SEQ ID NO: 528921 - DNA, 357 bp, Stenotrophomonas maltophilia
atgtcgcacggaaagattgaaaacaaacactttgagaaatacggcttgttcctcgtggaagagcaccggccacccagccgtggcggcaacacaggcgcgctccactctcatgtcttgaccatcgacggtgagcgatacagcttcctaggtcttgggtcacagcagtgggcatacaaatctgacaccgtgtcttttgagtatgaggtcaagaatggctacaagaatattctcttggagacccttgttgtcatatccaaattcggtgagccaatagttcggggcaaccgtggtttcaagtccacgttgcgcacggcaggctcccgtatgcctgccagccgccgtgagcagcgcgactga

SEQ ID NO: 528922 - DNA, 843 bp, Stenotrophomonas maltophilia
atggcaatcttcgtagttgggctacccagcctcatcagggcacggctcgtcgcagaggcggcacgcaatggagttcacgtaggcctgtgcttgacggtcaaatcgaaccgtgggggatatgagttccaccccccaaatggtcaagccgtgtctgatcttgaggcgtttggtgacaacatcgaatggtcttcgatgactatcgttgtgctgccttacgtggcacttacggctgaaatggaagaagccgtcaggctgtatgcccaagatggagcgcgggtcatccgccccacagcgggccacggtgactggcctacatcactgcgcggcatcgacggcgacgacgatccactcaacagcgtatatcaagaagtttgccgagagctaggctggaccggcgtagcgtcgttggcacaacgatttgaaagcgcggccaagcgatgtagcgactacatcctggtgggcgatgcgctcgagcggtgcgatgaaatcgatccgtcgcggcacagctttgtaaagacctctgccgaccttcttgaaaagttttgcaagaaaaagggccggatcgagatgaccctggaagcgttctttaggcagaagaacatcgagctagcccagtctggtggcatcaatacctgcgttcgcctgatgaagggcgccaagcagattgcgcgttgcgactcgaacttgcaccttaagcaaggtgacgcaacgacagaagctgctgccgcaaggatctacttccagcacctcgataggagcgatcagttcaggctgttcctgctgtacgtcggccctcaccccagcaaagacatcgataggatggtggcatggcatcacaattag

SEQ ID NO: 528923 - DNA, 879 bp, Stenotrophomonas maltophilia
gtggacagtactcgtgcatggagacccctgctgattgagttgatgcagggcaagaccgaagaacccgccgctcgcttacggcagcttttgatcagtgaaggccagaaccgcggccttggcagctttgatcttcaagccatgggctatcgacgtttcaaagatttcctcgcggccttccctgacttgttcgagctgcgcacgcgagagggcggggagatgattgtgtgccctcgatcactctctcagagcatgcctgtagatgcggcccttgcgtcggccaggcgtgaaccgccgccggcgatccgagatgaagtctggattgctttctccaatccggatccgcgccgtgcgcgattcttcaatcgcttggacggccgcgtgttccacactttgattcaagaaggtcagtcacccgacagccttcggcccccaggcgactgggtgcgcattgaacaaatcggggcagagctgcagtcggcctggatgaaggaatttgtgtctgagcatccggacgtacctccgtcaatccctcctatgcttgaggagacttactcgacccctctcaatgtccgcttcaccaggtcactgggtccgttaggtaaagcttggacacagttccggctgcgaaagatgacccagcagatccattcctgggcaacgtcagtagaggtgcctatttcaaggcttgcgcctgcctctgtgccagcgcagcccgttcatacctcagttggacccgcccccacccctgtccttgatacgcgcgcgctttcagcgaaagagagagcgcttaagctcatcgatacgctctctgaagatgagatcgccaattacgtcatcccattgatggcatcggtcttgatggtgaagtctcgtcagtga

SEQ ID NO: 528924 - DNA, 825 bp, Stenotrophomonas maltophilia
atgtcatggggaatcagagcaggactgtttaggcgcaacggaaagactatcctagtgggcatgattccttgtaacccttccagttcgacgcccatgtctcataaggcgcagctcgccctcattgaggcattggaggcatgcttcgatgcttcagcctggtccaagctaggtatggagatggggttgccgcacctgactcactctgaaacccgattgcagaaggcattgcggttcaacgacagcgactacggaaccgaagtcgcacagcttgtagccttcatggctatgcagaagcctgacttgttgcgttccctcccctcgcgaccagtcctgaaggcgtggctggaacagaatgctcctgcttttgcacaggagctcggcttgagcgtcggccacgtgccggcacccattcgacgtctgagtgctagcgaagttgtcgagcgagcgttgaaggacgctgatcaactgctgcagacgaatggtgcagttagcgcactagatcgagtgcatacagcgttacatggttatctgctcgatgtctgcgctgcagctggcctaaaggcaatcccggccgcgccaattggatcgctattcaagacaatcaggaatgaacacccgagtcttgtggcaatgaacaagcatgacccgcaggtggacgtcgtactcggttcgttggctggggcggtcaccgcgctaaacactctgcgcaacaacgcatcggtcgctcaccccaatcaggtactgcttggggaaggtgaggctatgctgatggtgaatctcgtgcgcaccctgtttaactatctcgaaacccgactcgatcactag

SEQ ID NO: 528925 - DNA, 930 bp, Stenotrophomonas maltophilia
atggacagccccattaagcggtggcccgctgtcgccaccttgctgtcggccgttgtctgtgcttcttctgctatcgcatcaccagcagcgtcaactggtggcgtgttcatttcgctgtatccggctggcgcgacgcagccgctgggtgtgcaggagctgcacgacacgttggataccggcgagacactgatctacgacgtgagtgagccaaccctggagatgtaccggcccgcgcccggcaagcagaatggaacagcggtcatcgttgttcccgggggaggctttgttgcccttggctatgttcgcggcggcacggacgtggcccgcgctctggccgagcgtggcatcactgcctttgtgctgaaacaccgcacagtgcgcagcggcgatggaccgatgcgcattcccgcggtgcacatggaagagatggagcaggtgatgtcacgcgcccggacgggctcgcccgttgagatgccgccgtttgccggagagccaaaagccgtcgaggacggcgcgcgcgccatgaccatcgtgcggcagcgtgctggtgagtggggcgtcattccagaccgggtgggcatgatcggtttctcgagcggcgcttacctggctgcagatcttgccatcggccccaaggcgacacgtccggacttcgtagggctcatctacggcggtccgcgcacacccgtgcctgcagatgcgtcgccggcattcattgccggcgctgctgacgacgactatcagcccaacgatcccattctgctctacagcgcatggcggggttctggcgtaccagcggagctgcatatgtacgaacgtggagggcacggctttgaccttcacccgaagggcgtgaccagcgatctctggttcggtcagttcattgcgtggatgcaggtgcgggagctgatgccaacgtgggggaggtga

SEQ ID NO: 528926 - DNA, 2139 bp, Stenotrophomonas maltophilia
atgaaccacaaaaccctgatcagcaccgccatcgtcctggcactggcctgcgcggcgccgtcggccttcgccgaagaagatgcagcgccgcccgcgtcgcgtgcctccaacgaagcgcccagctggacgctgaagcccgtggaggtaaccgccacgcgcggcacctacaccgcctcggccacgtccgccgccacccgcaccgatacgcccatcaccgaagttccccagtcggtgcaggtcatcaccagcaccctgctgcgcgaacaagaccggcgcacgctgggtgatgcactggtcaacgtttccggcgtcacgcccacgcgctcggacgaaaacctgttcattccgcccatcgtgcgtggattccccgccgaggtctacctggacggcttgccgctgtttgcaggcaaccagcaagcctacgatcccagcggcatggtgggcatttccagcatcagcgtcctcaagggacccagtgcgacgctctatggcggtggtctcggcacgccgctcggcggcgtcatcaacattgaaagcgaacgcccggaccccaccgcgtccagtggttacgtttccctgcgcgggggcagcttctccacctggaacccctacgcggatatcaacgttccgctgtcttctactgtcgcagcgcggatcagtgcggagtaccagagaaacgatagctggatcgatgaggttcatggcgagcgccggtcgttgcaacccagcctgctgatgcagctgggcgacgccaccgaactgctgctgcaaggccagttcaaccgccgccgcgctctggagtattccggactgcctgctgatgcggccctggccggggtgctggaccgggacgccttccccggctcgccgcagggccagccgctgaccagcaatgacagcaggatgggtaccgccaccctgcgtcacgccttctctgaccgggtagatctgaccgtgaccgcgcgctacttccgcggcaaggtcgacgagagtggcagcttcgtcttccccggcctggctcccacggaaacggttgcacccgagtacgacgtcttcccgatcacgatggtgaaccgcaccaaggaagccacgctggatgcgaacctctcgatcaagactgacatgctgggcggggaacacacgctgctggccggcatcaactatgactggacaagcttctacagcggcatgggcctgttcatcagtgacagtccttccggcgtgatcaacctcgcagatcctcgttacatgcttcgctatacggcgcagttgccggtcaactcctacaccgatgatcgcttcacgacccttgctggctatatccaggaccaggccacctacggccgcctgcatctgaccggcgccctgcgttggacgtcgctgaagttcgtcgagaacagcaatatcggcgtggccaacgacaagaccttcagccatgtgtcgccgcactttggggcaacgtatgacctggcgccggggatcgccctgtttgcaggctacgcgaccgcgttccgtgcaccgttcggcttcatcggtcttgccacgccggagcctgaaacgtccatcaacgtagagggcggtctgaagctgtctttgcccgggcgcgggctttccggcactgtcgccgcattccggcagaagcgtgaggacgtggcggtgtccgacccgaacaacgtgggctactacatacagagcgggcgccagcgggcacgcggggtggaaatggacatggtatgggagcctacgccggccttctccctgctggccaactacgcacacaccagcacgcgggatgaaggtgcagcccccggggatcgcgtggcccgcgtgccggacaacagcgggcgcctcgccgcacgctatcgactgctggaagggccggcgaagggactggccttcggcgcgggggtcaccgccgtcagcgccagagagctgacgcttcccaacacccttgcggttcccggctacgccgtgttcgacgcccaggcgtcctacaacttcggacggttcacgcttggtctctcgctggtcaatctcaccggccgtaaggcgtgggatccatactcgtacatgggctacgccgtcgtagcacccaaccagccccgctcggcattcgtcacgctcaggatggacctctga

SEQ ID NO: 528927 - DNA, 708 bp, Stenotrophomonas maltophilia
atgaaccttcactcgctgaaatatctgcttgccaccgcgctgcttgcgctctccggcatcgcttctgcagccgatgctgcaaagacgccgtttgcgctgccggtcctgccctacgccaccaacgcactggagccggctatcgatgcgcagacgatggagatccaccacggccggcatcacaaggcctacgtggataacctcaatgccaaggtcaaggacttcccggcactggcgagcacatcgctggagggtatccagcgcagcatttcgcgctacgacaccgccgtccgaaacaatgccggcggccactacaaccacagcctcttctggacactgatggcacctgtcggccagagcggcatgccgtcgccggcactgcgcagcagactggttgagaccttcgggtccgaagaagcgttccgcacgaagttctcggaagcggctacgaaaatcttcggctcgggttgggcatggttgatcgtcaaggacgatggctcgctggccatcaccaccaccgccaaccaggacaacccgctgatggatgtggtggccgaacgtgggacccccattctggcgctggacgtctgggagcacgcctattacctgcattaccagaacaagcgggccgattacatcaaagcctggtggccgctggtcaactggcaacaggtcaatgcccgctatgacgcagccgccatcaagcgctga

SEQ ID NO: 528928 - DNA, 1434 bp, Stenotrophomonas maltophilia
atgaacgccaccgcctcccctgccgccgcggaccgcctgcgcttctaccgtgcggtgtggcggtggcatttctatgccggactgtttgtcctgcccttcatcgcctggctggcattgaccggcgccgtctacctctaccagaaacccattgatcgtttggtccacgcggaactgaaggtggtcgagccggttactgcgcaaaaggcagcgcccagtgctgatatcgccgccgtgcaggctgtgaccgagggcagtgtcttccgctacaccacgccggagcgtgccgatggcagtgtggagattggcgttgccgagaagaatggacgccgccaggtctactacgtggaccccggcacatcgcacgtgctgggtcatctgccggagaagggcacgttctcgggggtggtccggcgcctgcacagcctggatctgctgggaagctatgccagcgcactgatcgagatcgctgcgggctgggccatcctgctggtcgccacaggtgtctatctatggtggccgcgtggacagcgcggtggcgtgaccaccgtacgcgggcagccgggccaacggctgttctggcgggacctgcatgcggtgacaggcgtgtgggtgggtctggtactactgtttctggcggtaaccggcatgccgtggtcggtggtgtggggcaagcaggtcaacgcctgggccaatggacacaactacggctacccggccggcgtgcgtgtggacgtgcccatgtcgcgccagcgcctggccgacaccacgacacccacctggtcgatgcagcaggcccacttgccggtctccgatgtgtcgcatgccgaccacgcgccgaagcctggcaatgacggccatgagggacatgcggggcacgatgggagcgcttctggcgaactgtcaccgcaaccgggcgccatcggcatcgatgccgccatccacgcattcgaacgcttgggattggcacccggctacagcgtcagcctcccgcgcgggccgatgggggtgtacaccgcctcggtgtatccggaggcgctgggccagcaacgggtcgtccatctggaccagtacagcggaatcgtgctgctggacatgacctacgccgactacggcctgctcgggcgcggcctggaatggggcatcaatgtgcatctgggccaggaatacggcacggccaaccgcttgtttctgctgatcgcctgcctggccatcgtgctgctgtgcgccagcggcgcggtgatgtggtggaagcgccgcccgctcggcggcctcggcgttcctccgcttccgcggcagggccgcagcgttgccggcgtctttgcgctgttgtgcatcggcggcctgatcttcccgctggtgggcgcatcgctgctgctggtcgggctgcttgatttcctggccacccgcggctggcgcgcgcagccggcctcctga

SEQ ID NO: 528929 - DNA, 2040 bp, Stenotrophomonas maltophilia
atgaaccagaacctcactcgcaccacgctttcgctcagcctggccaccgcgcttggctgcctttccctgttgccgaccgatgcatccgcgcaggatggcactgcacttaccctgggcaccgtgcaggtaaccaacgacggctcttgggaccgcaatgcacgcaccgttttcagttccgtggacgtcattggcggcgatctgctgcagtcacagcgcgtcgagcacagttgggagctgctgatgaacgcgcccggcgtgcaggtgacccagttcaagatgggcaccgacgcagggcgattctcgttccgtggcttcaacggcgagggccgcatcaatgccgtgaaactgctgatcgatggtgtccccagcaacgacaacgccggaggcatgccctacctggacgcggtctggccgctggatatcaccgccatggaaatcgtgcgcggcaccaacgacgcgcgttacggactcaacgccatcgccggcgacgtcaacgtggttacccgccaaggcggcaatgacggccagctgagcgtgactgcgggcagtttcggcacgcaggacctgcaactggccaaaggtttcgagcgtggggcgtggtcgcagaactacttcgttggctggcggcagtcggccggtgagcgtgaccatgccgacgccacgcagcgcagctttgccggcaagtggttctacaccgatcccgacggcacctggcgcggcggcttgacgacacgctattacaggaacgtggcactggaagcgggttacctcagctacccggaactgcaggccgatccaaagcagtctccggattacgccaaggacgaccgcagcgaacgcgagacccgccagaccgcgttgcacttcgacggccgcatcggcaccgactggacctgggccgccaaggcctaccagaacgactaccgcaaccagcgctgggtcacctttaccgaaggcggcgcacagcaggagcggttcaacgatgaaacccagcgcggcctgatcctcaatgccacctggcggccggacaccgagctggccgagctggtggtggatgccggcgtggatggtcaatggcaggacaacatcgcccagcgctaccgcaccgtgcagcgccagcgccaagcgaccctgcgcgactgggacttcgatctggatacgcgcggtgcgtacgtgcaggcggtgatccgcccgatcgaccggctcaagctggtaccggcgtaccgtgtggatcgcatctacggtgacttcaccaatctctcctcgggcacgtcggtgccggtgtacgactatgggctgatcaagcagcccaagttcagcgcttcctatgaaatcagagaatcgctggtggcctacgggaactgggggcgcacgttccagatcggtagcggcaacggcgcctatcgcacgcagacgggcaatctgtcgccttccatcaatgaaggctgggaagcgggattgaaatggtcgccagtggcgggcctgcaggcccgcgcggcagtgtgggagcagaccgcatccgacgaggtggccacgatcctcggcgtgaacgggacaattggcaccaatgaggttggcaacgtaggcaagacccgtcgccggggctgggatctgcaggccaactggcagccggatgcacgctggcgggcgtgggcgtcctattcgcggcagaaggccaccatcgaagtccccgatccgagcgcaccggccacccgcggccggcagatcgagaatgtcccgaactggctggccagcgctggcgtagcgttcagccccacgccggactggacctacagtgcctggggtaacggtcagggtgactactacgtggagcgcaccaatacgttgggccgctttggcggctacgcggtgctcaacctgagcgccacatacaggctgaatttgcgcaaccagctttcgctgcagctgaagaatgccaccgatcgggcctatctgtacgcctggtatgacagcggctcctcgggctattcgcccggcgacggccgtgcgctctatctgacctggacgcgggagctctga

SEQ ID NO: 528930 - DNA, 348 bp, Stenotrophomonas maltophilia
atgcagcagcatgagggtggcgagcatcaccaccacggcgctggcgacgcgacagaaatgatgatgtccgccgaccacgaccaccctgcaatggtcgcgcacgtcgaggtgcgtccactgcaggatcacgccggcaaacgccgcaacgacccgcatgccgggcacgacatgggtgtggactgcgactactgcgtgatcgcagcgcgcatggtgagcctgctggtcgccctgttgctcgcgctgatcggctggcgcccgccacactttgcccgcgcctggacgctcagctggggttccagcattgccgccgggcacctcggcgcccgcggccctcccctgcgcgcctga

SEQ ID NO: 528931 - DNA, 363 bp, Stenotrophomonas maltophilia
atggacacctccgaatccgacgtctccctgctggacgagatcaaggcacttcgacagcaaatagcggtgctatgcgtcgatctgtcaggcaaggactggctaaccgcagacgaggccgcgcactactgcggggtgtcgatcagccagttcaaaacgaaggcccacgaatacgacctcgatccacgcgagttcatgggcaagaagctctacgagaagtctgccctctatcaggcaatctacggtgccaaggcttgggcgcgttcatcacccactgctgccaccaccctggtgacaacgtccccccagatggaagaagctcttgcccgtctacggcgctatgaccagcgtagagggaagcgctga

SEQ ID NO: 528932 - DNA, 1461 bp, Stenotrophomonas maltophilia
atgattagaaaggaagcaccccctgttgtagacccggcttcaccttggaagggagacatcttcgaccgggcacatgacggcaaagttctgtccaacctaattgcgaagagtgctgaccaggcactcaccatttctcttcaggcgccttggggcagtggcaagacggtgtttctccaacgcctaaaggcgcacatccagaatgagttcaaaattaaggccatttcagtcgacacatggaaatatgatcatcacggtgatcctcttgccccaattctagcgcagcttcttgacgtaattgaggaacgagcagaaaaacaacacccccaaagcgcgctccgaaataaattagaaaaggttggctcccaattagcggctacgggcgccaagtacatcctgcccgcgctaagtgctgcagccaaggtaacagtacccggctatgcctcgttggtggaaggcgcagaaaagattgcggcaagcctcttggagaggcagagagaattgatgaacgctgagccagccttcagatctgcccttgaggcggctagagatgcggtctccgctcgcaagccgaaaggtccgatcaggccgatcctcttcatcattgacgaactagaccgctgccgacccgactacgcgattcaaacgcttgagcgaatcaaacaccactttgatgtgccaggaataatattcatagttgcaacggaccacggaaatctccctgctgccgtgcaaacggtttacggagctcacgtaaatggggaggagtaccttcgaaagttctttgactttgaataccacctttcccccgcatcacgtgatgcggtaacgaaatacttaatcagcagtgccggacttggcttagagagtaagagcaccttagaagaaatcgttggacacccttcggcctttgacatcaagcaactcaatgaagaacaggtcgaagagctcgatagaattgagtatggctccttcttcaccgcgatgtcttcagcctttcaactctcccctcgcgatcagattagagcattcactttgatatatgcgttctatataacgcgtccgaagtcgttcgtcacaatcccgctccttgattgctttatcgcatgccttagattcggatcaccgcaaaattacatccaactgtcgtcgacaggtgtaatttctatccctagcacccattccatttccagcggccctaaaaatgatctcaactgcctgattgctcaaaactataacgaagtactggatatgtttgttggaaaccgagccaatcagagaaatgcactccatacagtgggaaagaaggtcaaagaatccagcgcaggcgcaaaccttagcgtgctcgcagcagccacctcattggccaggtgcaatcagttacgaggctttgattcctctgcctatatcgagtctgtgattcgcctgagcaggtctttgaacagggatgaggaggttggctaa

SEQ ID NO: 528933 - DNA, 912 bp, Stenotrophomonas maltophilia
atggaccgtccgaatctcgccaggcgcatcccgagctggttcaacttggaagcgtatgaccgactttcgagcctgagcgcaaatggctggctgtatttgcttgcagacttgcggatgctgctcgatgagcaagaaaactactacttggatgaatttgagcgtggcttggatctagaggctcttgaggcaactttcgtgcgcttccaggacggtgagcatgccaagtgggttgagtggaaaaaggaggactaccttgatagtccggacgtctactccttcggcagtgttcagtcattgagcaatagtgtcgtcgcccacatgagctccaggttagagaagatccccagtggtgccgaactgatggaaagggtgaggcggattgcagacttggaggataaaagagacttcaaaggtgcccatgacgctgaagaagacatccagcatttggaagaattcgggagaacacccttcttcgtctctctgagaggcgccgctgatctggctgaatccggtgagaatctccctcgagatagaactctttcggtcaaccttcgagctccagacgacatcctgcgcaaagacttcgatcggtggcttcaggcaatgcgtagccttcaggatcagcaggccgcgaagcgagtcttcaccgaaagcgatttcaagagatggatccgaaatggctacgtaccgcttctcgttctgagcaagtggaaagagctgacgggagcgaaaattacctatggggacctgtgcgaagctgcgtttcccaggatgcgcagggtagaagttgatgacgtgcgcaagaccctcctgcccaatgctagggcttgggctaccttagagacaattgatgccttggccgcacaagcggcaagcgaagagcaaaagtcccgccgggatgcggaagaatga

SEQ ID NO: 528934 - DNA, 996 bp, Stenotrophomonas maltophilia; identical to SEQ ID NO: 345543

SEQ ID NO: 528935 - DNA, 285 bp, Stenotrophomonas maltophilia
atgatcgagttggcgaaggccgggccgttgcgcagcaaccagaggaagaagccgaagaacagaatgaagcggatgaactcggcgaagaactcgccaatgtccgccttgcgcagcgccatgaagccgaacgtgaaaaccagcgagatcgtgcccaacgtccagaacaggaacatggcggcattcatcaccaccgtctgccaggatgtggcccgcgtggcgaactccgtcaccacctggtcaagcatcccctggttggtgagctgggccgatgcggcggtggagtaa

SEQ ID NO: 528936 - DNA, 240 bp, Stenotrophomonas maltophilia
atgccggcgtacatcaacagccagcccgagacgagcagcagcagcatattcacggcgacaactgccagcaggatcaggatgccgacgctcaaggccacaccgatgaagctatccacgggcgaccagatcgacgagtttgtgaatgcctgcttcaagatcatgaagccgatatccacgatgcccgagggtgtcaccgacgccaccccggacgcctgctcaccgatccgggccagtgactga

SEQ ID NO: 528937 - DNA, 186 bp, Stenotrophomonas maltophilia
atggctgatttcgccgccctgctcgccgcgtgcctgctgctgcccactgccggcgccaccatgctcagaatgtggcaaacgcgcccaccgcgccgccgccatagcggtctggccgtgggccagatcccgcaggcgctgcgtcgccgtgcccctatggccgtgcgccgcgctgggggtgctgcatga

SEQ ID NO: 528938 - DNA, 693 bp, Stenotrophomonas maltophilia
atgaccactgccgatcagctccccattccggttgtccgggtgtcccccaccggctctgccttcaccaccagcacggatgtggccgcattcttcgacaagcgccacagccatgtactgcgggccatagagagcctattgagcgacttgagggagcacgttcagtggcaagaccgggcggacgtggatgaacaatcggatgctgacgaccatcagcccaaaattgggctgatggtccccgaggatctcttcgaggcggcagaggtggaggtaagcatcggaagtggcgccatccggcgcgatccgatctacaacctgacccgtgacgggttcgccctgttggcgatgggcttcacgggcaggcaggcgctcgccttcaagctggcctacatctcagcgttcaacgcgatggaagccaggctgcgcgagccctacgtggcccccttggctgaggatctggagttcgcacggggtctgcgcgtcaaagacaagatcatgctccacgaacaggcctacagggcctcccgtgcgctgaccgccgccacgaacgacgacgaacgccgccaggcctattggcagctgtatcaggtcaacacaacccttggcattccaatgcccaccagggaagcattgggagtgacgcccttggccaccagcaaccggctgctgcgcggtccagaccggagtgatggctga

SEQ ID NO: 528939 - DNA, 411 bp, Stenotrophomonas maltophilia
atgctgaaagttctggtgcgggggatgttcctgtcagtgggtttattgatcctgctgcttttcctggcgtggttctgcatgcgccagtttgcaagccaccaggcggtggtgaaggacagcatagccagcggctcaggcaaatgtttactgaatacctattttcgaaactatgcggaactaggggtggcagggcgcgtggcatcggttttcggaagcacccatttctatcgagtctatagcgagtccggtgatttgctcgccacgtccgaatggaatataggcgaacacgaggtggacgtatttgccactgagtggcttggtcagacggccatgtatccgacccaacacggttgggcgagcttctcattgaaagagtgcgcggctgagtctgcgcagacgttgcatgactga

SEQ ID NO: 528940 - DNA, 762 bp, Stenotrophomonas maltophilia
atggtgtttggtccaggggctgcacttacatcgaatgttgcgaggtcgtacctcaactcggtcgctggaccggacgcggatgcggcccacgcgttcactccatccggatcgacaagccggaggatggttcctgttcgatgccattggaacagcttggcggcgatggtggctccttgccggccatcaaacagcagcagggttacagacccattggccgggaaggctatggatgaacccgagacgtcgatttcgaactgcgcggcgtctggtacttctgatgtcgacgccagcagaatccgctcgaaccaaggtaggccgtcgcgttcgcctccgccgatcttgcctccaatcctgccttccatccggcacttcttggtttcttcgcacgatgcgctcaactgccactccattggcccgcagccagtagaggtgagggtgataccgacagctgccacgataattcgtagattgctcattggtattctccatgttggacttcgattgaccgatcagctcaacctgctgtttcggcaatcaatccgtatcggctcaggctcgatcaggcaatcggaattgtttcaaatacctccagtagttggttcggagccacatttgacgcgccagacaaatgcacagttcgtgccaatggcgacacttgtgtctccagtcgcaccacgtggtggaggcgcttctgcgtcagcccatcaggtaacgcaacacgccggccgacaccacgccgatcagcaccgtgggcagcattga

SEQ ID NO: 528941 - DNA, 531 bp, Stenotrophomonas maltophilia
atgagaacgttggggtttttcctggtcgccattggctttgtgatgctgcttgtctcttgcaacatggatgtcagtgttgcgaccgacctcggcacgagggtcaacaacatcgggctcatgcaccagcagacgatgctggtgacaatcagccttgggctgttgctcatcggcatgatcatgtggatagctggtcgccgccgcccgacaaccgctcaacgtggcgaggcggtagtacgcacttacacgccagaagagatgcgggatctcgacgtcctactggccgacatgggctggactggaatctccctgcgtgccgatgacccgaaggtagttcactcggtagcagatggctcggctgcagcggatgccggcatcaattctggcgatcgcgtagttcagattgatggacaattcactggcaacgatctgcgggagaacatcattcggctttcaggagacgccggcgtaacggtcaagctcaccatccgacgcggtgacgccagcctaaagtttgaagttgatagacgatga

SEQ ID NO: 528942 - DNA, 294 bp, Stenotrophomonas maltophilia
atgagcaacgacatcaagaccctggagaacgcgcagcccggcgggagggtgaggctgagccgagaaccgcgcgcccatcgatgggacgacgtgggcgaacgctgtctcgattgtggcgacaaggactggatgggtggcccgtgcagcggcccgcaccaaccctccccaggcagcaagggagatgcgtgggccattaacctggcccgcgagtcggcgttcggccacatccctccggacgaaagctgtgattggtcgccgtctcgattccgcccggtcgaaggagccacgccttga

SEQ ID NO: 528943 - DNA, 741 bp, Stenotrophomonas maltophilia
gtgggtttgaaggaagacatcgaggccgaggtgaggggcgttatcgcgacgacctggagcccgcgaaactccgtcactgttcccaccccggaagacgtcgcgttgggttctggagcggtcaagatcgatgcggcaatgctctacgctgatcttgcggagtctacgaggattgcgatgagcctgcctgcgtggctggccgctgagatcgccaaagcgttcttggcaacgagttgtcgaataattcgtcaccacggcgggcacatccgcagtttcgacggagacagggttatgggtgtcttcgtcggggacgatagatgtgtccgtgcagcgaaggcctcactgcaaatttactgggtcgtcgtgcacgttttgaggccgaatttcaatcgttactcggcgttttcagacagcggcatcactatccggcatggtgtaggaatagacaccgggcaggttttcgtcgcgcggacaggtattcggcgaaacaacgatcttgtctgggtcgggcggtcgcctaacatcgccgcaaaactggcgtctgttcgagacgggtactacgcgacatacgttaccgaggacgtatttatgcagctcgacgactccacgtactacaaagacggcaacagcggtctagggagccagattatgtgggagcaatggcgatggcctgatgcgccttcaggaatgaatgccctcatgtacaggtcgtcttggacatgggtgccgcccagcggcgcctaa

SEQ ID NO: 528944 - DNA, 480 bp, Stenotrophomonas maltophilia
atggagtcatcacagagagcttggacgcatctgcaggtcgtcctggggatcttcccccgggtggacgcaatgttggccgttgtgctgggtgtggacacagcaatgtctggtgtttttttcgccaagtggccggcgccggaaaaggccggaccctggttggtgatccttacaattgcgttcgcgttgttcgcggcactttcatatcttgctatctatcgtgccgcgttcccaaacctggattcggccggtaggtcttcggtgttctttggtgacgtcgcgaaaatgacgcaagcggaatatgagcgatcactgcttgatgtgactgaccgcgaactcgctggagaaattgcgcatcaggtgtggaggaactcgtctattctgaccgtaaagttcaaataccttcggagggcacttggttggttgatggcctccgtcgtcccgtggactatcggcctactaacaatatccattgccaactga

SEQ ID NO: 528945 - DNA, 225 bp, Stenotrophomonas maltophilia
atggatcgcctgcccgaggggcgcgtcgcgattgccttggatctgctggatcgaaacgagatcccgatggcgctggatcagctctgttcagatatcgatgaatgcggcatggcactcagccgcgcggagtatctgcaactgtgcgatctcaacacggcgctggggcaacctgtagcgccggcaacgatgcgccgcctgcggaaactggatggagggtcggcttga

SEQ ID NO: 528946 - DNA, 231 bp, Stenotrophomonas maltophilia
atggagcagctgacgaaagagctagggcttgtgatcgacaagctgtggccgagttatgagcgcgctgccatagatgcgggcctcccgaagcagagcttgggtacggagcttgtgcttggcgattggtcgccgaagggtggacggatgctggcgacggcctacgccaagaacgacagcgcgattgtcgcggtcgtgcagcagctcgatggggggcctcgcttcgccaggtga

SEQ ID NO: 528947 - DNA, 600 bp, Stenotrophomonas maltophilia
ttgcaataccggccgcctctctggccttgtcgaacctgtagcggagcgctgcccgggcgatacgtcacgcgtgacttccaggccaaaagccccgaggtagcggtcaccggtccgaacaacaacttcggactcagcgttattctgaccaatctcggcggcaacaactggcgggtgtcagcctacacgggctcgtcgcttgtcttcggtacggtgtgggtacacgactcggttgtgactggaacgccgggcaagaccggaatcgagatctaccgagagcacaccggcgagctggcattcgcctcctgggcgaagcccctacgcatcatgggcgtaacgactgccccgttcggggcggcagagggcgcctatatgcaggtgccggccggtcggcgctacgcggttatctcgtctcgttcgtgccagtggattgagcgtggtgtggacacccgcctgaccgggccgcagggggatgggacgggtgaagcgggttcggggcgcttctactatgccggcgctgccgctttgatcccccagtccgacaatgcgatgcagttcagcgcatctggccatttcgcgctgatcgacgtgaccggccactaa

SEQ ID NO: 528948 - DNA, 405 bp, Stenotrophomonas maltophilia
atgtaccttggcccttcacttggacgttcctgcatcgaagccctccagagcttggcgctttctacgcttggcatcgccctgccggagtcctatctggacttcctttcaagccacgacggtctggcagcagagggagcattcctttactcgagcattccacgcccctattccgatggcggctcagcccttgcgttggtggaaatgaatctccttgcacgcgaccagggattcatggacggctatatagagctcggagagagtgatatggactgctatgtcttcgactctggaaccggcctggaccaagtccgcgacaaagtggcgttcgataacgtctatgaagagtttgcctccttcgacagacttctgtcccacatactcgatttgatagaacaacgctgttga

SEQ ID NO: 528949 - DNA, 894 bp, Stenotrophomonas maltophilia; identical to SEQ ID NO: 209473

SEQ ID NO: 528950 - DNA, 609 bp, Stenotrophomonas maltophilia; identical to SEQ ID NO: 342683

SEQ ID NO: 528951 - DNA, 633 bp, Stenotrophomonas maltophilia; identical to SEQ ID NO: 209471

SEQ ID NO: 528952 - DNA, 330 bp, Stenotrophomonas maltophilia; identical to SEQ ID NO: 209470

SEQ ID NO: 528953 - DNA, 315 bp, Stenotrophomonas maltophilia; identical to SEQ ID NO: 209469

SEQ ID NO: 528954 - DNA, 1476 bp, Stenotrophomonas maltophilia; identical to SEQ ID NO: 209468

SEQ ID NO: 528955 - DNA, 309 bp, Stenotrophomonas maltophilia; identical to SEQ ID NO: 209467

SEQ ID NO: 528956 - DNA, 564 bp, Stenotrophomonas maltophilia; identical to SEQ ID NO: 342689

SEQ ID NO: 528957 - DNA, 906 bp, Stenotrophomonas maltophilia; identical to SEQ ID NO: 209486

SEQ ID NO: 528958 - DNA, 420 bp, Stenotrophomonas maltophilia; identical to SEQ ID NO: 209485

SEQ ID NO: 528959 - DNA, 378 bp, Stenotrophomonas maltophilia; identical to SEQ ID NO: 209484

SEQ ID NO: 528960 - DNA, 1830 bp, Stenotrophomonas maltophilia; identical to SEQ ID NO: 209483

SEQ ID NO: 528961 - DNA, 786 bp, Stenotrophomonas maltophilia; identical to SEQ ID NO: 209482

SEQ ID NO: 528962 - DNA, 267 bp, Stenotrophomonas maltophilia; identical to SEQ ID NO: 209481

SEQ ID NO: 528963 - DNA, 525 bp, Stenotrophomonas maltophilia
atgccggcgtacatcagcagccagcccgagacgagcagcaacagcatgtttatggcaacgacagccagcaagatcaggatgccgaggctcaaggccacgccgatgaagctatccacgggcgaccagatcgacgagttgctaaatgcctgcttcaagatcatgaatccgatatccacgatgcccgagggtgtcaccgatgccaccccggacgcctgctcaccgatccgggccaatgactggatgatcgagttggcgaaggccgggccgttgcgcagcagccagaggaagaagccaaagaacaggatgaagcggatgaactcggcgaagaactcgccaatgtcggccttgcgcagcgccatgaagccgaacgtgaaaaccagcgagatcgtgcccagcgtccagaacaggaacatcgcggcattcatcaccaccgtctgccaggacgtggcccgcgtggcgaactccgtcaccacctggtcaagcatcccttggttggtgagctgggccgatgcggcggtggagtaa

SEQ ID NO: 528964 - DNA, 1389 bp, Stenotrophomonas maltophilia
gtggcgactggctgccccccctacctggcgcaggtcagcgatgatggtgccggtcgcccggagtcggagtacatcggtggaaagaccgtgtacggcggcagtaaccgcggccagattttcttcgtcaatcccgatggcagcgccgcgcagcgcctggccagctgcagcccacggctgggcttcaccgccgagtacgatccgaactgctacgccggcaacgtgctgggcgcgcagtcctaccgccacacccactacgacaacgaccgcatgggcgtgaccgccgacgtcgaatggcggcagaccttcggtgccgtcgacaacacgatccgcggcggcctgtggttggaaaagctggaccgctcggcgcgccgcgactggcatcgcctgctcaacgtaggccaggacatcgccttcgaccatcagccgtactgggtgcagttcgaagacaagtacaaggttgacgagcagatgtactacgtcgaggacgtcgcccgcttcggcccgttcagcgcacgcctgggcgtgaagcagttcttcgtcgaccagtcgcgccgccgcgtgatcggtgccagcgagcacgtcaaatccgattccaagtccgatccgctgctgtccaccggcttcacctgggcgcccggtgtggaaggcatggagctgttcgctggcttctcgcagaacttcgccgccattccctccggcgtgctcggcgagaccgacccgcagcgcttccgcaacgtcgagccggagaccgccgacaacatcgaagtcggcatgcgcatcagccgctggccgctgaccgcgtcgatcaccctgtacaacatcaagttcgacaaccgcatcgtctatctgccggccggtttcgtcagcggcatcgactacctaggcgagaccgacggtgtctacgagaacttcggtggcgtggaaagcaacggcctggaggcggcgttcggctacggctgggacaatggctggcgcctaaacgccgcctatacctacaaccgctccaagtacctgggcagtggcgatgccgcacgtgatacccagctgggcatcgtcgacggtgccaaggtgatcggccagcccgaacagaccctggtgctgtcggccgactggcagggcgaaaactggaacttcggcctgtccggtcgctacctcggcacgcgctacctcgatgccgccaacgtcaacaagctgccctcggccaccgtgttcaacgccaatatcggcttcgacctgcagggcctgtcgccgcgcctgaagggcatgggtgccaacctggtggtgagcaacctcaccgacaagcggtatcttgcaggggtggacggccgcgacaacgccttcatcggcgccccgcgcactgtcggcatctccttccgtgtggacctgtga

SEQ ID NO: 528965 - DNA, 1983 bp, Stenotrophomonas maltophilia
atgcgcaggattgtgctggctgtactgttgggcgcggttgtgggtggggcatcggccgcaacgctggacctggatcgctatctgcggcaggagtcgtttaccgacatcaagatttcaccagggggcgagtacatcgccgcgacggttccgctggaggcgggaaccgcattggcgatctaccgcattgccgacatgaagatggtcggcagcttccgcccgccccgcaacgatcacgcgcacaccttcgactgggtcagcaacgagcggctgctggtgggcatggcacagaagttgggcgtgctggaccggccgacgccgaccggtgaactgttcggtatcaatgccaacggcaagggcggcgagctgctggtggggtaccgggttgccgaccagagcctgggcaccaacatcaaggtcaagccggcaggcctggtggccgcctacctcagtgatgagctcaaggacgatgaccgcaacgcgctggtgacggtgatcccgctggtcggcagttcgcatgcgcaggtcgagcgcatggacgtgatcaccggtcgccgcaacgccgtggcgcgcgctcccattcccgatgcggacttcacgaccgatgagcagggcgaggtgcgtttcgcacgcgctgtcgttaccgatggcacgcagaagctctactaccgcacgggcagcaacagcgactgggtcctgctcaatgatgaatccctgagcaagcgcatcgaggcgccgctcggcttctcggccgatggtcgcctggcgtacctgcaggtcgagcaggcagatggacctgatgccattgtcagctgggacccccagagcaatgaacgacgcaccgtgctgcgcgatgggagtgccgacccggcgcgcatcatccggcgccccggcagccgcgtgccggtcggggccctgttccttggcagtgcgccgcgaacggcattcttcgatgacgcctcggacgacgctcgcctgtaccgcagcctcgaagccggcctgggcggagcggtctacatcacctccagcacgcgcgatggcaagacggtgctggtggaaacctggtcaggcagcaatccgggcgatttctatctctatgacacggttggcaagagtgcacggcacctgatcagccgcagtgactggatcgaccccgcgctggcggcggaggtgcgtccgatcagcctgacggcccgtgatgggcgtccgctgcatggcttccttaccgtcccgcatggccgcgaggcccgtgcgctgccgatggtggtggtgccgcacggaggtccgatcggtgttgccgaccagggcgcctatgacaccgagacacagatgctggcggcggcaggttacgcggtactgcaggtgaatttccgcggctcttccggctatggccgggcccacatgcaggccgcgcgaaagcaatgggggctgtcgatgcaggatgacgtcaccgatgccacgcgctgggcgatcgaacagggcgtggccgacaagaaccgcatctgtatctatggggccagttacggtgcctatgcggcgatgatgggggcggtgcgcgaaccgggcctgtaccagtgcgcggccggctatgtcggcatctacgacctgccgttgatgtacgcccgcggagacatccagagcgatgagtcaggcctggcctacctgcggaactggctgggatcgcccaaggatcttgcagagcgttccccggtgaatctggccgcgcaggtgcgggtgccggtattcctggccgcgggtggccaggatcaacgtgcgccgatcgtgcacagcgaacgcatggaagctgcgttgaagaaggccggcacgccggtggaaaccctgtacgtcaagaatgaagggcatggtttctattcccctgccaaccaacgtgcgtactacagcaggttgctggccttcctctcgcgcagcctgggcggccaggtggccgggcaggccgcacctgcggagaagagcagcgcgccctga

SEQ ID NO: 528966 - DNA, 1755 bp, Stenotrophomonas maltophilia
atgaattccaccgctatcgcttccgacgatttcctgggccatcccaagggcgtctacgtctgcttcttcaccgaaatgtgggagcgcttctccttctatggcatgaaggcgctgctgctgctgtacctgaccaagtaccacctgttcggcgacaaggccggcctggacctgctcggtgcctatggcggcctggtgtactgcatcccggtgttcggcggcatgctggccgaccgctggctgggcatgcgccgggcggtgctgttcggcggcatcctgctggtgctcggccacctcggcatggccttcgagggccacgccgcctatcgggtcaacggcgaagtggtgcgcgacacctcggcactggcggtgacctacctgtcgctggcgctgatcatcatgggcgtcggcttcctcaagccgaacatctccaccatcgtcggcaagctgtacgccaaggacgatccgcgccgtgattcgggcttctcgctgttctacgccggcatcaacctcggcgcgctgttctcgtcgctggtgtgcggcttcctcggcgaggcctatggctggaagtacggtttcggtgcggccggcatcggcatgctggccggcctggcgatgttcctgtggggccagaagtacctgcagggccacgccgagccgccgcagccggccgcgctgaagcagaaggtgctgggcctgccgcgcgaatggctcatctatctgtgcgcgatgctcggtgtattgccggtggcgtggctgatgtgggcggccggcaacggcgcgttcgcgctgggcggtgaaatcagcctggcactgatgctgatgctggtggtgctgggcggcgtgctggtctggttcgcctggttcaccggcagcaagtgcacgccggtgcagcgccagcagatggtcgcgctgatggtgttgatcttcatggcactggtgttcttcacgatgtacgagcagtcgtatggctcctgggtgaccttcaccgaccgcctgctgaccaaggacatcgtgccctcgctggtgatcaccggcggtaccccgctgccgtggtcgatcatctcgctgctgctggcgccgctgggcttcgtggtcagcgcgcggctgtccgagcgccgtccgggctcatctgcgccgcgaacgttcttcgccgccatcgtcgtgctgatgctggtgctgctggtgcgcgactgcctggtgattccgcagaccgccggctcgctgacctacctcggcggcctgttcctggtgctgctggcgccggccttcgccgcactgtggacgtggatggaccgccgcggctgggaaccgggcaagccggtcaaatcggcctggggcctggtgatcggcgcgctgtcgttcgtgccgctggcattggccgcacagcaggtcggcgccaccggcgagatggccagcgtgtggtggctggtgctggcctacttcctgctggccagcggtgagatgtgcctgtcgccggtcggcctgtcggcagtgacccagctggccgtgccgcgggtgatgagcctgatgatgggcacctggttcctggccaccgcattctcggaaacgctggccgcgctgttcggcaagctggccgcgatcgaggtgccggagggcgaatcgctggacatggtggccgctgccggcgcctatgcgcacctgttctggctgctgatgtggatcggcctgggctgtgcgctggccgccttcatcgccgcgccgctgctgaagaagatgatgcacggggtcaagtaa

SEQ ID NO: 528967 - DNA, 1002 bp, Stenotrophomonas maltophilia
atgacgatggtgctcctggtcggcatcgggaacgacctgctttccagcttctacgccaggatgaacaccggcacgctgaactttgaagagctgggcgtgatgctggttttctgcgtggcgttgctcatgctggtcaatcgcgtgccgccgctggtcgcgggcgtcatttccggtacgggcgtggggaacgctggcggcatcggtaatttcggcgcgggcgctgccatcggtgcggctatgggcgcggcgagcatggccgctggtgcggcaagcgtggccggtgcggccgtgatgggtggtgcaacctcggccgccggcggcatgtcggccatcaaggcagcgttcgagaaagcagggtctagcgccggcggtgaatcgggcggaatgcccatgctcggcggtggctccgactccggcagcgatgcaggctcgtttgcgcaagctgctggctttggtggcgggtcaagctcaggtgcgggcaccactacaccacttgcacaggccgccggtttcggcagcagctcgggcagcggtgccagcggctcgggcggcggcaatgggcagcagtccggtaaatcgggtggaggttccagctcgaagggtagcgacgaagccggcagcaagaaagcccagcaaggcggccagcaggccgcaccaggcagcaccggccccggcttgctggcctcggccgcatcggcgcttggcacggcgggccgcgtgacggccgacgccggcgcaaatctgatgcaaggcgtcggagaggttgcgaaggccaaggccgccagcatccgcgacgccgccgccgagcgcatcgccgacaccaccggcgggaagatcgcggcggcgatcagggcaagcgcggagagcgaccaggccagcgctgccgaggcggtgccgacattcggcggcaacaacctggcaggggccgattcggccgctgccgatcctgatgatgaagtggccgcgttcgccaaccgcgagcacggtaaatcggaggcgtga

SEQ ID NO: 528968 - DNA, 258 bp, Stenotrophomonas maltophilia; identical to SEQ ID NO: 209479

SEQ ID NO: 528969 - DNA, 234 bp, Stenotrophomonas maltophilia; identical to SEQ ID NO: 209478

SEQ ID NO: 528970 - DNA, 609 bp, Stenotrophomonas maltophilia; identical to SEQ ID NO: 209477

SEQ ID NO: 528971 - DNA, 366 bp, Stenotrophomonas maltophilia; identical to SEQ ID NO: 209476

SEQ ID NO: 528972 - DNA, 282 bp, Stenotrophomonas maltophilia; identical to SEQ ID NO: 209475

SEQ ID NO: 528973 - DNA, 282 bp, Stenotrophomonas maltophilia; identical to SEQ ID NO: 209474

SEQ ID NO: 528974 - DNA, 1002 bp, Stenotrophomonas maltophilia
atgacgatggtgctcctggtcggcatcgggaacgacctgctttccagtttctacgcgaggatgaacaccggtacgctgaactttgaagagctgggcgtgatgctggttttctgcgtggcgctgctcatgctggtcaatcgtgttccccctctggtcgccggcatcattaccggctcgggtattggtggcgcgggtggcatcggcaacttcggcgcaggcgctgccatcggtgcagctatgggtgcggcgagcatggccgccggtgcggcaagcgtggccggtgcggccgtgatgggtggcgcggcttcggccgctggcggcatgtcggcgatcaaggcagcgttcgagaatgcggggtcgagcgccggcggcgagtcgggcggaatgcccatgctcggcggcggctccgactccggcagtgatgccggctcgtttgcgcaggctgccggctttgatggtggttcaagctcaggtgccggcaccactacaccacttgcacaggccgccggtttcggcagtagctcgggcagcggtgccagcggctcgggtggtcgcaatgggcagcaatccggtaaatcggatggaggttccagctcgaagggtggtaacgaagccggtagcacgaaagcccagcaaggcggccagcaggccgcaccaggcagcaccggccccggcttgttggcatcggccgctgcggcgctcggtacggctggccgggtcacggccgacgctggcgcgaacctggtgcaaggcgttggcgaggttgccaaggccaaggccgccagcatccgcgatgccgctgtcgaacgcatcgcagacaccaccggcgggaagatcgcggcggctatcagggcgagcgcggagagcgaccaggccgccgctgtcgagtcggtgccgacattcggcggaaacaaccttgcaggggccgattcggccgctgccgatcctgatgatgaagtgaccgcgttcgccaaccgcgatcacggtaaatcggaggcgtga

SEQ ID NO: 528975 - DNA, 258 bp, Stenotrophomonas maltophilia
atgaaacgtagtggctttttcgactgcctgacgctcgaccaggcgcagcagcccgcggtggaatttgaacagcctggcgatcaatcaaccgagcttgatgcagcggcggaagtgacggccttcgttgatcgtcctgccccgtctgccttcgagatcaccaggccggccgccaggccatcgagcaacagctacagcggcagcaacaggaacacgccgctggccgaggccgccggcatctacagcagcggacagcgataa

SEQ ID NO: 528976 - DNA, 228 bp, Stenotrophomonas maltophilia
atggcaaccttgaatcctacccatgcaacgcaggcagtgcagcacgcagctatgcagctcgcgtcccttgactggctcgaccaggacgcggcgcggcagctctcaccgatggctgaggccgtcgccaatatgttcatggtgctgtactaccaggccgagacgggccaggcgacgcgggacgatttccgcgaggccctggatgccgtgcggctgtctctcgccgcatag

SEQ ID NO: 528977 - DNA, 459 bp, Stenotrophomonas maltophilia; identical to SEQ ID NO: 345541

SEQ ID NO: 528978 - DNA, 1068 bp, Stenotrophomonas maltophilia; identical to SEQ ID NO: 345540

SEQ ID NO: 528979 - DNA, 507 bp, Stenotrophomonas maltophilia; identical to SEQ ID NO: 345539

SEQ ID NO: 528980 - DNA, 474 bp, Stenotrophomonas maltophilia; identical to SEQ ID NO: 345538

SEQ ID NO: 528981 - DNA, 342 bp, Stenotrophomonas maltophilia; identical to SEQ ID NO: 345537

SEQ ID NO: 528982 - DNA, 660 bp, Stenotrophomonas maltophilia; identical to SEQ ID NO: 345536

SEQ ID NO: 528983 - DNA, 315 bp, Stenotrophomonas maltophilia
gtgttgtcggccgcatccgctcagacgatcacgtccactgcgttcgcggcgaagccggacggttggttcgtcggcggcttcatcaaatgggtgcagggcacggccatcgagtaccgcttcgtggtgggccatgttgggccgaccctcaccttgcttaccgcagcgccgctcgctgcgggcgcactggtgtctgcctaccccggctgtggccatgccctgcagatctgccacgagaagttcaacaacgcgctgaactacggcggccagcacaccatcccgccgaagaaccccttcggacctgatcccatcttctaa

SEQ ID NO: 528984 - DNA, 132 bp, Stenotrophomonas maltophilia
atgccacagcacgtggcgcaaccgctgccggtgaccctgttgcaaccgcatcggcagcaccgcgcgcaacgcgtgcaggtgttcatcgaatggctgctgccggtgctgcggagcggcctgcagctgcagtaa

SEQ ID NO: 528985 - DNA, 1326 bp, Stenotrophomonas maltophilia
atggctgcgtacgaaccgccacaacagcgctcgcgcctcggcctgcgcgccgcaggcgctcagcgccgaggcggccatctcggccaaggcctcgtcatcgggcagctgcgcctgcgcctgcagcaaccactgcgcctcgcgctcggggtcgcgcgcctggttctgttcaccctgcgcgtccagccatgccagcagctcgccggccggcaccggcagctgtgcgacatccggcaatgcatcgatgcgtgccgccaggccggccaccagcgctgccgccccccggtcctggcgcagctgcgccagatgggtgcgggccagttccagctggcgcagcgccacccagcgcgcaccacgctgcagggcaagctccaggctcagcgctgccacttcgatcagcaggcgatgcgatccgacccgggcgaagtgctcgatgatcgtgttgaagcgcgtgcccaggtcccacgtattgcgcgcagggtcacgctggcacagcgctgcggcggtgttcgcccacagccgccagtagttcggggtcagctcgctccacggcaccagctgctgcagcgcttcttcgtcgcggcccagctgggccaacgcccatgccttggacaggcgacgcggcaccgtgcagttggccggctcgtactccccggaggcggccacttcggcttcgcgcttctcgatcagcgccagtgcctcgtcggcgcggccgacagcgagcaggatcttgatctgcatctccgggaagctgtcgaacacttccttgccacaggcctccacggcgtcggcctgcgcctgcaggtaatccagcgcctcctggccacggccatcgtcgagcagcgcatcggctttctcgcagctcaggcactggaagcaggcccagctgggatcgatgcggccgagggtctcgtcgcacacctcgatgcgctcgggcacccagcccgggccatcgatgttgccgtagcaggcggccaggtcctgggtcacgcagatcgactgcgggcattccagggtgtcttcgcggtgtgcccgctcgaacagcgaaacggcttcgccaagcgcgctctcgccttcaacacggttgccgacgcggttgcgcagcgcccagtggccgacgtagacgtcgacccaggggttgtcgagcgccttgcccagtgcgcgtgcttcgggcagcagtgcatcgacacggtcgatctgcagttcactgacctcgtcggcgaggcggttcagcaggtgcgcgttctgcgcctggccggcctggcgcaggtcgccctgcagtttttcgacccagttccagatgtccatggggtaagtactcctgtctag

SEQ ID NO: 528986 - DNA, 438 bp, Stenotrophomonas maltophilia
atgttggattacgccattaaccccgcccacgaagcattcgttgtcattggatttggcccactcgcagtcctcgcatcggaccttgactcatcagctgaccgtgaaaatgatcttaaaaaactgatcattacatcgattgcggaaatgcattgtatgcgcgaagggagttccacgaacgttatgttgtctcgccttaatgcattggcggccgagacgttgacgaaatttgatgtcgaaaactatgacttcgatgaggttcgcaagctgtttgaagcgtgcatgtgtgttttcaccagcgagaagggggtgtgtttggagtggcttggtgacagccagaaactctttcgcaacgtcaacgaacaactcaaaaaggacttctgtgaatttgctgtggagtacgcgaaggtctatgcagtgggtatgagtgaggtcgggtga

SEQ ID NO: 528987 - DNA, 495 bp, Stenotrophomonas maltophilia
atgattaaaaacactattgctgttgcagcgttgtcattgctgtctgtgggctctgcttacgcgggaacgtcaaccgcgactgttcctgtcacaatcaaggttgaggctaactgtgaagttttagtggacggtgatatctcagcagaaattgatgctcgccaagggacacataacggaggctttattgaaagccgtcgcgtgtttgctacttgttctgatttgcttccctacaccgttgaaacaaatgcggacgcggaaggcaaaatctttgtcacaaacacatctggacaaaacaagacctattttgcaaccgttaaacacacggatgggcgtcctttctcaaccatcgccaacagcggtgagtggtccaacgtcgggaacgggcgctcgcaagcccttgattatgagtttaagtttgatgcgggagacaacggcgtgagtatgcttactgctggtgtgtacactggtgcgatcaacatgactttgactttctaa

SEQ ID NO: 528988 - DNA, 369 bp, Stenotrophomonas maltophilia
atgaaacagacactttttgccctgaccgctcttcccatgttggcatggggcgcacaatcaactccggtgggggcatatcttaccgttgagcaaacctgcgcattcgtccaggacacacccgcaggcagcctcattggttgcaacaaagaggaacctgtcactttggactgcggtgacgactcgtgcatgatcgatggtctgccgcttcccgtccaagtgcggcacaaagcggagtggaagcctggggacactgaaagcttcaagttccattgcgaccaagggatctgccacacggaattcgggccgcttgctgtcagcgccgatgtggatcacttgcgcgcatcggccgcgcaacggagccgccaatga

SEQ ID NO: 528989 - DNA, 762 bp, Stenotrophomonas maltophilia
atgatcgacagcgccgatgttcaattgtatttggcaatcacgacagacgatgtggctgttgttcgtgattacttaaaaggcggtatgtcaccggactacacgattgcgccaccaaaaatcatatttcatcactcccatcatcccgcacgaaatgttgatcggcggctcctggacctcgccgttgacagccacagcattcaagtggtccgagcccttgccaacgctggcgcaaacttggacctgggggctgggcgattggaccctgttgtcttccgtgctgttcccgacgttctccgtgttctgttggaatgcggcgccaaccccaacgtggtttcgcgcataggggacacgcccttgcacggcatatccaatctgttgcgttcgtatccagcggttgaacactacgtgcccacgtgccggctgttgctggaatttggcgcggatgtccacgcccgcgatgttacaggcgagacaccattgttgatggcgcttcgcaaagccagcgttatgaacacaagtttcggtgcatggtacagcgacgatcacatcgaggtcttgaaggtcgcacagatgcttttggacgccggagccgatccactcgccgaagactatcaaggcgtatcgctgcacacccactgccggcgtttggcgttccatgaaggcattgatcttcttgacgcccacattgcccaaacacaggccaatgtcatacacgctgccataggttcaaagtcggaagaaaagcagcgccgaaagatgtaa

SEQ ID NO: 528990 - DNA, 804 bp, Stenotrophomonas maltophilia
atgggaatatttgggtggattaaatcaaggatatttggcaatggcgtatccgctgccgatgcgctaacagaagacgaggttcggactaaggcgcgatatggaacacgacttgaggttgaatcgatgctgtcacagcatcctaaatgggccagcactgttttggatattgccattggctatgatcgcttgcctctgatatataccgccaaaaaatatggtggtgtgatcgatgatacttctgtgctggaactggcgatgtggcacggcgatgtcgatgctgcaatcgcattgctggaaaacggagcgcccctcccgtccaatatggaaagagctattgcaaatgtacatcaaagacgaagagcagggtctggcccttttcgtcggcttttaaaggctgtatttgaccgctatgacgtgaacggcattgatttcgcgcagcttgtaaatgagtggcgcggtgagcagggattgcgcgatatgagcgccttattgcacgaatttggatacgacttcttcaatgcgaaatgcgttagcattgatgtgtttcaggagcgagttattttgggttactacgaaggagagctttgtgatcttctgagttgggggcaaaagatcaactttgacggccggatgtttaaaaatccattgccccagcacgtaatttgtcgctggttgctgcttaaagacgcggctgaggcggagcaattgattgccgaccgcacagccacaaacatcacccaggcccttgttaacgaaggtcttgtgtcgggcgcagacacacccaagcccaaaagaaggatgtga

SEQ ID NO: 528991 - DNA, 1263 bp, Stenotrophomonas maltophilia
atgtctgttgctcaatcattgattggcttggtggatgggaacaacttctactgttccgtagaacgcgtgttcgacccaaagttgcgcaatgttccggttgtggtgatgtccaacaacgatgggtgcgccattgcccgcagcgaggaagctaaagcgctgggcgtgaccatggggcaacccatccatcaaatccccgcgcacatccgcaagcaaatcgcgtttcgctcacccaattttgcactgtacggcgatatctctggacgcattgccacgatcctgaccgacttgtttccacaggttgaggtgtactcgatcgatgagagcttcgtgtcctttgatgggatccgcgcccaggagcggcgtagggttgccatagaagcccgcgcacggatcttgcaatgggtgggggtgccctgctgtgtgggaattgggcctacgaagacgctggcaaaaatggcgaacaagatagccaagcgcacgccgcagggtgtctggaacgttcaccgcaaagacctgggcgacttcccaatcggtgatgtgtggggcgttgggaggaagtttgccgcgcgcctgacggccgaggggatccacacggctgcggatcttgttgccgccgatccacggggcatacaagagcgctatggggtggtattggtgcgcacccgcacggagttggacgggcagcggtgcagcgagctgcaggacgaagaaccccagcgccaacagatcgtggtgtcccgctcctttggaacagaaattgagagccatgaagacctggcgcaagcggtcgccaccttcgcgcagcgggccaccgagaagttgcgtgcgcgtcaactcaaggcgcatggggtgtgggtgtttctgcacacaaaccccttcggtgcaacccgccagtaccatccatccaaagcctttcgtttgctagcacccacatccgatagtagagaaatcctgtccgtcgtccaggcgttgaccaaggccatgtgccgtcccaatttccgctggaagaaggcgggggtggggctgctggacctcacgggccagacggtccagcaaggcgacctgtttgcccaggtcagcagtccaaaagccaacgcattgatggaagttatggacaaagcaaacaccaagttcgggcgtggatcgattggatttggatctgccgccgttgctcccaacagcgcagccaaatgggcaatgcggcagggacatctgtcacccgcctacacgacgcggtgggatgcaatactgagagctcggtga

SEQ ID NO: 528992 - DNA, 312 bp, Stenotrophomonas maltophilia
atggccagaaagatccacgatatcgacgtacgaacgatgaactccaccaaccgcatcgttgaaaacgtcaaacagggcgcaagtcccgacgcaattgcgctcctgcttgatgatgaagaccttgatgggaccttcgttcggaacctcgtcaagtttcacgaatctaataagacgaagtccgcttacaccaagcggaactacaagaacacaagtcgtatcactaagcaagttctggctgagaaaaaggccgagcctgcggtcgaacttccgttgtatgacccggatgccatcacttgcaagtttgaagaatga

SEQ ID NO: 528993 - DNA, 177 bp, Stenotrophomonas maltophilia
atggaaaacatcattaacgaaacaaacttaaaagtaatcggtggaaccatcgtcgcaatcgttgtggtcgccctgggctggaccatcttcaacggcttggtgagttcggtttcatccagcagcagcatgtttgatcgcgcagaggcaatcagcgcttccaccatcaaaggccgataa

SEQ ID NO: 528994 - DNA, 351 bp, Stenotrophomonas maltophilia
atgttgaaatatttatttgaccaatacaaaaccactcggagtatatcgctcggaacgcgggtctacgacttctacgggaagttcttgatcaagacgccgtttcacaagttccaggatgtgaacccgcacttggagcgtgagtattactacaaccgtggcgatcggaactggacggaagacattgaggagtcagagtccaattggcgagatacaagtttactgcttgcccaaatccgtgacgaagaggctcctcgtgtatcaaaagctgtgttcatgaacgccatagtcatcctgatgatacttgggggcatgtactggacacttttaaaactacttgcagggtctgtctaa

SEQ ID NO: 528995 - DNA, 1233 bp, Stenotrophomonas maltophilia
atggtttatggatcaagcaataatggtcacagcggatttatctccggaaccaacaacttcatcctttcggaaagtggcggcgcggtgtttggtgtctccaactacgagcggggaacgaacaactacctgttcgggcatgagaaccgcagtgccgaaacggcaagcagcaacctgttggccggaacgtacaaccaagtcagcggaacaaacagcactctggttggtcacttcaacaacgcaattggcaatggtggattggggctgggcaacaacacccaagtcaacggcgcttgcgtgtcgctgggcaattattccgagtgtggtgaggccaataccgtttcttttggtaatggaaacgccaatggcacaaaacgcttgctgttcgtttccaacggcattgccagcactgatgcggtgaacctcgggcagttgtctgctgtaagccagtcgttgggtggctctgccggcttcaccaatggcgtttacaacggttggagcgtgaacctgggcgggtcaacctacggcaacgttcacgacgccttggtggggttggacgggcgcctcacggcggtggaaaacaaccccggtggcggaacaggaacgcccggtccgaaaggcgaaaaaggcgaccccggtttacctggcgcacccggccgtgacggtgttgacggggctgccgggtccaaaggagagaaaggcgataagggcgacaaaggcgatcgcggcgaaaccggtttggctggtcaggatggcaaggacggaattgacggtgccaccgatccgttggctgtgaagtacgacgataagtccaagtccagcgcgaccttgcagaacgacaatggcggaacgacacgcgtttcgggtgtagctcctggtcggattgccgaaggctcctctgacgcggtgaacggtggtcagttgtgggaagtggaaaaccgctggaacgatcgttgggaagacaccaaccggcgtatttcacagcaagacagacgcatcaacagtctcggggcgcaatcgatggcgatgtctcaaatggcgatgtccagccaaaacctgccgatcggcaaggtctcgatcaacgttggtgcgggcttctatcgttctgagcaagctatcgccgttgggttcagcacgcagtacaacgagcgcattaggttcaacggtggcttgaccgctggaagtggtggagccggcttcggcggcggtgtcggtgcatcgttcaccttcgattga

SEQ ID NO: 528996 - DNA, 633 bp, Stenotrophomonas maltophilia
atgcgctacggacttatcgacggcaacaccttctatgtctcatgcgagggggtcttcgaccccaagctgcgaggcaaacccactgttgtgcttggcaatggggatggatgctgtatcgccctgtcgccagaggcgaaggccttgggattgaaaatgggtatgcccatcttccaggtccccaaggacatcagaaagcaggtcctcgtcaggtcagccaacttcgcgctgtacggggatctgtcagccaggattgtgacgattcttcaggatctcttccccagggtggagatctattcgatcgatgaaaatttcgtcgacctggaaggcctcaaagaccctcttgcggcctgcctggaagcacgccaacgcatcctgcaatgggtgggcattccctgctgcgctggcctgggtgccacacgcaccctggccaaggcaggcggaccagtccaagcgtgccgtccatgcgggctccttggccgtcttccatgccaccgcacagaacgtcaacgctctggccgtcgaggatgtgtggggagtgggcaggcgctacgccgaacgcctggcaggcgaaggggtaagaactgctgcagatttggccgcactccccaccgaccatgttcgtgcgcactatag

SEQ ID NO: 528997 - DNA, 378 bp, Stenotrophomonas maltophilia
atgaatatcaccgaattgctggacatgacccaagtgcgcacgcacgcggaatacgactcagcgctggcccgaaagctgggcgtgagccgtcagaccgtaagcaactggcgtgtgggcaggacgttcccggatgccaaggcgtgcggaaggatctccgaagccaccggcatccccttgaacgtgatcatgggtgtcgtcggtgaggagcgggcgacggaccaagaagaaaaggccgtgtggcgacggctggcaggcaaagccgcagcaatcctggtacttgtgtctgccggaacgttcgcacagccgaatgccgcgcaagctgctgtttcgcaaggactaatcggcggccacagcgacggtatgtatattatgttctag

SEQ ID NO: 528998 - DNA, 216 bp, Stenotrophomonas maltophilia
atggcctctctccgtaaagccatcgcgatgcttgccattggccttgtgtgtttctccctgctgctcgccgggttcaccgggtacgtgtggttgatgcttggcggcgatagcgtctacggcgctcttatcgcagccctcaagctgctttgtggcttcgttggggcgttggctatcgccaccttcatcagtgctgttctgcgcggtcgggaggcttga

SEQ ID NO: 528999 - DNA, 261 bp, Stenotrophomonas maltophilia
atgaacaccaataccaatatcgccgttcgtccgtccgccaagtcccgcgtcaagtccgctgccaccaagctgtcgtcggtggtcgtcggttcgctggtgtcggcctcggccttcgcacaggctaccgacatgccggcgagcgtggatgcagcggccaccttcatgaccaccaagggcggcattgccatcgccgtggctgcggccatcaccctgatcatgctgggcatcaccgctgccaagctgccgcgtaagggcagctga

SEQ ID NO: 529000 - DNA, 435 bp, Stenotrophomonas maltophilia
atggcagatgagaaaccgaaagcgatcgtgttgggggtcctcgatgaacatgataagcctgttggtgcgattgcagtgaccaacgacgatcgcttggacgttgaggcagtactgggcgatttccacggctgtttggatgaaatctcagaagcgtttgacatcaacgacgattccgctgtcgtcactgatgtcgccgaagcgtggctcgagtctggatatgaagcattcgatccagtgagttgcttctatgacccaagcactggaacgacggttagaaagcttgtgaagtttgtgggcggtcgactagacgccaagacggtagggtatatccgctttgaagtcggcggcgtcagcgaaatgagggttcgattggaagatgttcttcctctgacccctaaatccgcgccggcgaggcgcagtcctaagcccttttag

SEQ ID NO: 529001 - DNA, 342 bp, Stenotrophomonas maltophilia
atgagcgtgccgcctccccctctgcttgaccagtcggggcccgcccggcgcaagttgatcacaccccgcgacaggtttttctggtggtatgcgctttccctgctcttcttgggaccttttgggttcattgtcgggccgcttatggcccgacgcgcaagcgggaaggcggctcggctctacccggcagaagcccgggtggcccaggcgagggattcgggtttctcatggtggcagtggtgggtcatgaccgtcctgaccctgatgggcgcactgggggccttcgctgtcctgagtgggttgccgatgtttctcttcgtcatgtatgccaagctgattgagtag

SEQ ID NO: 529002 - DNA, 774 bp, Stenotrophomonas maltophilia
atgaagaacaccacaaggatggccgccgccttggcggcagcgctgttgctgagtgtccaagggatttacgcccaggaggccgcccagcccggcccggagtcagggaagcccggcttcttccggcagctggggaagagcctgaaggatgccggcggccaaatgatcggggtgaggcccactggggcttccgccagccacgcctctggcaaccagccgatctacgccccggtcaacggctcagggaagatcaaggacctcttcaagccggacaaccatcagctcgcacagcagggacggctcgactggccccgggtcgctttgacctacgttgagtggggcgcaacgctgccttgctggaccgtcgaggcgaagatctggaccagcgccagcgcatccacaaccgagaccttccggacctgcgcagatgcacctgtaacggtgacggacgatctcggcgacacggcggagttcaacaccgcagctctctggaaggggcgcgacactctcaatggcatccgtgtgccgtcgaacaaggccaacacgggggccagccgctctaccggccctaatccgccggcacagcccttcgtcgtcaatgtgtcccgtcccggcgtatccgaccgcgccgtcgatgtcgccctgcgcgtcgcctgggtctctgggttcatccagacttcggacctccatcccgggccaagcggcctgctgacgcctttcaaagatccgcgactgtggatcgcggggttcaagcccgacggcaaccgcgaccgctaa

SEQ ID NO: 529003 - DNA, 1053 bp, Stenotrophomonas maltophilia
atgtctgttgaacagcggcggcgtgcagtggaagcgcatcacaaagtgatagcaaggctccaaacggaaaagtcacgggagggagccaaagcggctgccgagcggaagaaggcgctggaggcctcagcggcggcgagtcgggcgacctctttgtccactaggatgacgaagctgaaagacgcgcagcggtctgaagtgagcgccgttgcttttgacaggaaggtcgcggacttggaggccaagattgcgcgtgagcaggtaagattgggtgaggcgaaccgacagcttggtgctgcgcagcggcaagaagagcagaagcggtcctccattcagaagcgcgagcgcgcgtcccaagtagcagagctttcacgcctccagggccgcctcagccgtcacgaccaactccatcgaagtacggccgccaccttgcagcgcttgcaggaacttcccgaatatctgacggtgctcttcctcgcgtctaatccaatcgatcagaaatcactccggctggacgaggaggcccgctccatcttggaaatggtgcgaagatcggagcatcgtgacgcagtgcggcttgagtctaggtgggcggttcagcctctagatgtgcttcaggccatcaacgaatgcagaccgggggtcgtgcacttcagcgggcacggctcggaagaggacgagattgtatttcaggacagcgaaggtcgagccaagctggtgagcaaggaggccttggtccagacaatgatggccgcttccggagacatccagctggtcttcttcaacacatgtttctcgaatggccaagccgaggctattgtttcccatgtgccttgcgctatcgggatgaacacgtctattggagaccaagccgcaagagtctttgctgctcagttctactcagcgatagggttcgggcattcggtggcaaaggcattcgaccaagccaaagcggccctgatgcttgaaggtatccctgaggagcggaccccagagctatttacgtcagtcggcatagacgctgcttgcctctttctggtcaatccacctagttaa

SEQ ID NO: 529004 - DNA, 3825 bp, Stenotrophomonas maltophilia
atgcatcctttcttcagaatccaaccagaaatgatccagcgcttggatgacgcgactgccaggcaactgatcggcaggctttgcgagagagacatagctcgctcagggttgcctccctgtgtcttctacggcggcgaccagagggcgactgacgatggagtggatgtcgagattacctgcaagcccacgaagcgattgaacgagaagctcacccgcagcgtagcgatcgtccaagttaaagcggagaagaagcctttcgggccacagagaatcaagggcgagatgcagccgaaaggtcgcctgcgaccgtgcatttctggccttgccaaggagcatggcctctatcttatcgtctcaacgaaagagaatccttcattcaaggtcaggacggctcgagttgaggccatgcgaggtgtcctagctagcaacggcctatccaagaaggtagaagtggacttctatggggcgcaggaggttgcgagctgggtcgaatcgcatccagctatagcgatttggctaagagaggtgctcggtcagccactgtcaggctggaagggatatgggccctgggcatacagggaaacaactctcgaccgagagttcatcttggacgaggaaggccgagtttcacttcctgggagaacggagctggggacggttgcggaagcggttgtagctatacgacgcgaccttagggctgggagcgcagtccggctcttgggcctttcaggcttgggaaaaacgaggctcgcccaagctctgtttgaccctcggattgagccgcatgagccagccctgtcgcccaacagtgcgatctataccgatatcggtgaccgaccctcaccctcgcctgaagagatgctgggagcgatttccctgtcagcaggcccaacagtcctggtcatcgataactgcggacaggacacccacaacgctctagtggaggcttgcatcaaggcatccatcagcctggccctccttaccattgaatatgacgtcagagacaagctagccccatcaactcgcgcctacgagctggaaggtgcatctgacgcgaccatagatgagatccttcgggaacgttataagcatctgagctaccccgaccgcgacgtgattgttcgagcaagtgatggtaacgcccgccttgccatggctattgccgagacggctcctcaatcgggccagctctcatctcttgaagatggcgaactattccgccgtttgtttcatcaacgggcggacacaggcgacgagttgctgcgctgcgcgcgtgctgccagcttgctctactccttcaacggagaggacatggaggaaggctcagaactcagggtgctctccgaactcgcagaagtctcgcccagcaccttctatcgccaaatggctgacctcaaacgaagagggctcttacagtcgcgaggaaagatgcgcgcgattctgccccaagcgatcgcaaactatctggccaatgagtgtcttcaagaaatcagtccatcaaaggttacagacagcctttttgacaacgccacatcgcgcgtcaaggcttcttttggcaatcgcctaagcaacctaggtaactctagcgttggcagtcaggtagtcacgtcttggctatcgaaaggcggtgctctttcaaagatagcgtctcttaacaacgaggagatgctcacgttcaaaagggttgcgccaataaacccctccatggcactcgctgcagtcgaagacttcttgcacgttggcgagctaggaaatcgcctggcacatgagattccggatctctctagcttggtgaacgccatcgcatacgatccagatcttttcagccggtccgtatccgcattgcaagcgctggtggggctggatcagtccacaaagggcgacaacaatggcaccagaaagaacctaaccaccctgttccaagttgtgcactcggggacacacgcccccattgggatgcgcactagcgcgatccgggagatgcttagttcacatgatgaacatgtatttgagataggactgcattgccttgatgcttcgctccagacacttgggctgtctagttcgggtaaccatcgattcggagctcgcagtcgagactacggctggaggccacaatcgttggacgatcagcagctctggttcgccgagttcttggcggttgcgggcgatttcgcctcctccgcaaacgagcgcggggcgcttgtccgctctacgattggaaagcgcgccaaggaccttctgcacttggacgacaagactatcgattcgctcgttcagctcacgcctgtcttccagacggaggatggctggcccgaggcttggactgcggcaaagctgttgctacgccgaacaaatattagtgaagacctgcgccgacgggtcgccacgtttgcccagacggttgcccctcgcgggctgcgccaacgtgtggtggcaaaacttcactcccgagagctctttgacgatgaagattttgaggtagatcaatacgtcgagcgggagcaggaatcccagttggaagcagtatctgttggcagagaactcgggaaggataaagcgctacttatggagatgcttcctcggcttatggaccgaggctcccgcggaatgcctttctccctcggccaaggtgtcgcggccgcaactgaggatatcccttcccttcttagcgccatcggcaggattttaggcgacaccgatgagtcgctcttgagcacgctttttctgcggggcgtaatgtctggctggtcggagcgcgacctgaaccagacaaacgcgttcttagacaactctatacacagcaatatctgggctcgctggtattcggaactccagttggcagtcgtctttgatgaccgcgccttagtgcgcactatagcggcgattgaacacggggcggctcctgttgaagatttcacttggcttagcatgggacgcacgctggcaccgcaccgggtcgttgagtttggaaggcttattgacgccctcgcgacaagagggataagtggcattcacactgcactcgacaccctgcatatgcaagtctacagctctaaggagttggcgaactctgagcagaccgaacttggggcttattgcctaagcttcttgttgcgctacgactggactgagttgaaggtcgaccaaaccatggtcgaacatgatttggaagaggtcttcgcttacaccgcaaggcatgcaagtggattcgattcgctcaaagcgctgatagataaggtcatcaagcaccgcagtggaggcagtcgcttcgcccggacctccaagggacgcttgatcggtcccgccctgaccaggtatccaagtgagtgcctgacttatttaatcagccacccactgttgagccaacctgaggatgctgccgaactactcttgctcgagagtcctaacgtagatcggggattgagcggcaacgtttccgacgaatctcttctgagctgggtcatggaggatccagagctgagggctagttttgcgatgagaatctgccgactggaggcttcctcgccccaggaggtagaaggcgaagctaccttcgcattggcacgcaggctctatgaactagccacggacaaagccgaagtgatcgccatccttggcagccgcttggtcagcagctcgttttccagccgggagattccatacatgaattccggcatcaacgttatagatgcattgcccgctccctccacgcacaaggaagctgaggagaggaggcggattcgagaagaactctccagccgcatcgagtggatgatcgaactgggtagacccagcaggagggagcctgaagggttcgagtag

SEQ ID NO: 529005 - DNA, 1731 bp, Stenotrophomonas maltophilia
ttgaagatcatcaaactggtggtccagaacttcagaggcatttctaatctggagtgggacaccgaccagcaacctctctgctgtctaatcggtccaggagattcactcaagtcgacagtgctcgatgctgtagaggcggccctttcatcacgctggttctcattcggtgaggcggatttttaccagtgtgacccttccaatggcatacgtattgaggtgaccgtcggggaactgtcgaaggctctcatctcggacgaaaagtttggcctttacatccgaggcttaactaacacaggggaaataagggacgagccggaagatggagatactccgctccttactgttaggttgtcagtagacgcaaccctagagcctctatgggaagtggtgaatgataggtcccagtatgcccggactctctcaaatagggatcgcgcgttgttccgcgtggtccgtttaactggtgacgacgcgcgccacttgacctgggcccagggttcgatcttgtcgaaactgacagagtcagacgacgaggctgcgcagcaactagccgaagcctatcgagcagcaaaatccagcgccaagttggacaccatccagggattggtggatgtcgcaagcgctgcccagcagcgcgcggtagaagtaggggcaaggatcaacgagaaataccgacctggtttggagttgggacgcggcggcttctcgtcaggatccattgcacttcacgacggtccagttccactgcggttagcgggcaccggcacgtggcggcttgccactttggccatccagcgtgccgcaatagacgaaggggcgatcgtgctcgtggacgagattgagcaggggctcgagccacacaggattcttggcgctattggacatttgaggagctctcaaaagactgccctcaaagctgggctcccaactggccagatcttgatcactacgcattcggatgtagcgttgagtgagatggaacccaaagcgcttttcgtgtgccggtccacggtcacgggactcaaagttttgcatccgcgagatgtgaaggcactggaacgggtcttgaagcactcgcccagggcgctctttgcacgcaggatcttagtctgcgagggagacaccgaactcgggctgatgctgggcctgcgcgaattctatccagggcggcgaaaaggtgtatccattgagcagcgcggtgccgccatcgttgatggccacggcactacggccccccaagtcgcagcagcattggccgcgctagggtatccgactgccctttttcgcgactcagatgttcccgtccccacggaccagcaaaaggcgctcgatctccactcggtgagaaccgtaacttacggttcaaagatcgctatcgacgaggcaatattcttggcagtgccgagtgacttagacgttgatgggttgttgaccatcgccgaagagttcaagggggctgcgacagtggccgaccagatcaacaaagagttcgcgaagattggaaatggtggtgtgggagacacagtgtttgctgactgggagttcgagcctcccgtagatcgaaagggtgtattggagcggctttgcaagctggcaaagaccaatggctggttcaaaaatcgatacatttcgaggcgcttggccgttatcgtcgataaatctgccttgaaggatgactggtccgaactggctctcgctctgcaagagattgaaagttggctgtatgcctaa

SEQ ID NO: 529006 - DNA, 1443 bp, Stenotrophomonas maltophilia
atgactggtccgaactggctctcgctctgcaagagattgaaagttggctgtatgcctaatcctgaagatctgctaagtatcagtctgggtagtgtggtcgcaccagcgggccatgggaagacggagctgattgctaggacggccgcgctgggccgccggacactcgtgctaacccacacgcacgcgggtgttcacgcgctccggtcgcgtctcaaacggctaggggtggatccaaaagtagccatgatagataccatcgcaagctggtcgactcgctacactgctgcgtttccgggtgtaggtcggccgctaggtcgtatgcctaaaggcggcgaatggactgacatctataaaggcgggctcaaggtcatcaaggtgcctgctgttggtgaagtgttgagggcatcctacgaccggatcctcgtggacgagtatcaggattgcgacttgcatcagcactcgcttgtgaagctactctcagagcaccttcctacaatcgtcttcggcgatcggatgcagggaatcttcaactttgacgatagcccaagcgtctcttgggacagggacgtcacgccgcacttcccgttgataggcacgctgcgggagccaatgcgatggcggagcgtcaatcctgagctagggaggtggatagctgaggtccgtgaatgccttgagcttgggcttcccatagatctccgagatgcgccggtgacatatctggcgtgcaaaagtgatcgtgatccctcgccgttgtttcatgagattgagggagtttctggctcgatcgccgccattcaccgttaccgaaaggcttgtgaccagcttgccaagtccactgggggcttctatcaagcgatcgaggatgtggcgtgtgttgaccttcaagattttgcagggtcgtgggacgctgcttcgggtccgcgaagggttgagttgttgcgcagcctcattgatctggctatatgcagaaaggctacagtcagcgtcgaggcggagcaggatgccgccgtcgaggtagagcttgaggcttgctacagctctcttgcatatacgggatgcgccaccttcgcagtcggtgccatagagtgcgcccggaaacactcactcgcacggacatttcgaggagagctgattcgggacgcaggaaaggccttagcgatggttgctcaaaagaaatgtgagaatctaacgaggagtgcgttcttggtccgtcagcgaatcagccatgctggccgattcatgcctgagaggactgtgtcgacaccactgcttttaaaggggcttgagttcgaccacgtagtggtcccagatgcaactcacttcaactctggtcgcaacctttccgatagagcaaagctgttttacgtagcgatatcgcgggctagatcgagcttagtcattgcgtcttccagtcccacagttcagttcccacttccggattga

SEQ ID NO: 529007 - DNA, 666 bp, Stenotrophomonas maltophilia
atgcgctggcgacccagggcgttgcggctgtcatccagcaccacgccatccagcagttcggccatgcgctgcaccgtcggcagcatcttctcccaggcatccagcgcggtcagcggcgccggcagggtcaggaagaaggcgatggccggggtttccatggcacggatgttggccatgtcgaagctgcctggcttcatgatgctggccatcgagaagatcggcccgcgctcgggatggccttccaccagacggtggaacacgttcatgtggccgaacaccaggccggtcttctccgcggctaccacgatgtcttcgccgcgcagctgctcaccggcacgggcggccacgaacagcgaaacgatcttgtcgaaatcctgggtggctcgcttgccgagatcgctggcgcccgggtcggtatcgcccaggccgagttcggcctgttcgccttccgtgcccatgcccggttcgacgcggccatcggccacgacaacgccgtcctcgcccaataccggttcgcggcgctcgccgctggccggttccgcgctttccacgcggcgtccctggggcttcttcttcggacggccaaacaggaagatcgcggcgatcaacagcaggccggcggccaggatgccgatgcgcaacagtgccgtgtcggacattcgatag

SEQ ID NO: 529008 - DNA, 519 bp, Stenotrophomonas maltophilia
atgaccatccaactccgacacgaaaccccggacgacgttgccgccatcgaagcggtcaccatcgccgcctttgccgatgcaccgcacaccagccacacggagcaattcatcgtgcgcgcactgcgcaacgcaaatgagctgacactttccctcgtggccgaagaacacggccaggtcatcggccatgtcgcgctgtcgcccgtggccatcaccgacggccacggccacaaggccaaaggctggtacggcctggggccgatctccgtgctgccgcaaaggcaaggacaaggcatcggcacgcgcctgatggaacaggcgctggccgaactgcgggacatgcaggccgcaggctgcgtgctgttgggggaacccacgtactacgcgcgctttggctttcaggcccatgcgggcctgcaactgccgggcgtgccgcccggctatttcatggcgctggccctgcatgggcgagtgcccgaaggtatcgcgcaatacagcgatgccttcaacgccgccgcctga

SEQ ID NO: 529009 - DNA, 762 bp, Stenotrophomonas maltophilia
atggtcaatcctcatcatgtcgcgcactggtatcccactgcggcttacctctatgtcctgtggctggatgcgcttgcgctggcttgggagtacctgcgcaggcaccccgattaccggctcgactggctgcgccgtgcgcgccgccccgatgctgcgcatcgctggggcttgcgcctgctggaagacccggcgctggatgcgcgcgacgcgcatccggcctggcagcccggccaagctgatgtggtgcagctctaccccgatgccgatccgccggcggatgccgagtccttcgcgttatggcgtatccctggccacaagcaacttctccacgatggcaagggactggcgctgatcgcgcgcagccccggccagtgcctgcgcttcgcgctcgcgcccggcctgcaagacggcatggctgtcgcctacgcccatcgcggcggcgctgccgcgcctgtgcgcggccacgcttccggtgcggcgctggccgatgcgcggcccaggccgtcgcaatcggcactgctggagctgcacaccctgcaggcgctcgacgcgacccttgcgggcgcgtccttgcgcgaggtggccgaaggcttgttcggcaccgatgccgcggcaggttggcacagcgacggcggcctgcgctccaaggtgcgccgcctggtgcggcgtggcgatgcgttgatgcgcggcggctatcgccacctagcacaactgcctccgcttgagaagggtcgttttgatgagggtgcaaaacgaccctga

SEQ ID NO: 529010 - DNA, 537 bp, Stenotrophomonas maltophilia
atgatcgctttcgctttgcctgccgctgacgcggccacgtcgccatcactcctagcacgcgcggcgcggcctatctcaacgccgctgacgcgcgtttcgctggccttcctggagcaccgtttcaagctctatctgcgctttggcgaaccggcgcgcacgctgcggctcgaccgctggcgcagtctcgctgtgttcctgccgaacgctgtgttttgccgcatccgctggcaagccaacgactacggcaccgtgcgctggcagctcatggtcatgcaggcttgcacgccgctggacgatgcgcagcgcatccccggcgtgcggcccggcgcgcgcctgctgctgcacgccgaaggtgagcaatcggtgcgcaccgtgctggagcgtatcgacgccatcgaggcgctgggcatcacgcccgctgctgcttcgcccgcgtactggcgcacgcttgccaaccggctcgctgcgcgcctgccgctgcccgaatacagcgccgagcggcacgccgcctggctcatcgggagggcgctgccatga

SEQ ID NO: 529011 - DNA, 588 bp, Stenotrophomonas maltophilia
atgaccgccgtttcgattaccggcaccgcgccgcgtcctcgctcgcgcctgcgcgctcgcctcgtgctggcgggcctgtccgcctgcggcctcgctgcgctggcctgggcgtccttcgtgcatccgctgccgcgcctgacctacaacccgtccgacagcgtggcggtgggctggtaccgcgtcgatccgctcgaccatcgcaccagctcgccgccacgtcctttgtccgtgggcagcatcgtgctggtgccgctgcctgccgaggctgccgcgctcgctgcgcagcgcggctacctgccgacgcgcattcctctgctcaagcgcgtgggcgcggtggcgccgcaagaggtgtgcatcgtcggcggcagcgttcgcatcgacggcgtgccttcggccgccgtgctgcccgctgaccggctgggccgcccgctgccatcttggcagcagtgccgccgccttcggcccggcgagctgttcctgctcagtgtcatcaatccggggtcgttcgacagccggtatttcgggccagtcagcgcagccgccgtgatcggcgttgcgcatccggtctggctggattcacgcccatga

SEQ ID NO: 529012 - DNA, 870 bp, Stenotrophomonas maltophilia
atgcaatccgctgcgcagatccaggcgtttttcgacgaagccacgaacaccgtgacctatctggtgtccgaccccgcgacgcggcaagccgccgtgatcgacccggtgctcgactatgaccaccgcagcggcaaggtgtccaccacatcggctgaccaagtgctggccgcggcagcgggccaggcgctggaggtggcgtggatcctggagacccatgcccatgcggatcatctgagcgcggccccgtacctcaaagcgcgcacaggcgcgcgggtggccatcggggagcacatccgcgacgtgcaagccatcttccggccagtgttcaacttggacgacgtgtccggcgatggaggagagttcgatcgcctgctacgcgatggcgagaccttgagcatcggcgatttgacggtggacgtgctgcacaccccaggccacacgcccgcttgtgtgtcctaccgcgtaggcgatgccgtgttcgtgggcgacaccttgttcatgccggactacggcactgcgcgcgccgattttccgggcggaagtgcccgcaccctgtaccaatccatccagaaactgctcgcactgccccccgagacccgtctgttcatgtgccacgattacaaggcacccaggcgcgacagctacgcctgggaaagcacggtcgccgaggagcgcgcacgtaacgttcacgttcacgacggtgtgagcgtggatgagttcgtggccatgcgccaatgccgggacgcgacgctggcagcgcccgcgctgctgctgccttcaattcaggtcaacatccgcgcgggccggtggcccgaagccgaatccaacgggatgcgctatctcaaaatcccgatgcgcctgcctgtatga

SEQ ID NO: 529013 - DNA, 312 bp, Stenotrophomonas maltophilia
atgaagctcaacaagaaggatcaatcgttcatgcaggacggcgcggccaacgccgcggccatgctgcgggcggtcggcaatgaacatcgcctgctcatcctctgcctgctgatcgagcacggggagatgaccgtcggcgctttgcacgagaacgtggcattgagtcagtccgccttgtcccagcacctggccaagatgcgcgaggaaggcctggtggcctatcggcgcgagtcacagaccctgcactaccggattgaaaacccggacgtggccaagctcatcgccacgctcaagaccatcttctgcccttga

SEQ ID NO: 529014 - DNA, 528 bp, Stenotrophomonas maltophilia
atgcccctgaaacccatctcgccccaagacacccgtgaactcctgagccggggtgccgtcctggtggacatccgtgcggcggacgaacatacccgtgagcgcatcgcgcaggcacgccatgtgcccatggatcgcctgcaagacggcagcctgccgctcgacggtgctttggcggtcatcttccattgccgctcgggcaaccgaacgcgggtcaatgcgccggcgctgcgggcatgcgcggcctgcgacgcctacgccctcgaacgcgggctggacgcctggaaaaaggcggggctgcccatcgtggccgatgtatcacagccgctggaactgcagcggcaggtacagattgccgcagggtctttgattgtgctgggtgcggtgctcggcgtcacggtatcgccttggttccatgcgctctcgggcttcgtgggggcggggctcgttttcgctggcgcctcggggttttgtgggctggcgcgtgtgctgacgcgcatgccctggaaccgcaacgcgctggccggatga

SEQ ID NO: 529015 - DNA, 198 bp, Stenotrophomonas maltophilia
atgaaactcaatgtcggcggtatcgatcgcattcttcgcatcgtcgtcgggctcgtgttcatcgcactggccgccacaagcgcagtgggctggtggggctggctgggcattattccgctcctgacgggggtggtgcgcttttgcccgctgtattcgctggtcgggctcaatacctgtccactgaagaccggcaaatag

SEQ ID NO: 529016 - DNA, 666 bp, Stenotrophomonas maltophilia
atgcgcatcttgatcgttgaagactccgaaacgctgtctgaggccttgaatcgcagtctcaagaccgagggctacgcttgcgatattgcagcggacggccaggctgcgctgcaatttctccaaagctaccgctacgacgcgatcattctggatttgatgctgcctcgtgtggacggcttcggagtattgcgggcgctgggcggcgatgccggaacggcccctgtgctggtgctttcggcgcgggaacaactcgatgaccgggtgcgcgcgctggatgcgggcgcggatgactacctgaccaagccctttgaactggcggaactgctggcccggctgcgcgccctggtacggcgcccggcgcagcgcgatacgcccgttttgcgccatggcgaactgaccgtcgatccgcgctcgcgcacggcgcgctggcgcggcgatgacctgaagctcacgcccaaggaatacggatgcctggagttgttgctgcgccggcagggtgcggtgctgtcacgcgcacaaatttttgagcacctgtacgacagcagcagcgatgcatcggacaaagtggtggaggtcatcgtcagtaccttgcgcaccaagcttgcacagtgcggcctggatgagttgatcgtgacccggcggggttttgggtacgtgctggcgtga

SEQ ID NO: 529017 - DNA, 1398 bp, Stenotrophomonas maltophilia
atgaagccgtttctcgctccatacaaagatacggcctggtcactgcatcggcgtctggctgtgggcctggtcttgtgcataggcggcaccttcgccgccgtattcccggtgttggatcgcctgatcgaccgggcgatctaccagcaaatggatctaacgctttcgcagcgtgccgctgccgtcgggcgcgtactgcaagaacctgatccgcagcagctcgaacgcctgatgcccgaatacgagccgggcgggcacaccgagttcttcaccgtcttcaacgaagacaacggccaggccgtgttgcgctcgcccagcagcgcgggtgccacacttccagtgggactggcggcgcaaggcacgccgcgctattacgacgtgacgctgcccgacggtcacgcaggccgtgcgctcgccacccatgtggcattgcatggcagccagaaccggctactggtggtggcaacggagcgcgaggggtgggatcagaccgagcggcgcgtccactttgcgttgctcatcggcatcgctttggcaaccttgctggcaaccggatcggcgctgctcctggtacagcgcgtcatcgtggtgttgcgccgcacgggtgccgcggcggcgcgcctgaatgcagaccagcccatgcaaccgctgggcggcgacttgccgcgtgaactcaagccctttgccgatgccttcaacctgggcctgcaccacctgtacaccgccatcgaacgtgagcgccaattctcgcgcgacgtggcgcacgaactgcgcacccctctggcggaaatccgcaccagcgccgaaagcgcactgatcgcgggcgaccccacccaggcccagcacagcctgggcgccgctgtgagcgccaccgcacgcatgcaacgcagcgtggacaccttgctgctgctggcccggctcgaatccggacaacacacacaggcgcccgatccgctcgatatggctgggttggtgcgcgaactgctggccgcgttggcgggaatacaggcgcgccgcgggctgaccatgcagaccgatctgccgccatcggcctgggtgcagggcgatctgggcgtgatcgaacgaatcctctccaacttgctgcgcaacgccatggagtacgcacccgatggcgatacgatcacctgccgcctggagcgaggcgatgcgggctggcttctttccatcggcaatgccgcgcccgatcttcatgaagacgacctcgaacaccttggccaccgcttctggcgcaagcaatccgaaggcggcaccgcacaccatgcagggctgggattggccctagcgttcgccctggcgcgagccatcgatctgccgctgcgcttcagcctgcaggatggcaagttgatcgcatggctgggcccctgggccgcgctggtgtaa

SEQ ID NO: 529018 - DNA, 696 bp, Stenotrophomonas maltophilia
atgaagttcatgcaccgcgagcgccaccgcacggaacatatcggctggctgcgcgctgccgtcctgggcgccaacgacgggatcatttccactgccagcctggtggtaggcgtcgcagcggcgcaggccagtcacgccagcatcatgacaaccgcggtggccgggctggtcgccggcgccatgtccatggcggccggagaatacgtgtcggtcttttctcaagcagacacggagaaggccgacctggcgcgggaacaccgcgaactgacggaaaaccccgaggccgaacatcgggaactgatggccatctacacacagcgcgggataacgcctgcgctggccggcgaggttgcaactcaactgatggcccacgatgccctgggggcacatgcccgcgatgagctgggtatctcggaagcgctcagcgccaagccgttgcaggcggcgctggcttccgccaccagctttgccgttggggcggtgctgccgctggctgtggtgatgctggcgcctggatcttcactgctcgcttggacggtagccacggccatcttcttcctcgctctgctgggtgtcttggccgccaggatcggcggcgctcccatgctcaagagcgcctctcgggtggcgctgtggggcaccctcgcgatggcaatgactgcgggtgtcggcgcgatttttggcgcagcgccgtag

SEQ ID NO: 529019 - DNA, 558 bp, Stenotrophomonas maltophilia
ttgatactcaagaactctagaaaccgctatggcacttctgtcatagccttgcactggctgatgctggtgcttctcgctgcggtttatgccagcatggaactgcgcggcttcgcgcccaagggcagtgcattgcgcgcgaatctgaaatcgctacatttcctgctgggcttgtccgtcctggcattggtggcggtacggctgtgcgtgcgttgggcggcaggcgccgcgccgcccatcgagccgcccatggcccgatggccagccctgatggcgcggctcatgcacgtcgcgctgtatgcgctgatgattgccgcaccgctgctgggttggctggcgctgagcacagccgccaagccggtgaccctattcggctttgcgctgcccatgctgacgggcgcgaacgaagcacttgcacaccccttgaaggatgtgcacgaaacgctggccacggcgggctatgcgttgattggattgcatgcggcagcagcactgctgcaccactacgtcatccgcgacaacacacttgtgcgcatgctgccgggccgcgactctcgataa

SEQ ID NO: 529020 - DNA, 1224 bp, Stenotrophomonas maltophilia
atgcttggtatctcccccattgcagcaccgcctgaaggcgcgccgcagaagaaacatcaacgctctgccatcccgcgcgtcgcagccatcgtcgtgaccctggcggtggtagcgggcgcaagctggtggatgctttcacgcccggcgaaggagccgatgacggaggcgcccgccatatcccccgctgctgacgggcgcatcacattggacgtggcgcaattgcgcgcgctcggggtggccacggcggcggtggagaccgccacgcagttgccggtgcctggcttgcccgcacaagccgccgcgccgctggccgccagcgcgcaagtcagcgcgccctacgcgggtgtggtcacgcgcattctggtcgatgaaggggcttttgtccggcaaggccagcccttggcgcgcatccagagccgcgacgtgctggctgcccagggcgaattggcccgcgcgcgcagcgaagccacggcggcggcgctgcaagccaagcgcgatgcggctttgctagccgagggcatcatccccgccgcgcgccacgaacagtcgcaggcgcgcatccaggccgcgcaaagcacgttgcatcaagccacgggcgcgctggcgccactgcgcccggtggcgggcggacaggggggcgaatacgaactgctggcgccgatgtcgggccaggtggtgcggcggcacctgatgccggggcaatcggtggcttcgctcgaagccgcctttgtcgtagccgaggcgggccgcatggacgtgaacttcactgcgccgctgcgcctgcgcagcgccatcaagcctggcctgcccgtaggcctgcccgatggcagcgtggcaaaggtggtggcggtgggcgcggatgccgaccccgccagccagagcctgcgcgtgcgcgccagcatcgaggggcagacggcgctcgccgtgggtcagcagttcagcgtgagcctgctgctgcccgtgcgtgcgggcgcactggccgtgccgccgtcagccttgttgcctgccggacaggggcatgtcctgtatgcggcgagcgatgcggtgggcggtgagaaaggtgcgatgcgcttgcgcgccgtggctgtgcaactgctgggcggggacgagtccgtcagcgtggtagtgcccggctccaaggacgggtccaccgcactggcggccggtgagcaggtcgtcacgcgcggcacggcgctgctcaagtccatgctgccgctgcagtaa

SEQ ID NO: 529021 - DNA, 3093 bp, Stenotrophomonas maltophilia
atgctctctcgcctcattgaattttccctgcgccagcgtctgctggtgctgctggccgtgctcgccctcgcgggcgcgggcgtggcctcgttcctgcaattgccgatcgacgcctacccggacatctcacccacccaggtcaagctaatcctcaaggcgccgggcatgacgcccgaagaggtcgaatcgcgcgtcatcgcgccgctggagatggagctgctgggcgtgccgcgcggcgtgatgctgcgctccacggccaagtacgccatcgccgacatcacgctggactttgccgagggcagcgacatctactgggcgcgccagcaggtggccgagcgctacgccgccgtcgcgggcagcctgcccgaaggcgtggccggcgggctggcaccgatctccacgccgctgtcggacgtgttcatgttcaccatcgaaggcggctcgctgtcgttgagcgagcggcgcaccctgctggactggacgctgcgccccgccttgcgcacccttcctggcgtggccgacatcaacgtgctgggtggcgaggccgccagttttgccgtggtacccgaccgcgcgcgcctgtccgccgccgggctgagcttcgccgacgtggtggcggccgtcagccgcaacaaccgcaatgacggcgcgggccgcctggacgcgggggaaaacacgctgatcgtgcggtcggacggcgcgatccgcagcgcggaggatttgtcgcgcgtggtgctgcgcgccgccacggacagcacacctgccgtgcgcgtgggcgatgtagctgccgtgcgcatggaggggctgactcgctacggtgccgtcagccgcgacggccagggcgaggcggtggaaggcatcgtcgtggcgctgcgcggcgctgatgcgtcaacgctagtgaaggcgatccgcgcgcgcctggatgaactcgcccccagcctgccgccgggcgtgaaggtggtgccgttctacgaccgcagcacgctcatccagcgcgctgtgggcacggtggaaagcgcgctgatcgaagcgacggtgctggtcgtcgtgctgctcctgctctttctgggcgagttgcgcgctgcgctggtggtggcgctcatggtgccgctggctgcgctgggcaccttcctgctgatgcgcatcgcgggcatgagcgccaacctgatgagcctgggtgggctggccatcgccatcggcatgctggtcgatgctgccgtggtggtggtggaaaacgccgtcagccgcctcgacccgcacatcgatggggcgcaactgccacgtttgcatcgcgtgttcgccgccgcacgcgaggtggctctgcccgtggcctcgggcattctcatcatctgcttgaccttcgtgccgctgctgaccttgcaggggcttgaaggcaagttgttcgcccccgtggcgctgaccatcgtgttcgcgctgggtgtctcgctgctgttgtcgctgacgctggtgcccgtgctgtcgtcgctgttgctcaaggagcacgcgcaccgcgagccctgggtgatgcgcggcgcattgcgcctgtatcgcccggtgctggatgcggcactggcctacccgctgcgggccacggccgtggcgctggcggccctggtgctgggcgtgttggcctacctgggcaccggcaaggccttcatgccgacgatggacgagggcgacatcctgctgcaactgcaaaagccgccctccatcgggttgaaccgctcgcgcgacatcgacctggcggtgcagaaagccatcctggccacagtgcccgaagtgcagcacagcatcgcccgcgtcggctcggacgagctggggctcgaccccatgggcctgaacgaaaccgacatgttcatgcagcttggcgaccgcaagacatggcgcatggacaaggaagcgctgagcgaggaaatccgcaaggtgatggcggccttccccggcctggatttcggcttcacccagcccatcgagatgcgtgtctccgaaatgctgaccggcagccgtggcgacgtggctatcaagctcttcggcccggacctgaacaccctgggcgagctggccgtgcgcatcgccgccagcgtcgagaaagtgcccggcgcgcgcgacgtgctgacgcaggccagcgaccgcgtcgagtacctgcaagtgaaggtggacgcccaggccagcggccgtgcagggctggcggtgacggccgtgcaggacgagttgcgtgcgcagctcgaaggcgttcccgccggcgtggtgatcgaggccaaccggcgcacgcccatcgtggtgcggggcgacgcgccgctgcgcggttcggccgagcgcttcaaggacttgcggctggcccgcagcggcgcaggcggctccggggacatcccccttacgtcgctggccgccatcaccaccacccagggccccgtgctggtgcggcgcgagggcggatcgcgcttcgcgctgatccagtccatggtgagcgggcgcgacctggtgggctttgtggatgaggcccgcgctgccgtggcgcgtgacgttcccctgcctgcgggctaccggctggaatggggtggccagttcgagaaccagcagcgcgccgccgcccgtctggggctggtggtgccggtgtcgctggcgctgatcttcttcgtgctgttcatgaccttcggttcgatgcgccaggccgtgctgatcctgggcaacgtgcctttcgccctggtcggcggcatggccgcgctgtggacgtcggggcaatacctgtcggtgcccgcatcggtgggtttcatcgccttgctgggcatcgccgtgctcaacgggctggtgctggtcacgcacttcaaccacctgcacgcgctgggcctgcccttggatcaggtggtgcgcgaaggctcgctgcgccgcttgcgtccggtgttgatgaccgcctccatcaccgcctttggcctggtgcccctgttgctgtccaccgggccgggctcggagatccagcgcccgctggccatcgtggtgatcggcgggctggtcagctctaccgcgctcacgctggtgctgctgccggtgctgtaccggcgcttcgggcaatcgatgaaaggagccgccgcatga

SEQ ID NO: 529022 - DNA, 321 bp, Stenotrophomonas maltophilia
atgagcgcgcagcatgaaaccgaatgggtgcgcctgaacctggtgttccctcccgcgctggaagaggccgtgacgggcgctctgatggctgaccccacgctgccgggcttcaccttgctgcacgccgaggggcacagcagcgacttcgcgcacgcctccatccgcgagcaggtgcgtggccgcgtcgaccggcgtgtgctgtgggtcgtgatcgagcgcgagcgcgtggacggccttctggccgcactgcgccagcgcattgcatccagcgacgtgcgctggtggatggagcctgtcgtggcgatggggcgactgatatga

SEQ ID NO: 529023 - DNA, 1287 bp, Stenotrophomonas maltophilia
atgaagtttctttctcctcgtgcggcagcggccctggcctgcatcccctggtttgcgctggcgcaggaacccgcgcctgactggctccccccatcggcccaagtccacgctgccttgcgggcgcagcccacggtgcgtgcggcgaccgaacgcgcgcaagctgccgaggcgacccagcgtgccctgagtgtgggcagctatgaatttcaggccaactcgggctttcagcgccgcgatgtcaccacggagcagcgccgctacaacgaatgggaaatgggcatcagccgcaccattcgtttgccgggcaaggctcggctggatcgggaaatcggcagcagcacgcgcaacgtggccgacctgcggctggaagatgccgagcaccaagtggcccgccgcctgctcgatgcctggatgggctggctgcgtagcaatgccgtggccgaagagacggcggcgcaggatcaactgctctctcgcgagcgcgatgccctggtccgccgcgtggccctgggcgatgcggcacggcgcgagatggacgtactcgacgccgagcgcgccacccaggccgcgcaaaccctggtggcgcgcgacgcggcactggcggcccggcagaccttggctttggggttcccggaaatcaccgtgccgctcaccgcagcggcgctgcccgagccgcaagagctgcccgatagcccgcaagcctggcgagagcgcatcatccgggaaagcgccgagatcgcgattgccaacggtgaaaccacgcgcctgtcgaaggtggcagaacgcgtgcgagccgatcgcacgcccgacccaaccgtgggtgtgcgcgtcctgtccgaccgcggcggcgcggagcgcgttgtgggggtggtgctctccatacccttcggcacggactaccgcagcgcccgggccgccacagagagtgccaacgccgcagccgccgaagccgaggcggccgatgtgcggcgcgccatcgagcaaggcgcatggctagccgtccaagccgcgcaaagcaagcgtgcgcagtggcagtcgcaccagcaggcgctggccgcacagaccgccgccaatacccgcacgcgccgggcgtgggaactgggcgaggccccgctcggcgaatacctgctgtctctgcgcagcctgcggcaggcccgcctggcggaaacgcaggcacgagtcgatgcgctgcaggctgccatgttggtgcgcatcgatgcgcatgcgatgtggcattcggagggcgaaggccatggtgaaaacagtgctcacgcggtttcgccatga

SEQ ID NO: 529024 - DNA, 345 bp, Stenotrophomonas maltophilia; identical to SEQ ID NO: 495525

SEQ ID NO: 529025 - DNA, 177 bp, Stenotrophomonas maltophilia; identical to SEQ ID NO: 511045

SEQ ID NO: 529026 - DNA, 150 bp, Stenotrophomonas maltophilia
atgtcctccatcacctttagggaggggttggctttgccagtagtgagatcggacaggaaggagatcgaaacccccgacctgtccgatagctcctttttcgtcatgtgccgctcatcgagcagccggagcacgttcgtgaagaagatgtag

SEQ ID NO: 529027 - DNA, 306 bp, Stenotrophomonas maltophilia
atgaatatccaaaaatctaacgtgagtaagcaagacttgtcgaaggctgcgcttgttgtgggaatggtggtccactccacgcgccattcgcagatcaaagccgacatgcggaaaggccattttcagcgcaacttgagtgagtggatgcaacgctctggagcgagcgcgtcaatcgtctctaaggctttgaaccgtctcttgaagaaccccacggagtgggatcgcgtgggccaatccaccttcccgctctacaacaagctagctgcgaacgaggctgtcgcagcggttgttgataacgaggcctaa

SEQ ID NO: 529028 - DNA, 597 bp, Stenotrophomonas maltophilia
atgagtgatgttactgttgttgttgagggtggctttatctatgtccgttcgccttggaacgcggatttcgttaaggaagccaaagaggacttcagcgggaagttcgttaatgggcagtgggtattcgacattcacaacgagaagcgcgttcgtgaggcgctgatggagaactacggttgtgacggcatcacgactgacacctgcacggtccgcgtgaccctggatgcagatgacgatagctcttgtggccccatcaccgtttgcggtcgatccattgcccgtgcgcgtgggcgcgacagtggcgccaccctgtccccgggtatcgtgatcatcgaggggggcttcacctcgggcggatcggtcaagaactggaccactaaggttaagaacgggcacgccgttgttctgatccgggacttcccgggtgttgttgctcgcaggctggtagcgaaaggtaaagagtggatcagcatcgagcagggagtgccgagcatcaaccgcgacgagctggaacaggagcgcagccgcctgctgactcgcctagcagaaatcgagaagctcatcccagccgtccaagccgagcagttcagtgcctag

SEQ ID NO: 529029 - DNA, 315 bp, Stenotrophomonas maltophilia
atgactaccttcatgcaacttgtgtatctgacctttgcgtgtttgctgatctactacgtgccattcttgaccgctcgatgctttatcggggttcgtcgcgcctacaaggcagattcacccatggatgctgaggttgccccgctcatcgtgggattgctgatgggatggattcttctgctggcgtgcctggccaaggtcatcgacacctttgtgaacgaagggccgttaggggtatgggtgctcagtttctaccttctcgtcaatgcctggcgcttctctgtaggtcttcaagaagtcgggggagacaagaaatga

SEQ ID NO: 529030 - DNA, 234 bp, Stenotrophomonas maltophilia
atggacggtctcggttcggaccactcgcagaaattcagacaaggcagggctttggaagccgcccaacgcaaagacgtcaaatatggcaaggaggcttccagagagaagcatccggaagggaagcggactaggattcgggatgaattgagtggcgaagatcgaaagcggatagacgacgcaaaggatgaggaggaagaccagaagaccttcgttccaatatcggactggggttga

SEQ ID NO: 529031 - DNA, 1218 bp, Stenotrophomonas maltophilia
atggccaatccataccaggccggtcaggccctgggcgccgcgctgttcggcagcacgcaggacacttacaccaaccagctggaccgcacgtatcaggtcgagcaggccctgcaggaggcccgccgggcgcggtcacgggcagtgatggccaaccagaatgcgacctcccgtcagggaatcaccgctgatctgatcgggcgagctagagcgggtgacgtggctgctctgaacgagctcacggccctcggtctgacggcaaacgaaaccatgagctttgatgccttgggaaagactcaggaattcgggttccgtcaggctgctcgcgacaaagcagtgctgggagacccactcaatcccaactccgagctcttcggcatcgcaaaaggcccggtcgaaacgacaaagatttccgacggggtggcgtacagccccttgggttcttcctcgcaggcggtgaacgtgacgccgctgggcgaggcgtccattggccagcgcagggctgccgcggcagcctcatgggcgagcgcgggcaactccaatgctagtgcagccaggacccggcaggccatggccctagatcgcgcagatgtgctgggcggcggaggcgggaggccgtccagcaaagcgccagctggctatcggtggaacgcatcgggcggcctggaatttattcccggagggccggctgatcccgcgaacaggtcggcaggaacaccgaccgaggatgagcgcaaagcggcaggctggctgggccaggctacccgcgcactcagcaacatggaggagtcgctgtacaagaaagacaaggatggcgcattcattctcgacgctatgggacaacgcatcccaacgggcgccgacactcccggcttccttgagcgctactcgccgagcgatgagcttgggaaccgaagcatgagtccagaccgtcagcggtatgccaacgctgcatcctcactctcagaggcattacttcgtgccgcgaccggcgcaggcgtcaatgagtcagaggcgcggcagaaggtcgctgagttgactccacagcgcggagactccgaagcagtgaggaagcagaagctggaaggggcggcgggatacatcgaggacctgcgctcgcgcgctgggcgtgcacttccggccgccgcgcgaaccctcggagatccaccggcaggcggaatccgcaagcgctacaaccaagctaccgggaggattgagtaa

SEQ ID NO: 529032 - DNA, 330 bp, Stenotrophomonas maltophilia
atggaaaaccagcaccgcaagatcaccggctaccgggaactgagccaggacgaaatcgacctgatgaatcgaatcaaggcggctggcgctgtcctgatcgagctgcaggccgagctggtcggcaagctcgagcagcactacacgccgctcgtggaggctgatttcgcttcgaagaagcgggttgacgacgattctcccgagaacgagaacaccgccgagctgcgccgattcgaatctgccgagccgttgcgctgggcggccatcggcaagaccgacatccagacgggtgtcatggcgctgatccgggcagttgcgcagccggcggtctga

SEQ ID NO: 529033 - DNA, 306 bp, Stenotrophomonas maltophilia
atgtacgggagtggcggcgtcaacttcgagggcgaagttgtcggctacatggccgagccgacctatctgatccgacaccccgatggatccgtgcaccactgggcggagagcttggttgaagcggctgaggatggtcccggttgcgattgccactcctgcagagaaaggcgcccattgacgctctccgatatccgcatggtcctttgccctacctgtggcaacaagcgctgtcccaaggcaaacgaccaccggaaccaatgcaccggcagcaatgattcgggacagcctgggagcgcctacccatga

SEQ ID NO: 529034 - DNA, 447 bp, Stenotrophomonas maltophilia
atggacgccatcgagaagcgggcgcgggagctgctgatcgcgcagtacaaggcccgtggtgatctagtggccgccttcaatattgaacggggtggcctgagcagcttctacgctgcggaaatagccgctatcgtcgccgccctcacgccgcccgagggccatgtggtggtgacccgcaacgaggcaggccaagccgtggccgtcacccggcaggacgacgaaggtcggattctgtcggtgatcgcggagtttgaggcacccgagggctacgcggatactctacgggatgccgcgcgctatcggtacatccgatcaattgctgccggggagccccatgagttcggctggattgaagaggccgcattcgtggctagcaatggcgatccggaacagttcgatttcaatattgatgagcagatggccgctcgcccggaggtgaagccgtga

SEQ ID NO: 529035 - DNA, 156 bp, Stenotrophomonas maltophilia
atgagttttctgcggaagtaccccaagacggcgaccagcgttgctgctgtattgatcaatttcccgttcgccttgtcaggctttggggctaacacctttctgtgcggagcgttctccgtgttcgcactgtgggactactgcgaggagaggaaatga

SEQ ID NO: 529036 - DNA, 222 bp, Stenotrophomonas maltophilia
atgagcatttgcccgcactgcaagaagagcttcagcaccgtgaccattggcgaagtaagcgcgagcgttccgttcgggcgaaggacgttcaaagcgctgtcgtacaactgcccgcacatcggatgcggggtttccttgggcgtcgaaatcgaccccattgcagttcgcacagaaatcgtggcgcaggtcatcgacgcgctccaggatccgaaacggaagtag

SEQ ID NO: 529037 - DNA, 390 bp, Stenotrophomonas maltophilia
atgagcaataagcacacgccgggtccgtggcactggtttgaacgagaggacggccatgtctaccttgccacgccagatcgcggtcacctgtatgtgatggacttcgcacgcaagggcatgcgcggtgcgactccccgattcgctctgtggccgggacaagatcgcggccgtctaggcgggatcatgcatgacttccttgaagctggcggaactcttcaccccgatgctcgcctgatcgccgccgcgccggagctgctgactgcgctcgtcaaggcagaacggatgttccgcgaaatcggattcatcgctgcggccgatagcgcacgtccggaaagcctctggaacgagatcaccaccgccatcgcccaggccacgggagaaggcgcatga

SEQ ID NO: 529038 - DNA, 831 bp, Stenotrophomonas maltophilia
atgaccaccgacaacaagaccctggcggacgtgcagcccggtgggagggtgaggctgggggatcagctgcgctctgaactactggatcaggccgaacgcctggagcgcatggccgctcaggatcgcgagactggcgagagcatcgaacaggccctcgaagctggagaggaatacacccccgacgacgctccagacgttgccgctggcctccagcatgacgccaacaggtccgaagaaatcgcagccctcctgcgcaaggctgctgcagccctctccgcccagccctccccaggtggtcaggatgcgctgcgcgtgatcgcagaaaggctgcgaggagctggtgcaagcctccccgccccgccgattaccggaactatcgaggggagcatggtcaccggcctgagcattgcgcttgcgctggtggaagaagcactcgccgcccgccagccggtgactatggacgatgccctggcagcaggagatggcacgctgcaaggagcaatcgaccactggcaggaacgtgcattgcgcgctgaggatgaactggccgcccgccagccggtggaggagccggtgggtacggtgcactccgggaagtacgcaagtggcatgccgtggtgcgaggttgagtggcacatcccacagcctgctggaaccaagctctacaccgcccaggccgcgcaggccgtggacctggggcagttcgtgccggacccaaagactgtgcccgattgcttcgccgaggacgacagcgacgcccagtacaacagcggctggaacgattgcaggaacgcggtgctggccctgatcgacagccagggcgcacgctga

SEQ ID NO: 529039 - DNA, 480 bp, Stenotrophomonas maltophilia
atggatctggcacgcatgacgccatatgcgctgaataactacatcccggttccagaatcgggatgctggctctggctgggtgcctggaacgcatggggctatggaaccctcggcagtagcgggaagaaggttctgatcgcatcccgactgttctatgcgtacttcaatggtcccatcgccgatggcctgatggtctgccacaagtgcgacacgagggcatgcgtgaacccggaccacctgttcctcggtacgggtgcggataacagtgccgacatggcccgcaagggacggggccgagaggcaaagggcgagcgaaacacggctgccaagctcaaggagcatcaggtccacgcgatattcaaggatcgcaggcaggtgcgagaaatcgccgccgagtatggggtgagccaagcaacagtcgttggcatccgccggggcaacctgtggcagcacctgcaacttggaggaaaccatggctga

SEQ ID NO: 529040 - DNA, 996 bp, Stenotrophomonas maltophilia
atgatccacgtcggagactgcctggaagtgatgcgcggcatggccgctggctcggtacagacctgcgtcaccagtccgccctactacggcctgcgcgactatggcgtggccggacagatcggtctggaagacacgccagccgagtatgtcgcgcgcctgatcgctgtcttccgcgaggtccgccgcctgctccgcgatgacggcacgctgtggctcaacctcggcgacacctacacccagtctggccgtgggcaggaaggcgcggccgtgacgctggaaggcaacaccggccgcaaccgttccgcagcgctgggcgcccttggcgcgatgggaggacggatcagcgtgcagggcctcgcacccaagcagatgattggcatcccctggcgcgtggcgttcgcgctgcaggaggacggctggttcctccgccaggacattatctgggccaagccgaatccgatgccggaaagcgtcaccgatcggtgtaccaaggcgcacgaatacttgttcctgctgaccaagtcgccgcggtacttcttcgacatggaggccatcaaggaaccggccgctggtatcaacaactacccgccgcagggcggccctgtgcccggcgctcctgcacagtctcggctgcgcccggcagtgccgcgcggcggcttcgatggcaaaaccaatgcgctgccggggcgcgaggccttcagggcgacgtcggaaaagcgccacaagcgcagcgtctggaacgtggccacgacaccgttcaaggaagcgcacttcgccaccttccccgagcagctgatcgagccgtgcattctggccggctcgcccgccggcggcctggtgctggacccgttcatcggtgccggcacaaccgcggtggttgccgaacgcctcggccggcagtggctcggctgcgagttgaaccccgaatacgcggcgatcgcgcagacccgcatccaacaacagcagcccgggctaccgctggggctgatcgcatga

SEQ ID NO: 529041 - DNA, 300 bp, Stenotrophomonas maltophilia
atgaccggccaagtcgaattcaccgccaaatgcttcggcgcgaagctcggccttacccgggacagcgacaactcctggcgcatgtcgctccacaccttcgtcgggaagaacaggaagcaccgaatcattgccttcgcacgcgcacgtcctggcgagatgccgcacgtggatccgcacgatcccggcaccgacaccccggcctctctgtggcttggctcggcctccttcgatctgccggacaccctcgccccgaagatccaagccttcctcgctgagcatgccaggggcggtgctgcatga

SEQ ID NO: 529042 - DNA, 753 bp, Stenotrophomonas maltophilia
atgtctgtagtggcggtgactgagagtttgagggcctgcggcaactgcggcagcgacgacgtgcacatgcggcagcggggcagctacggcaaccgtcgagcagcgcaggtggtgtgcatgcgctgcggcgcgagcggcgatctatgcgtgggtaagcgcgccgaagcggaggcagcacgggtctgggcgcgcaggcccttttccattccgacgccacgggtggccgcaccaatgcgctgccgggcggccgagttagagcccgatctacagcgcgaccctctcgagctgatagcccgtatggcagttagtggcagcttccgcgagccatcagatggcagatcgactatgccgtctctgacggcatccgacatcgctggggcggttggcatgatgcgcgaccctgtagcaaaacacgctgtgctggcggtgaccctgcgcgcagatggagcggcgcttctgggtttgggacggagggcagcgcggcgagtattccgggattgcctccgtagagactcagcagcaccgttggatatgagctgccccgctgaccgctggcgcatgcggctggtgctgcaggacgcggtaaacgatctggtgtggccagagcgcaagctgtcggctcaagcggcggcgcggcaagcgagaatgcggaaagacgcctatctccgggtctaccgtatggtcgcagcagtccttgtcagcgctcttgaggacgggcgacaggaattcgcaatgaggctctttaagcactag

SEQ ID NO: 529043 - DNA, 1011 bp, Stenotrophomonas maltophilia
atgagaaggctgtggctatggctgagtgagcgccagtgggccgcattgtttattactgttgcagcactcgcaatcttggtgctgagggttcgttatccggaagtattcaagatcgacgccatctcgatcgctttgataggtgttgctgtcctgccctggttgaggtcgattgttaagtcggtggaagtagcaggacttggcaagcttgagcttcaggacgtcgagagggcagcgcgcaaagtcgaagatgctggccttcctaagagaggcccgccagaagacgaagcggccgccgagcccgagatgaatcctaaagaaggtgcggatgttggcgggaaagcgccggagacaacgccagagtcatcatcggcggcagattcagggtcgccgccagaggctggtgtcggacctgttgagccgggggatgcacctgcgggtgaggctcccactggaccttccgcagactatgccctctggtggaaaaccgtgtcgcacaatgaatacaagcgcaccaagctgcccgagggtctaagttacgacgctctccacagtattgtgccgatgcttcatgggcgaggcatcttgactgcggacgacgcctatgtcttcttggacgaagcgctcactgagcttgccgccgagtacggattgagatcggcttcgaagactgcggcggtgaggatgctgaaatttctgtctgtcctggacgacaagcaggccgacgctgtgctcactgcgttcaatctgctgaccgctgcgcggaatgtagtgacgagtcgtttggcggaaagtcgagcggttgacgtggcgttggaagtagcagattcattgaacctacttcgtactcgcgctatcgaaaagagaaagatgtcggagcggctacgcagtgcctcaacagcaacgcagggaggggatgctgctggtgccgaggcagccgattccgtcaggccgaccaatctggggcttccgcttcaaaaacagcagcgtaggccgcgagagggcgaggcgtaa

SEQ ID NO: 529044 - DNA, 756 bp, Stenotrophomonas maltophilia
gtggaagaaccggcgcggatgaatcaggcggccggcggccagcggccacagcacgcggaacagcagcccgtagatgtgctggtgggacaccgtgccatggacctgcacaccctccatctgcgcaccgaacgcggcctgcagcgcctccacctcgcgcgccagctggtccaggcgcttgccgatcgcactgggctggccggtgctgccggaggtgaacacgcacagctcgcaggcgcgctcgtccagcgcctgcagctcatcgtccagcgcggcgtccagcgccaccagcgagcggtagtcggcggacacgtcgcctgcgaagccgctcacctgcggctgcagcgcctgcagcgtggctggcaggttgtcggcggccaggaacacccgcttgccggcatgccaggcaccgaacagcgcggcggcaaaggccacggcatcatcgaagtacagggcccagtcgcggccttcggcggccgcaaaggcggcgcgccaggccagtacgcgctggcggaagccggcatggtcgatcacctcgccgtcgcacaggccgacgctgcgctgcggccgtgcctccagcagcagccggtccagggcaatccactcagccatgcgcgtgcgccgccttcacctgccgccgcaccagccactcccctgcgaacaacacgcccatcatcacgtacgccaacaatccgttgtagagcatccagacccggtccgacgcgtacagcgcggtcagcagggccaggctgccgttga

SEQ ID NO: 529045 - DNA, 828 bp, Stenotrophomonas maltophilia
ttggacgatcactacgagtcagatgaggacggctatcctagggaagtagttggcccgtggatcttggataagcaccattttttaagacactacgtcaccgcctcacaaggggctcgcggaaaaatgggcggctctcattgtcttattgacctctactgtgggccaggaaaagcgcgtatcagggaaactcagggttcagtgtccggcggaacgctggctgccgttgacgcagcggcgcggagccatcgaggccaagccgtcccttttagcagagtttttatcgcggacttgttggaagacaacgtaatagcctgcagggctaggctctcagcaacttctgacgttcaggtaacttcattcgtaggtgcagcggaaaccaacgtccacaaggtggtcttaggcctgcctaggcggggcattcacctagcgtatcttgacccttattcccttccccaacttcccttctcggtgataagggcattggcagacgcgcccagagtggatttgctcatccatttcgccgcctccgacatggcccgcaacctcgaacgtcgtgacctttggcccagatttgatgccgtagcgccaggatggcaggacagctgcgacacaaatcgtggcaagtccgttgttcgccagcagttcttcgctcactggaccaggctcatccaagacctcggctaccatgtctcggatcgggttgtctcagtgaaaaacacccggcgtcgagagatctatcgactggtgctggcctccaagcacaaactcggagacaacatctggcgcacattgaatgatcgctcaggacaaaagggcctctctctctga

SEQ ID NO: 529046 - DNA, 1134 bp, Stenotrophomonas maltophilia
atggttcagctttctccaacgacgcatcgttcgctactcgaaatggaggaagtcctgagggagatcgacgcatccccgccaggaaatctggccgtaacaaaggatttcgcctccaagcggattggcgcgttctacgatgccgcgcgattgcaactcctgtccacctgggctcgtcaatcaccccggcatttgcttcagtttcatacagcaaataccgtaaatggtgttcttgaggagtggtgtgactatgcccccggtattgtcgcactgcggctttgtgagggcatcagcgtaggagaggaggttgtagataggcgcgaggcattggagcccgccgcgttcaagatgctgcgcactgattctcttgacttcgagaagctaatcaaaggccgatcgctcgatttcacttgcgtaagcggagctaagatccaatatttgcgccccctgtttcacgctcgtgacgcctcatctgtgaagggcaagcaggagatgttcgatctcgttcagaagctcaactcagaggtctcgcagctagacgagttcagggtgccaaaagtgtttctggaagcttgctccgtcttcgcaagtgagctcatcaggaacacccaagaacacgcaacaaaggactgttacggacgcccatatattgagcacgcagagggattcatcattagttggacccaactggagggggacagctatgagcaggacttccaagggcatccgcggcttcgggagttctggaagagggagacaggcgctgtgcgcgcggaacccctcaggtccttgcaggttagcttcttcgacaccggccctggcatcgctggtagggcgactagccgggagcttagtgatatcacgcccgctgccgagagagaagcactgctgcgtagcttgaagaaaaatgcctctacgaagcgagagaccggagccggaaatggatatccagaggtcttggagagacttcgccaagttggtgggctgatgtcgattcgcactggacggctgaggttgtttcaggctttttcgccaaacgagcagcgtgacctctttgcctttgatgactgggcagaagaactcctagcccctgccacgggaactgttgtctccattatcctgccgatccgacgatga

SEQ ID NO: 529047 - DNA, 2208 bp, Stenotrophomonas maltophilia
atgactaggaagtctttttcatttacagccaatggacctggcgataatgcttcgccagcactcgagtggctctgtgtttactttgatgagcgtccaaagtggacggcgcatcagtttttcgatgagttaaccctggcgctgaagagcgtgcaggtcctgccggatggcgttctggtgatggctgacgaatctttactggagcaactgttggggttttgggcgaaggattcggcagctagaaaaacgttcataggacgcggtgagcgaggcgaatctttgttcgtgaaatgctgtcgctttggtggatggagcttggcaaaggggctggtttaccgtcgggtagcggctggtgccggaggagggcagccggagttgaagcccaaaatggtcgtgactgaggggttgaagcaactggtggaagcgaataacgtagttcagcttgccccagccggtcacacctttcgccatccgtcaggaacggttggcaagatctttatccaggccagagaacttgcctcgggcgaggccgagctgggcttcgcggcgcgcgccctggtccagttgttgcccgcgctaagggatgctgagttggaagtggttttcgttgacagcatgggcatctatcccattgtgcgtgcagctctggcattggggtcggcccaagcacgcatagaaagttttcggtcctacacagacttctcaaagctctctcgaccagttgagccttacgctgtagtcatttccgcttctacaaccgggggcatggcgcgccgttgtgttgaagagatgggttttgaagctgatcgggtcgcaaccatcgttgacttgaagcgcaagagccgacatggccaggtgctgatcgcgctagcagatcatgctccgagcctattgaccatcgactcggagcggagtgacacccagattgagttggtgggagagcacttttcgtcaaagtcaaagccgccgcgcgtagtgaccctcgggattcttcacgaacccaagctgttaaagcgatttctcctgactgttggtagagaggctgctctgcccctgaatcacactccagccgcctccggcaaggttcgccctcttagccttaacggccgtgccgtcgttgagcacgatgagttcgtggcttgggtccgggaggaagtgcgatggcaccttcccttgacggtcgggtatgtcattgccgctgacgacaatggttcttgcgaactggccgcgttggttgccgatgagattttgcttatcacgggcaagcgacctcaggttttgagccatggtgcgttcaccgctgacgccgtgagggaggcgaatggagtcgttgtggtgcaggcggtcgtcggcgacggggggctccttcgagaagttagtcgtgatttgcgtgaatacatccgcacgaactgtcctcgacactttctctgtggcgtctcatgcccaacgtcaggcgagtctgggcaacgcttagagcagtttcttataagaaatccgacagagcgaagctacgggttctcgtcttggctaagtttgcctataggcacgaacgacagcgccgacacttgggatctatacgggaaagtagcttctaagctgcagaacgcggctattcctgacgacgattttaaggagttgattgggaagtcggtcaagatggcggttgatagcatccgcgcttcagtcggctcattcttgcccaaaccgaatggcgatgctctggaccgcactccgggtttcgtatttttgcctgaggagttcgcggagaccgactcgccgacggacagtctgactttccttattatttccgccgtgctgcagtcagcgcgagaactcaagaacccgttaatccagttgaagtccacgggctatgagtcggttgtgctggcacctgagaacttccagcgcttcaacgacaacatccttcaggcgtgtcttctcagggcggctctgccgtcagaacttgactactcagccagtcctgacgtgagcctgctgatgaaggagttgcttacaaagatcatagagcggcaggagtatacttacggaggagcagctctcgagttttccgcagccttgctaacggggaggatcaaacttcagtctcatcatgcggacgagttgtttgagcgcgcacgcaaagcactcttggatcgcggcaagcccagtcctcttctagggctgctctgctttgctgggcgtatggattag

SEQ ID NO: 529048 - DNA, 687 bp, Stenotrophomonas maltophilia
atgccgttcgatgcctgggtggtggtcgccatccttggcctgatgatgctgctgtcgtgggcgatcatgatcggcaagagccgccacttcggtcgtaccagcaaggccaatgcggtgttcaccgagagcttcggcaagctgtccggcgtaccgctgcgcaccctgtccgacatggaccgccagggcaaggcgccgaccgccatgcacgatggctcgttgtggcgcatctaccaggtggccatcgatgaaatgcagcaacgccaccagcgcgatggcaacagcggttacctcagtggtgccaccatcgcggcgatccgcgcctcgatggatgcagtgatggtgcgcgagcaggaagcgatggcgcggcgcatgaactggctgtcgaccaccatcgaaggcgcgccctacgtgggcctgttcggcaccgtgatcggcatcatgctggtgttcgtggttgcggcgatggccggcgcggtggacatcaactcggtggcaccgggcatggccgcagcgctgctgtgtaccgccgcgggcctcggcgtcgcgatcccggcgctgttcggctacaactatctgggcgcgcgtgccgaagcgatcggcgcggacatggcggtgttcatcgacgagttcgccgcgcgcctggctgaagagcaggacgggcgcggcccggccgcggtccagggctga

SEQ ID NO: 529049 - DNA, 954 bp, Stenotrophomonas maltophilia
atggtcggacgcaacctgcaggtcgtgctcgaaggtgtgcccggacaacgtggcgtggttggcttcgatgttgagcttgaagtccttgtccagcccatgctccttcaggaaccccaccaccgtggcactgtcgaagtcatactggtgcttcatcggctccatcggcttgggctcgatcaggaagttgcccttcaggccgatgctgcggccgtagtcgcgggccatggtgaggaagcgcgcgaaatgttcgatctcgcgcttcatctgggtattggccagcgacgcataaccttcgcgtccgccccagaacacgtagtgctcgccgccgagttcgaccgtggcctccagcgcggccttgacctgcaccgctgcgcgcgcgaccaccgcgaagtcggggttggtcgatgcgccgttcatgtaacgcgggtgcgagaacaggttggccgtgccccacagcagcttgacgccggtggcttcctggcgcgccttggccagggccaccatgtgcgagaggttcttctggtactggccgatgtcgtcggcatccggcgccaggtcgatatcgtggaagcaccagtacggcacgcccagcttggtgaagaactcgaacgccgcgtccaccttcgcttcggccgtggccagtggcgaggctgcctcccacgggaactgccgggtacccgggccgaacggatcgtgcccggcattgcagaaggtgtgccagtagcacacggcgaagcgcagatgctcctgcatggtcttgccaccgatgacccggtttgcatcgtagaccttgaaggcaagcggattgtccgagcccttgccctcgaacggaatgcggccgacgccggggaagtactccttggcgccgatgaagggctgcgtgctcatggtgcgtgctcctgtcgttgtacgaggtgtcgtggaggagccatcagccgcgctgcagcggcgtga

SEQ ID NO: 529050 - DNA, 261 bp, Stenotrophomonas maltophilia
atggcctatcgcaaaaaggacactccgtgcccgatccgcgagaccgcgccgtggaacgaagtgccggtacaccgcccggtgaccagccgcgcccggcactacccgcccggtacccacatcgcgccacaccggcatcgccgtcaccaactggtcttcgccatgtccggcctgatggtggtgcgcgcggacggtggccgctgggtcgtgccctccacccgcgcgatctgggttccggccggcatggtgcatgcggtggactga

SEQ ID NO: 529051 - DNA, 273 bp, Stenotrophomonas maltophilia
atgagtgcttatttggtcagttacgacttacacaagatggggcagaactacgagtgcatccgcacgaagctccaggcataccccaagagttggaacatgcaagggtccgtctggataatctcaagtgtccagacggcccctcagatcagagacgatctggtgaagtgccttgatggcaacgataacgtcttcgtggcaaagctggacgtagcgtcttgggctggattcagcgatcaaaatggtgcgtggcttaaaagaaccattgaggagtga

SEQ ID NO: 529052 - DNA, 255 bp, Stenotrophomonas maltophilia
atgaaaaagtacgcaaagtcgttcattttttccgatttcgagcattacggcattcctgacggcgttcacttcgccgtcgagctcagccaaggcgtggaggttctaatcttccgcaacccaccgacttgtgaaatcaagcgtatccccaacgactacttcaagaagttgctcgaagatgggaccgtcgtggacgccgaagctcacgtaaacgctttgttggaggacgggttgagcgcggcgctcgcggaagactaa

SEQ ID NO: 529053 - DNA, 600 bp, Stenotrophomonas maltophilia
gtgggaagaaaaaaagaacggccggtcgtcgaggtgacgtaccggccggtcaggggaaagcggtggaggaggcaccatgcgccgcgcaggcacagccaccacgaggcgtggcggcggtgtgggtccgggttttgcgttgggcgttgtgcatggtggttgcgtctgaaaccaggttctgaaatgaaaaaacccgcaccggggcgggtgcgggtttttgaagagttccggtgtattcgttgcttacacgctggctcgtcccgcacctgttggttgggtaataagtacgagcacaagaatcgaacgcagcgaggcggcgccgatgtcggcggcttcgttgtgggttcgcggtggcgtgttgtgatgcaacatgtgatcgagagaaacacagccgttttggcgatgtcaaccctcgcgacggaattcttgttggtttccgttgcatccggcgcaatcgcctgtggcacaaggatggttgccgctgaaagtgtttcggtgaaccggaattcactcctttcagggcggtttttgcgcggaatccggcggatcctcgccttgctgggtgcggaccttgcacacccaccccaggatcaacgtccatga

SEQ ID NO: 529054 - DNA, 825 bp, Stenotrophomonas maltophilia
atgagcgcgccatcgaaacggatggcacgcaactgctcgcgccgtggcgccaggggatgtcctacccgatgccagcgccacagcaaccagcccagggccaacaatgaggcaaacgccgccgatacagccgcactggccgaccccagccgcgccagggccggtccagcccaggatcagcagcggcgtgcacagcaggccgaccaccgtggccagcagcagcgcctgcagcggcgtctttgcatcgcccactgcgcggctcacggcagtggccagccacagcaggaagaacaccggagccgccagcaacagcacgcgcgcgtacacgatggactcgccgaggatcgctgccggcgtgcccagtgccgccagcagctgtggcgcgaaaccgccgcccagggccatcaccagcaccgacaacagcaggatcagcgccaccgcgctgccggccaccgcgcgcgcctgttgcgggcggcccgcgccccaggcctggccgatcagcaccatcgcgcccgtggccaggcccatcaccagggccagcagcaggaaaaagaccgggaagaacgccgcggccgcagccaccgcctgtgtgccaagcaggtggccgagatagatgttgtccagcgtgcctgcggccagctgcaacgcattggtcagcagcatcggcagcagcagcgtcaggtaggtgcgccacagcgggggtgctgccggaggtgtcggatgtacaggggggctcatgggattctctgggcaaggcgccgccctgcccggcgtttccgccagcaaagcaagcacaggggaagcgggccgcggcccgcgatcagatga

SEQ ID NO: 529055 - DNA, 504 bp, Stenotrophomonas maltophilia
atggcattgctgcacgccaagacggctgctggccgtcaggaaatcgaagaccgtagccggcgcctgccggcggcactgcgttcgatcctgctgatggtcgatggccatcgcaacgacaccgaactgcgtggcctgttcgaaggcctgcgggcaccaccggacgcactggagcaattgtcagcacagggcctgatcgaagtgatcggcggaagcgcagaggtggcgccggcgcgcggcatcagcaccgggcgcgaacaggacccggcgctgtaccagcagttgtacgacgcgatgagcgaggcggtgcgccgccacctgggcctgaagggctacttcatgcagttgaagatcgaacgctgcaccgatgcgctggcgctggagcgcttgtgcccggagttgctggcggcggtgggcaaggcgcgcagcccggcattggcgcagcgctggtggcaggaaacccagtcggcggtgctgaacgctggcagtgaggtcgtgcaggcctga

SEQ ID NO: 529056 - DNA, 192 bp, Stenotrophomonas maltophilia
atggctgatatcgatactgcccgccgcttcctcgccgctgagttcgagagcgccggtctgcttcacgtcgctggcgacatcctggccggcaccagcccctttgcccagggcgcatacatcgccgccgtggcgtccgcgctggccgcgccctgtgccgcttatggcggcgcgcgggaggctacccatgggtaa

SEQ ID NO: 529057 - DNA, 342 bp, Stenotrophomonas maltophilia
atgccactgccccccgacttctactggacgacacgctctgccagcttgccccacgatcccctgaccgtgatcgcttgtgagggggtgtggttggtgacgttggcgcagcgggtggacgacaacacctgggtggccagcttggatcggcaccggaacgggcctggcgggccggcccgccgctgcagcagctacgagcagggccgtgccggcgccgagatatgggtggcccggcacgaagcccgcctgcgcgaggatgtggccaagatcactgcgtatcgggcggcggtgcgcgcgaacaggttggccagatcacagctgccaccaccgttcggctgggagtag

SEQ ID NO: 529058 - DNA, 1071 bp, Stenotrophomonas maltophilia
atgaccccagaagaaaagaaccaaagaatcctgcagcgcaagcgcgaagaattgctgaagcgtgccaacgcaaccccgactgcttcgcctacgcaggaagagcggctggtttccgacggcgtgaaagagaacctgaaagctgccagttacttggccggggtgatcagcaagcgcactgccgagttgacccagaagggcgttgttgccgctgcagagaaagcgaagcaagccaaggcgcaactggacgcaaggcgcacccgaggagcccaggaacatcgtgctgtcgaagagaagcctcaagacgctccgctcaccctggagcaggaaatgttggtcaggcaactgacgtccgatgcagctgcaccggttctcgtgggagcgggtgacaagggaatgtgggtcccttgtgaccttggcgaggacgttgatgaattagtagacggcgcactggatacggctggaatgggtggcccttcggtggacgccaaggcgttgagcaatgaagatacggcagccttggtcaatctgtctcagcaggacgcagtggaagtcctgtccgtttccgcagtgcctgaagggtccaaccggcccccggaggccgcgtcaccagagcagccagtaactccaatccaacccagcccccgctctcgttggccctgggtcttggccagcttggtggcggtggcatcggtcgctggggcgatctattccctcgtggggaagaacgacaaggcgccgccaagcgcgcccgctcccgtggcgccggttgccactccagccgctcccaagcagttgtccgaggtggtggaagcccccgtggtcgcgcctgctccagccgtgcttacagagcaggccgagccagaacctgcgatcgagaagccagagccgctcgccgctcccgatgtgacagcgtcagcgacgattgcgccccagcccaagccttcgccgaaacgtgcaaccgccccattgccgaggaaggcccccgcacccgccgccgaaccgcggaacgactggcagcaaaaagccaacgcagacctggacgcttgggcgaagaagtcggggatcgattga

SEQ ID NO: 529059 - DNA, 657 bp, Stenotrophomonas maltophilia
gtggtggccatccactaccagacgctccggcaggtccgtgaactgcccctgttcgatgagccggtcgagctggaagtccagcgccagcggctggcctgtcctcgctgcgggccaaaactggagcatctggattggctggagcgacatgcccgggtaacacaacggctggcgcagagcgtggcacgcatgtgtgccacggcctccatccatgccaccgcaaagtggcttggcttggactggaagacggtcaaggcgcttgattccaagcatctggtgcggtcgctgggtccagtagacctatctgacgtccgggtgatcgcgaaggatgagtttgcgatccaaaagggcatcgctacgccatcgtggtggtcgagccatcacgcaagcgcgtgctttgggtcggccgaggtcgcagccacgcagacgtgcgtcccttctttgagccactcggaaaggacggctgcgaacgcagtcgccatggacatgaattcggccttcgacctagaagtgaaagcccaatgcccgaacggcgaagtggtctacgacctgttccatgtggtggccgaatacggccgggaggtcattgaccgggtccccgtggataaggccaacaggctacgccaagacaaacctgcccggcgtgtggtgaagacctag

SEQ ID NO: 529060 - DNA, 165 bp, Stenotrophomonas maltophilia
atgcagcccctctcggaccgccgcctgctccagccgctctttcagctgccgtggcacgcgaacggccatctgcacgtatggtggacggctcacgtggacagcctcgccatcgtgagcacccacgccagcgccaaaccggccaggatttgggcccgcaagcggtaa

SEQ ID NO: 529061 - DNA, 123 bp, Stenotrophomonas maltophilia
atgacgaccgtcaacgcccagtggattaacgccttcaacgccgctctgcaagcgcacttcgccctcaccatccaggacgccgggctcaccgacaccgagttgtcccgctacagcgacctgtag

SEQ ID NO: 529062 - DNA, 282 bp, Stenotrophomonas maltophilia
atgagtgaagcggatctcgtatgcgaaagcgtcgagtgggtgaggcgcgaactgcgtgaccttatgggaacgcggaaaaagcggtatccgtggctcaattgctccaccgaacgtgagtggatcattgcgaagctctgggacccggacatgtctgacacggagtgggcttacgttcttaagctcctgcgcccgatcattgccgagcgacagcggaagcgcctctcggaggtggccggcggtgccgcagcaaatccaagtagcaagcctcgtcgaaaaatgtag

SEQ ID NO: 529063 - DNA, 360 bp, Stenotrophomonas maltophilia
atgtcggtgccgatggcacgcactcccgcccccggctgcgagctggtcggcgaccaagccgactgcggcaatgtcaacctaagacgactgtcgctacgcatccatgaactgcctcgccatcgttcggatgatgtcgaacccctggcaaaccgtcccgaccgcgctgccaaccggctggcgatggcgctgctgatcgctgcgctgatcatcagctcggccattgtcatgacggtgggcggcggccccacgcagctgggcctgcccgcgttcggcctgctgggcttcgtgggtgccgtggccggtggcgtgtggctgctgcgcgcgacttggcgcagcggacgccgcgacggcgacgattga

SEQ ID NO: 529064 - DNA, 1293 bp, Stenotrophomonas maltophilia
atggcagacaagcaacgtatcgtcgtcgtgggcgggggaatcgccggcctggcactggccacgcagctcggccagcgcctgggccgcggcggcaaggccgaggtcacgttgctggaccgcaacagcgcccacgtctggaaacccatgctgcacaccttcgcggcgggcaccgcgaactcctaccagcagcgcatctctttcgcggcccaggccgcgcgctgcggcttccgcttcctgcccggcggcatgcggcgcgtggatcgccaggcgcgcgaggtcgtggtcgcgcccatcgtttccgcgcatggcgaggaagtgctgggtgagcgcatgctgacctatgacgccctgttcctggccgcaggcagcaaggcgaacgatttcggcacgccgggcgtgcagcggcactgcttcttcatcgacgacctgcagcaggccgaggccttcaacgacagcctctatgcaggcctgctgcgcacggccgccctgggcgaacccttgacaatagccatcgtcggcgctggtgctacgggcgtggaacttgctgccgaaatcagccaactgctcgatgtcgcggccagttatggcgcgggcgacctgcgcccgcgcctggcgctcaccctgattgaaagcggcccgcgcatcctcgcagcttttccggaagagatcgccgaagccgccgcacggcaattgcgggcgctgggcatcgacatccgcactggcgtgcgcgtggttagcgccgacgacaccggcttcgcgtttcatgatggctcgcgtatcgacgcctcgctgcgcgtctgggcagcgggcgtgaaggcgcccgaggcggttgccgaactgcagggcttcgagctgacgcccaccggccagatcaaggtgaaagcaagccttcagaccaccacggacgaacgcgtgttcgcgctgggcgactgctccagcctgatcccgaaaggcgctgcccggcccttgccgcccacggcgcaggtggcccggcagcaggccatgcacctggtccggcatgtccccggctggctggagggccgtcccattgcgcctttcgccgtgcgcgacctaggatcgctggtctcgctcagccgctacaacgccttcggcaccctggggcggcacgggctgttccgcaaccgctttatccgcggccgcttcgcccagctcagccacgcactgctgtatcggctacaccaggccgaactgcacggcctgggccgtgccggcctgatctggctgtccgatgccatcgccgcgccggtacggccgcgcatccgggtcgattga

SEQ ID NO: 529065 - DNA, 615 bp, Stenotrophomonas maltophilia
atggatgattcaaacgagtaccgtggccgtcgctcagacgcgcgcaccaacgatgcgaaggtgatcaaggccgccaggcaactggccgacaaagagggcaggctgcccggcatgcaggccattgccgatgccgctggcgtgggtgtgaccacgctctaccggcgcttccccaccaaagagcggctggccagccacatccaggcgctggatttctgcgaccagttggtgcccaccttcgagcaggcgctggccaatccggattcgcgcgagggcatgcgggccgtcacccgtgagatggtcctgctggccaggcatttcatggatccgcgcaatggcgccaccgtctcggtggccgacctgttcgacgcttacctggagcgattcctgccgtcgatgctgcaactgacgcgccaggccaaggccagcggcgtgctgcgtgccgatatcgaagaggcggacattccccggatctgcgccatcatgctcggcggtcttgtgctgccgggccgcttcaacgatgcgccggatcgttatatcgcgctgatcttcgagggcctggaaaagccgggcaatgccccgctgcccccactggcgcctccgaaggggctggtctga

SEQ ID NO: 529066 - DNA, 1158 bp, Stenotrophomonas maltophilia
atgaagcaagagaagaaggcatcgctgggggccagcgccacgatcgtggcagtctgcctgtcactggccggatgccagaaggccgaaccgccagcacctccgccaccgccgccggaagtcggcgtgctgacgctgcagccgcagagcgtgcagctatcggcccgcttgccggggcgcgccgtgccctacctggtggccgaggtccgcccgcaggtcggcggcatcctgcgcgagcgcgccttcactgagggctccagcgtcaaggccggccagttgctctaccagatcgacccggcgccgtaccgcgccgtgctgtcccaggcggaggccagtctggaggcggcgcagtcactggcgcgacgctacgaacaactgatcaagacccatgccatcagccagcaggaacatgacgatgcgcgcgcacgctacctgcaggccagggccgccgccgagagtgcgcgcatcgacctgggctatacccgcatcaccgcgccgatcgcgggccgcatcggccgctccgcggtcacacagggcgcgctgctgacggccaatcaggccaatacgctggcgaccatccagcagcttgatccgatctacgtggacatcatccagcccgccacggtgctgatgcaactgcgcgatgacctggccagcggtcggctcaagagcacgggcgacggccaggcggaaatccggctgacgctcgaaaacggcagggactacgggcacgcaggaaagctgcagttttccgaggtcagcgtcgaccaaagcaccggcgcggtgacgctgcgcgccgtcttccccaaccccgagcgggtgctgatgccgggcatgttcgtgacggcgcagttacaggagggcacccgcgagcaggcgctgctggtgccgcagcgcggcgtcacgcgcgacagccaggggcgagcgcaggcgtgggtggtggatgggcagaaccgggcgcagctgcgtgcgctggccaccgagcgcagcgtcgatggtcagtggctgatccgcgatggcctgaacgctggtgaccgggtgatcgtcgatggtgtgcagcgggtgcagcctggcatcgaggtcaggccggtgccagccaccgtgaccggcgcgaccgatgcggacgctgccggccagccgtcccgcagcgcaagccggtaa

SEQ ID NO: 529067 - DNA, 3156 bp, Stenotrophomonas maltophilia
atgtccagattctttatcgacaggcccatcttcgcctgggtcatcgccatcgtcgtcatgctcgccggcgtgctctcgatccgctcgttgccggtcaaccagtaccccgacgtggcgcccccggccatcgccatcatcgcctcctatccaggcgcctcggcgcagaccgtgcaggacaccgtcacccaggtgatcgagcagcagctcagtggcctggacgggttgcgctacatccgctcggagagcaattccgacggcagcgtgactatcgtcgtcaccttcgagcagcatgtcgacccgaacatcgcccaggtgcaggtgcagaacaagctgcagctggccacgccgatgctgccgcaggcggtgcagcagctcggcctgcgggtggtcaagtaccagatcaacttcatgctgttggccgcgctggtatcggaagacggcaagctggacaacttcgccctcggcgacctgctggtctcccagttccaggacccactcagccgcacgacgggtgtcggcgatttcttcgtgatgggcgcacagaacgccatgcgcgtgtggctcgacccggccaagctcaacagttacaagctgatgcccagcgacgtgtcggcggcgatccaggcgcagaacgtgcaggtctcctcgggccagctcggcggccgcccgaccggtgcacacaccggcctcaacgcggcggtgatcggcaagaccctgctggagaccccggagcagttccaggagatcctgctcaaggtcaacccggacggctcgcaggtgcgattgcgcgacgttggcgaagtgtcgctcggctcggaaatctacaccttcaacaccaccgccaacgacaagccttcggccagcatcgcgctgcgcctggccagcggcggcaataccctggacgcggtcgcggcggtgcgcgagaccatcgatcggctcgaacctaccttgccgccgggcgtgaaggtcatctatccctacgacaccgcgccggtggtcagcgagtcgatcagcggcgtggtgcacacgctgatcgaggcgatcgtgctggtgttcctgatcatgtacctgttcctgcagaactggagggccacgctgatcccgacgctggcggtgccggtggtgctgctgggcaccttcggggtgatggccgcgttcggcttcaccatcaacatcctgaccatgttcggcctggtgctggcgatcggcctgctggtcgacgacgccatcgtggtggtcgagaacgttgagcggctgatggccgaggaaggcctgtcgccgctggaggccacccgcaggtcgatggaccagatctccggcgcgctggtcggcatcggcttggtgttgtcggcggtgttcgtgccgatggccttcttcggcggctccaccggcgtgatctaccgccagttctcgctgaccatcgtcaccgccatgacgctgtcggtgctggtggcgctgatcttcaccccggcgctgtgcgcgaccctgctcaagccggtgacgcacgaccatcagcagaagaagggcttcttcggctggttcaaccgcatgttcgagcgcaatgcccagcgctacgagaacggcgtggtgcgggtgctggccgggcgcggacgctacctgctggccttcgcgatgatcgtcggcgcgctggcgctgctgttcccgcagttgccgacctcgttcctgcccgacgaagaccagggcaccatgctggtgcaggtggggctgccggccaacgctacgctggaccagaccgacaaggtcatggctgaagtgaccgagtatttcaaccaggaggaacaggacaacgtcgagcaggtgttcacggtcagcggtttcagcctggccggccgcggccagaatgccggcctggccttcgtccagctcaagccctggaatgaacgccctggcacggtgttcgaggtgcaggcgcgcgccatgcagcgtttcagccagatcaaggacggttcggtactcgcgttcccgccaccggcaatcatggaactgggcaatgccaccggcttcaacctgttcctgcaggactacagcggccagggccacgaacacctgatgcaggcgcgcggccagttcctggccgaggcggccgggcaccccgcgctggcgctggtgcggcccaacggcatggacgacgaaccacagtaccaggtgctgatcgacgacgagaaggcgcgcgtgctcggggtcgacctggccgatgtcaacgacaccatgtccgccgcctggggctcggcctacgtcaacaacttcctcgaccgcggccgcatcaagcgcgtgtacctgcagggcatcgcccagtcgcgcatcaccgaggccgacttcgcccagtggtacgtgcgcaacggcaacggcgacatggtgtcgttcgcctcgttcgcgaccggccagtggatcaagggctcgcccaagctggagcgctacaacggcgtgccggccatcgagatcctcggcgaacccgcgcccggctacagctccggcgaggcgatgcaggcggtcgaggagatcgccgccaagctgccgaccggcatcagcctggcctggaccggcctgtcctacgaggaacggctgaccggctcgcaggcaccggcgctgtacgcgctgtccattctggcagtgttcctgtgcctggcggcgctgtacgagagctggtcgatcccgttctcggtgatgctggtaatcccactgggcgtgatcggcacggtgttggcgacgctgatgcgcgggctggagaacgacgtcttcttccagatcggcctgctgaccacggtcggcttgtcggccaagaacgccatcctgatcgtcgaattcgccaaggatctgcacgagaagcacggccgcaccctggtccaggcagcggtggaagcggcgcggctgcgcctgcggccgatcatcatgacctcgctggccttcaccatgggcgtggtgccgctggccatctccagcggcgccagctccggcagcaagcacgccatcggcaccggcgtgatcggtggcatggtcaccgcgactttcctggcgatcttcttcatcccgctgttctacgtggtggtgtcgtcgctgttccagaagaacaagaagaagcccgccacccccggaaccgcctccaaggccgaaccccagttggaatccccccgatga

SEQ ID NO: 529068 - DNA, 1473 bp, Stenotrophomonas maltophilia
atgaaaaacagtcgttccttccatcgtttcgtgcctctgctgtcggtagcgatgctggccggctgcgccaccaccctggcgccggactatgcacgcccggccgcgccgatcgcggcagcgtggccgcagccgcccgccgccgatggcccggtcgaagctgccagcctctcgtggccgaccctgtttgccgacgcccggctgcgtgaggtggtgcaactggcgctggacaacaaccgcgacctgcgggtcgccgcgctgaacatcgagcgcgcgcgcgcccagtacggcatccagcgcgccgcgctgctgcccgacctgaatgcgggcgtggccggcaatgccgggcgcacgccggcctccatctcgggcaccggcaacgccgttaccagccatgcctacagcgccagcctcggcatcagcgcgtgggaagtcgatctgttcggccgcctgcgcagtctcaaggaccaagccttgcagcagtatctggcgaccgaggcgacgcggcgtgccacgcagttggggctgatcgccgaggtggcgggtgcctacctcaacctggccgctgatggcgaccagttggcgctggcgcgcgagacgcagcgcagccggcagcaggcctacgaactgcagcagcaactgcgcgagatcggcaacggctccgacctggacctgcaccaggccgaggccgcgctggagtccgcgcgcgacgccgtgctggcactcgaaaccacggtggaaaccgaccgtaacgcgctggaactgctggtcggcgcgccgctgccggagcacctgcgccccgtcgcaccgctcgaagccatgctggccgtgcagggcctgcccgccggcctgccatccgacctgctgcagcgccgcccggacatcctcgccgccgagcatgcgctgatcgccgccaatgccaacatcggcgcggcgcgcgcagccttctttcccagcatcagcctgacggccggcatcggccgcgccagcgactcgctgggcagcctgttcgacggcggcaaccgggcctggagcttcctgccgcaggtcagcctgccgatcttcaccggcggccgcctgcaggccaacctggacgtggcgcaggccgagcgcgacatcgccgtggccggctacgagcaggccatccagagtgccttccgcgacgtggccgatgcactggccgtgcgggcacggctcgatggccggctggccgcccagcagcgccaggtcgatgcctcccggcaggcctacacgctggtgcgccagcgctacgacgctggcgtctacagctatctggaagtactggatgcgcagcgcacgctctacagcgcccagcagggcctggtgggcctgcgcctggcgcgccagaccaacctcgtcacgctctacaaggcgctgggcggcgactggcagcagaaccagccgccagccgtcgcccaggcgagtggagccccatccatgcagcaacgtcagtga

SEQ ID NO: 529069 - DNA, 852 bp, Stenotrophomonas maltophilia
atgacacacaggttcaaagacatcgcagtgttcttcgataccagcgaaaccgggctacgtgtactggaccgtgcggtcagcctggccagcgcgcaacagggccatttgattgccctgaccagcgccatgcctgacgagagtgtgccagcggcttcgttcgcacgtggcagcgccattcaggaggtgatcagccggcgcagcgcgtctgcagcggcacgcttgctgaaggctggccaatcgctggccaggatcgcggccgaacatggcgtcgatgatgtggagttccgcatcatcgcgccgacggaatccgccggcgaaacgacgttgcacaccttgcactgcgacctgctggtgatcggtgaacacgcaccgcccggcgcgcccgcgtcctggtcgctcgaccacgtgctggagcgcgtgggggtgccagtgctgatcctgcccgacggctggagcggctccggcgtgggccagcgcatcactgtggcgtggaatgccagccggcaggcgcgccgcgcggtggccgatgcgatgccgctgctcgtcggtgcgcaggaagtgcatctgctgatcgttgacgcccacaggcaggacgccgatgttcacggcgaagagccgggcgccgacaccgccgcctacctggcgcgccacggcgcgcgcgtcgaactccagcgcatcgaatcccacggcttgccgatcgccgaggcgatcaaggaacaggccctgcgcaaccaggccgatctcctcgtcttcggcgcctacagccactcgcggatgcgcgaggcggtgttcggcggcaccacccgcacgctgctgtcgggcacgccgctgccgctgttcgtctcgcactga

SEQ ID NO: 529070 - DNA, 639 bp, Stenotrophomonas maltophilia
atggtcaggcgcaccaaagcggaagcacttgtcacccgcggacagattctggatgccgccgagctgtgctttcgcaccctgggcgtctccggcaccagcatggggcgcatcgcgcagcaagccggctgcacgcgcggcgcgatctactggcatttcaagaaaaccgccgaagtgctacgtgccgtcgtcgcgcgtggccagttgcacctgctggacgagttggagccaatcgcttgtcagccatccggcctgctgacggcattgcgcgccgtgctggagcgcaacctgcgctgcatccagagcgatccgcacgtacgcagcacgctggagatcatggtctaccgctgcgactacgccggcgattggcaggagctgctggagcggcatctgctggagatggaccggttggagcagcagttgcgacgcatcctcgaacgagcggacgcgctgggcgaactgcggccgcgcatatgctgcgccaccgccgcggcactgatcgccagcaccttcgttggcgccctgcgacgatacctgatgcggccgcacacgcaacgtcatggcgcggagccggccgccgtcatcgcaatggcgctggatgacattgccatgccacagcccctacctgggtcgcgcccttga

SEQ ID NO: 529071 - DNA, 1449 bp, Stenotrophomonas maltophilia
atgagcaagacgataccggcagtgcgccattggccttcgcggaccattctggcgttgtgcgcgctgctcacagcctgcacgaccgtggggcccgactaccagcggccaacgcttccggccaacttgtccgagcgcccgcagaacgacttcgacgctttcgacgctcgcctggtctcggcagacccgctgcccgacaaatggtggcggctctacgccgatcccgtgctggatgccttggtgcaggaagcgttggctcacaataccgacctgcgcgtcgctgccgccaatctggaagctgctcaggctggagtacggggcgtcgatgcgcaggctggcgtgcagacccggatctatacgcccgagaatggcccggcgctcgcccttgcgcaggcgtccaatgccggcgagcgaccttcacccggagcgcatggtcactacgatatcgcgtttggcgtgtcctacgaactggatgtggtgggacgtatcaggcgggcgctggagatggcctcggcaacggccgacaccaaggctgccgcctacgacctggcccgtgtgaccgtcgccgcacgcgtcgtccacacatacagtgcgatctgcgccttgagccagcggcaggtggtggcacgagactccatcgcgctgcaggagcagagcgtggcactgcttgaacgaggagcgcaggccggtatccattcgcctctggacgtctcccgtgcacgtgcgctgctggctcaattgcgcgcggtgccagcctcgctcgaaagccagcgccaaccggcgctgtatgaactggccgtgctgctggggcgccggccggaggacgttcctgcaccggtgcgggcttgcgctcatattccaacgctcgagagaccgttgcccgtgggcgacggcacggcattgatcaagcgccggcccgacattcgaattgcggaacgggaactggcggcggcaaccgcgaaaatcgggattgaaaccgctgcgctttatccctcggtcagtctcggcgccgggatcggcaccctggccaggatgggcacggatgtcctgggcgatgcagccatccactacagcgtcgggccggtgatttcctggacgctacccaacagaacactggcccaggcacgtatcgaggccgcgaacgccgaagcacgcgcggccctggcacgcttcgatgctcaggttctgacggccctgcgggaggtcgaaagcacactggcggcctatgcccgccatctggacgagtacgagcaactcgggctggcacgcgacgaagcgaggcaatccgtagccatcgtcgggcgactcggcatcggaggtgctgcttcgaccctcgaccgcctggatgccgaacgcacgctggcttccgccgaggtcgctctggccgcagcccaggcgcgcctggcagaggaccgcgtcagcgtattcctggccttgggcggagggtggtga

SEQ ID NO: 529072 - DNA, 936 bp, Stenotrophomonas maltophilia
atggcaatgtttccccgctcggccgcacagttgctcaggatggcgctcacgctggtgctggccacgctggcgctggtcacgctctggcacatctacgtctactacacctacgcgccacagacccgcgacggcaagatccgcgccgacgtagtggcgttggcggccgatgtctcgggtcgcgtcgacgcggtcctcgtgcgcgacaaccagcgcgtacgcagaggccaggtgctgctcaccatcgacaccgccaggctgaccaacgcggtggccgccgccgaagcggcgctggcgaccaccgaggcgcaggacgagtcggcccggcgcgaataccgccgctaccgcgacctggaggacgtggtaccgccgcaggaacgcgacaaccggctgaccgccgccaaggaagccgccgcgcggcgccagcaggccgcggcggcgctggagcgcgcgcgcatcgatctcgcgcgtgcgcaggtgcgggccccggtcaacggtgtcgtcagcaacttctcgctgcggcccggtgcctatgccgtggccggccagccggtcatggcgctggtggacgaagacagctactacgtggccggctatttcgaggaaaccaagctggctcgcatccgccccggagcgcgtgccatggtccacgtcatgggcgagcgtcaggccctgagcggccatgtggacagcttctcggcgggtatcgaggaccgcgagcgcaccacttcggccgggacgctgctagccaacgtcaaccccaccttcagctgggtccgcctggcgcagcgcatcccggtgcgcatcgtgctcgacgaagttcccgcgggcgtgcacctggtcgccgggcgtaccgccaccgtcatgctggacgatgcggatgtcgcggattctgcggttgccaccggtgcgcagccagacgcgcaaggcaggccatga

SEQ ID NO: 529073 - DNA, 213 bp, Stenotrophomonas maltophilia
atgggcgaactcgacgtggcgggcgtgttcttttcgccgctgatgctgtgcctgttgatcggattcctcggccgcgtgctggtgtcgcggctgatggccgcgctgggctggtaccgctacgtctggcaccggacgctgttcgatctttccattttcctgctcttggtggggctggggttcgcgatcctggtcgcggcgcctgcctggccctga

SEQ ID NO: 529074 - DNA, 1926 bp, Stenotrophomonas maltophilia
atgatggcctatgtgctgtcggttcagcttgccctgccgcagagctactgggcggtggtgacctgctgcgtggtgatgaacccgactaccggcggcgtccagtccaaggcggtctaccgcttcaccggcacgctgtcggcaggatggtgcgcattgatcctggccggggtcttcaataccgcgccgctgctgctcatcgccatcgccgggctgctggccagcacggcttttgcctgggccgtgctggatcgcaccccgagagcctatggcttccagatgtacggcgtgacgctgctgctggtggcggtggccagcatcgaccacccggaattgatgttcgacaccgcggtcgcgcgcgtgctggagatcggcgtgggcatcttctgctgctggatcgtcgacagcgtagtcgcaccgcgctcgctggggccggcccttcaccagcgcgttggaatatggctgccgcgcatgcagacctggatggaggacgttttcgtgggccgttccagcgcggcggcgacggtgcacgatcagcagatgagcatcgccgacgtcacttcgctgacgctgttggtcagccagctccgctatgacccgatggtcagccgctgggagcgggagtgcgccgtcgccatccagcaccggctgctgcggctgatgccgatgctgtcctcgatccgcgaccacgttggcagcctggagccgggccgccgcgaggcggcgctggagtggctggcgcaggcctggcggcggctggaggcagacgaacaattttcaaccggggcagcgagtacagcgcaggcatctgaaaccgtcgcggcccgttccggtgactggcaggccctggtcgaggccaatctgcacgaagtggccgatgacgtcctgcggatctgggatgagacgcggcggctgggccaagcgctggcccggcccgggagcttggacccggcgctcgcggcgcaggtgcgcggtgtcatggacttcccgctccaacctgacttccacatggccgggcgggtgttcctggcgtccgcgctggcctatagcatcctcgccgcgctgtggtggacgacgggctggccgcagggagccaatgcggcactgctgggcatggtggcgatcggcttcttcggccacctcgacgaggccggcaaggcgatcggcgcgttcggaaagttttcctcgctggcccagctgctggcggcgggggtcggctatgcgctgctgcctctggcgcaggacttcccctcgctggccctggttttcgcgctggtcatgctgccgctgggagcctgggccgcaaccaacccgttggcagtgctgctgctggccatggcgttcagcaacatcaacctacaggcgcgctatgcgccgtgggatttcgccttcttcctggattcggccagcggctgcctgctgggcatcctgacgggctatttctgcctggccacgatccgccgcatggggccgtcgcacctgcgcgaacgcttcatcacgctggagcggcgcgacatcgcatcgctgacccgccacgctgacgcgcagagcctgggccactacgtcaaccgggcgctggaccgcgccgcgggcatggcgatccgcatgagcgccgacgacgggcacgatcgcagcgcgcggatgttggcctggctgcgcctgggcgtcgcggtcggcaccatccgcagcgcgctgcggggggtgggaggccagcgtcgcaggctgtgcgaagacgtgctcggccgcatccgcgaggaactgccgcgcggcgcgctcgacgccagaccggagctggcccgtgccatcgacgaatccctggccgtggcggcacggcgcggcgggccgtcttccgaggcgctggtgcgcggcctcgtcggcctgcgactgacgctctttccgccccggccggacgcggaggcacgggcgtga

SEQ ID NO: 529075 - DNA, 1551 bp, Stenotrophomonas maltophilia
atgggtgagtcgaaatttaagcgtttgcgcagcgaagaaatgctgatgacgtgtgccggcgtgcagacggcgggcggtcgggttcagattcgctgggaggctgacagtgcggcgacgccgatggggcaactggcgtacttcattgagtttctgacgctgacggggctgtggtcgggctggcaggatcgctgtccgttgtcttacaccagcccgaacgcgccgagcaaggccgatgtactgggcacgtggatgttgtccatcctgtcggggcaccggcgctactcgcacgtcacgacgatccgctgtgacggggtcaatccagggctgctgggcatgcacaaggtgatcagcgaggatgcgctgcgccgggcgctgttggcgattggcgaggacgaaggcgtggtctggctcgacgggcacttgcgggagagtaccgcgcccttgctcgatgccccgtggattctggacatcgacaccacgatcaagccgctgtacggcaagcaggaaggtgcagaggtgtcgtacaacccgaagaagccggggcggccttcgcacagctaccacacctacctgatggctgggctgcgtctggtgatgggcgtcgaagtcaaggcgggcaacgagcactcgggcagccacaccttacccggcttgctcaggctgctcgatgaactgcccacgccccgcaagccgaagatggtgcgtggtgattgcggcttcggctcggacggcattatgcgcgaactcgaagcgcgggcgcagccctacctgttcaagctgcgcctgtccaaaaacgtcaagcgtcacatcgagcgtttgttccacgtatcgggttggtgcgatgccggccagggctgggaaggaatcgacagcaccctggcgctcaccggctgggcggacaagcgccgcgtggtcgtcctgcgccgccccttgcagggtgagatgctcgtcgcgcaggacgacaacggtcagcaattactgggcttcatcgaggccgatcgcaagagcggcaagcggatcaccggctacgagtacgccgtgctggtcaccaacctcgatcacgaaatcctcacgctgggccagctctaccgggatagggccgatgcggagaacgccttcgacgagctcaagaaccagtggggctggggtggcttcaccacccatgacctgcaccgctgccaactgtcggcaagcgcggtggcactgatctacaactggtggagcttgttcgtgcgcctggccaatccggaagcccgccttgaagcgatgaccagccggccctggttgatgtcctcggtgggacgtgcgacctcccatgcgggccaaaccacgatcacgctgaccggccagcatgcctatttcgacaaggcccgacaggtgctcatgcgcgtatccagccagcttcaagcctgggtgagcgaggctgcggagcagttgggcatcacatcggtctggttgctgtgttgcgatcatctcaagcgcaccatcgccgctatcgggccaccgcaattcgttcgtttgctcacaagtgatgcagacggaattgggtaa

SEQ ID NO: 529076 - DNA, 474 bp, Stenotrophomonas maltophilia
atgcaagcctctcaaggcgcgacgcttgaccgcctgttgtacgacctgacggtcgccatccagcccacccggcgggcctgggtccaggctgcaggcatcgcgcttaccgcctgtggcctatcggtaccgttggccacggtgatactgaccgtgtatcgatctgggcgtggcgtgccgcaaaactctgtggctctggaggtcggtgtcaaccccgccgcgttggtgagaactctcgaccagggtgagaaggcggcacttctcaagcgatgcgacggaaaagtggatcgccgcaccaaggagatcgaattgctacccgccggggaggcgaccgcgcgacagatcgaggaggacatcgcacgcttgcgccgacaactgcttggtgagttgcctgaacaagacgtcgaggcggcgataagagtactgcgacacctggaatcggcagcgaccggctacgccaagcaggggaagccgtaa

SEQ ID NO: 529077 - DNA, 1194 bp, Stenotrophomonas maltophilia
atgaccacgaaggagcgtaatacgaagttatcggcagcggaagcggtggcaggcgaccgtgatttgatcaaggcgctgatgaaagaagcgctacaggaagttctggaaggcgagatgaccgagtttctgggagcgtcgtcgggcgaacgtacggaagcgagaagtggctaccgagccggctactacggccgcagcctggtcacccggatcggcaaactggaactgcgcatcccgcgggatcgcggcggagaattctcgacggagctgtttgagcgctatgcccgcagcgagaaagcgctggtggcggcgctggccgagatgtacgtgcaaggcgtctcgacacgcaaggtcaaggcgattaccgaagaactgtgcggtcacagcttttcggccagttcgatcagcgccatcaacaaggggctggatgagtccttggcgaagtttgccaaccgcccgctcgatgaagcgtatccctacctgattctcgatgcccgctacgagcgtgtccgggacaacggggtaatcggccaccaggcggtactgatcgccatcggcatcaactgggaaggcaaacggcaagtgctggcggtcgagatggcgaaccgcgagagtcagagcagctggaaggactttctgctgcgtctcaaggaacgcggtctgtcgggcgttgaatttgtcgtctccgacgaccatgccggcctcaagaaagcgatcgctgtcgtgctgacggaagccgcgtggcagcgctgctatgtgcatttcctgcgcaacgcgctggactatctgccacgcaaggccgacgacgattgcctccaggaattgcgttggctctacgaccggcgcgacatccaggaagcccagcgggacctggcggcgtgggtcggcaagtggcaggcgaaatacccgaaactggtcgactgggtcgaagccaacattgccgaaacgctgactttttaccggttgccgcgcgcgcaccacaaacacctgaagagcaccaatatgctcgaacgactcaatgaggagatcaagcgcagaaccctggtcgtgcgcatcttcccgaacaccgagtcctgtctgcggctgattcgcgccctgtgcgtcgagacgcacgaaacctggctcgaggacaaccgctatctgaacatgacgttcctcacggaacagaaaaaggagctgttgagactggccgcctga

SEQ ID NO: 529078 - DNA, 765 bp, Stenotrophomonas maltophilia
atggagcagaaacgtccttccattccaatgcaggtgcaggcgttccgccgtcgccacgggcggttccgctggccctgggctttggctgctgcgctggtcctgctgttgctgatctggctcgtgtcccggtcgcccggcgaatcctcaccgcagtcgtccgcgccggtcagcactgcgcaggtggccgggccgccctggcagttgggcaaccctgagggccgcttcacgctgacgctctatgccgacctggaatgtccgttctgccgggagtacttcccgcagctcaaacgctgggtcggcaacaacgccgacgtggccctgcaatggcaccaccagccgctggccgcgcacgagccggctgcgtcagccgaggcacgtctggcggaatgcgccgccgaagcgggcggacatgcagccttctggcaagcgatcgaatgggtctatgcccacacccgcagcgacggccaaggcttgcccgatggcctgcgctatcccggctccacgccagccatcgagcagtgcatcgcgagcgagcggtccggtgcggtcatccgcgcccaggccgcagaagccacgaagagcggcgtgaccgccacgccgtcgctgcgcctgcaggatcgccagaccggccaggcaatcctgctgcaggggccgatcgagggtgacgccttgctgtcggccatggacatgctcgcggcccgcgatcccgccgccacacctacatcggaaatgcctgccgacgttgtcggcgacatgcccaggtag

SEQ ID NO: 529079 - DNA, 546 bp, Stenotrophomonas maltophilia
gtgatcgacatcgaacaaagaatcaccgcagccatcgagcgtatcacatcgggcaacgctccaatgagagttcctgcggacgaaactgatcctgacttggttctagctgattgcctagctgagatacgccgactgcgcgccgccctctccgcccgccagccggcgtatgtgcaaggctgcgatgagctgcgtgcgcggaccgagggcgagcgtgccgcgtacatggaagggttggaggaaggcaagaagatcgccgcccgccagccggtggggcagatcgttggctacatggacccgaacgctgatttcatgctggcgcgtccgggtgactgcgtgctgatgggcaacatcgtcctgtggcgcgagccgggcagcaaatacaccaagcctctgtatgacgccccgcccgcgcaggccgtggacctgggtgccatccgcgatgcagtgcaggggatcaccctcggtttcgacggcgacctcccttacatcaagggaattgcggaagcgctggccctgatcgacagccgggatcccggcaatggctaa

SEQ ID NO: 529080 - DNA, 426 bp, Stenotrophomonas maltophilia
atgagccgttctggatattccgacgactgcgaaacctggtccctgatccgctggagaggcgcggtggcttcggctctgcgtggccgccgtgggcaggagttcttgatcgagctgcgggatgcattggacgcaatgcccgacaaaaagctcatcgccgacaggcttcaggacacgtcgggatgcttctgcaccctcggtgtcatcggggcaaagcgcgggatcgacatgtcaggccttgaccccaacgaccgcgaagccgtgagcgcgaaattcgggatcgccgaagccatggccgccgagatcgtcttcgagaacgacgaggcctggagctggaagcgtgaaacgccagagcagcgctgggttcggatgcgcgagtgggttggtcaacagatccgcacctcggaaacgacccatgagcccgtttga

SEQ ID NO: 529081 - DNA, 297 bp, Stenotrophomonas maltophilia
atgcggcggtacaagcaagaacaggccatggtcgacaagctcatggccacgctcctcgccaaggtcaaagcgacagagttggcggttgccacgctcatcgagagccatccaaatccgaagctcgctctggctctttggaacctcgcgtacttggagatgtcagacgagtcgctggagaaagggacgatggctggctatcaggaccagatgaaggcgagcttggcgatgtggtcccgaggcttccgttctgcggccgaatccaagggaccggaaccggacgcgtcgcaatccggataa

SEQ ID NO: 529082 - DNA, 348 bp, Stenotrophomonas maltophilia
atgagcgagatcgaattgaaggcgcgggagcttcttgcagctgagtatgcaaagggtcaattccgcgcatacgcacctgagatacggagtggggccggcactgcttttgatgaagaaattagggcaattgtcgccatcatttcctccctgagcccgccagatggctgggttctggttccagtggagccgaccgacgacatggtgtgggctccgtccgatgtggaagttggctatccgacgtgggccgggagtagggacggatgcaccaccgatgaagcgaaagctatctgggcatccatgctggcggcgcgcccgccgctgcccgctcctccggaggtggagggatga

SEQ ID NO: 529083 - DNA, 285 bp, Stenotrophomonas maltophilia
atgggcagcgcactggactacgtactggcgcagctctgcctcctcggcagatcgaaggacgttgccaagatcaggttgggcgtgatcgtccgtaatgatcgagccgtttgcgagaccgcacgctggcgcctgcgcccgagctatttcgggagtaggtgcgaattgagcaaagcacgactggagatgcttgcgggccgagaagtcttcttccgtggaaagcgtgtaactcgtgaggagctctcgagcatgagcaagcctcgctatcggtgggaagtgcgtcgatga

SEQ ID NO: 529084 - DNA, 216 bp, Stenotrophomonas maltophilia
atgaattgccttagcaaatccaagatcattgaggagtgcaagcttgccctcaaggcaatggaggatcagtgggtggtgatcgatggcgagtttggcccaatttctccgactggaaagttcggagacctggccggagccattgaacatggcaaggagccggtgatagagcgattccgcaagttcattagagaaatggagtcgtcagacggtttctaa

SEQ ID NO: 529085 - DNA, 201 bp, Stenotrophomonas maltophilia
atgaccgacgatcgattcccctgggacaagcatcccgtgagtgcagaggccaaggcgctggtggcgaaggccgaggcgcatgctgcttctgagcgtgccagtcagcgccatccgatgcgggtccgggattacctcatcctaggcggagccatccttggcctcattgggatcccggcaatattgatctcattcttcatctga

SEQ ID NO: 529086 - DNA, 462 bp, Stenotrophomonas maltophilia
atggcaagaaccgatccccaagtaaacttccgagtccccgctgagcttctcgaccgactgaagcagtcagctgctgacaacaaccggacgatcacggcggaactggtgaaccggctggaaggctcgttcctagacgaggacctgggttcggctggatatgggatgcacgaggcgcaagacagggctgccatcctgaaggtgctacttttccctgagatcaacctgctccgcgcacgagtcgaaatgcttggcggccgagaagcagtcctgctggccaacaaggacgagctggcgaagaaggtgacatctccgcgtctcgtcgcgaacgaggtggaaaagcgctcgcacatgtcgcgagcagtcgccacctatccgctcacaaccctctttaccgacgaagagctcgacaagctcgctgagcgagtcatcaccatccagaaggccatgggacagctgaaatga

SEQ ID NO: 529087 - DNA, 174 bp, Stenotrophomonas maltophilia
atgagcgagactgaacaggtgaatttccggctcccagtcgaactacgcgactggctccggcagcagaaagatcggaaccgcagttcggttacgagcgaaatcgtccgggccatccaggaacgcaaggacagggtcgagttcaagccttccggcagcatcggagcggcggcgtga

SEQ ID NO: 529088 - DNA, 624 bp, Stenotrophomonas maltophilia
gtgaacgcgctggccgtagtcgtagccggggaggcacgcatcgacacgcgggtgatggctgaccatctcggggtccagcaccagaacctcttcgagatggtgaaggactacaaggccgacttcgaggcgctgggaaaggtccggtttgaaaccggagcttcggagacaagccggacgggacagaagcagcgcttcgcactgctgaacgaagatcagtgctacctgatgctcacctttagccggaacacggaacgggtgcgaccgctgaaggtgaagctggtccaggcgttcaaggaagcgcgcgaggcccggaagcttgatgagaccgagtacctgccgggataccaccagttgcacgacgtgattcatcgtttggcggccggctccagcaatgagcgcttcgtccatatgaacgtgaacaaggctatcaacaaggctgtcggaatcgacgccggccagcgcgggacgcttgaagtccccgcgaaatcattgctggtggtcgcgcagatggtcgcgcagatggctctgcaggacgcgaaggaccacaaggacggctaccagcgggcgaaagactctcttggcgagctgcacaaggccatttctcgcccggcgaaggccgcatga

SEQ ID NO: 529089 - DNA, 810 bp, Stenotrophomonas maltophilia
atgctgaccatgctcaagcggctggcgtcgctggtgccaactcccgccaccaacaaggtgacgctgttcgtcagcgacaccggcatcccgtcgtacaaagatgacgccggcctggtcacgccgatgagcggccagccgatcccagccggctacattgacggcctgaagatggagtgggtatcgggcacgcagatgcgtttcaccagcggctcggcgtacattccctcgctggggcgagtgctggcattgccatctgcgctgaccaagacgctgacactatcgccgaatacctggtatcacaatttcctgtacagcaatgcaggaacttcagacgttgagacggtcacaacgctgccggacacgccctacagcggcgccgcgcgcgccaagactggcgacacctcgcggcggtatatcagcagtttcaagacggatgcgtcgtccaacatcattcagttccaggtgggcacgaacgattcgtttgagtaccgcatcccggccaacactcagccgcttcgatgcctgagcaacggtgtagccacaacccgaaccactgtctctctggcagctgcggtcccagtcactgccaccgcggtcagcttgatcctgaccaacaccatgtcgagcggctttgggcttctatcggtgccaggtgttacgccagaactttttggcgtgccaaccgcaggaggtgtcggacagttctttgatttcgtcttgtctaccagccagacgatggactatcgcatcagctctgccgataccaacgggctctacattgatgtccgtgctttccgggtagctcgctaa

SEQ ID NO: 529090 - DNA, 168 bp, Stenotrophomonas maltophilia
atggccgattcccctctgactgcgcaggagaaagtggcttatcaggcatatcggcaggcgctgcgtgacctcccgagcctgccaggtttcccgaacgtggcgtggccactgccgccagcgctcaccgacggagccgccagcggcgccgaaatccccgtcacgccgtga

SEQ ID NO: 529091 - DNA, 2436 bp, Stenotrophomonas maltophilia
atgacgacttggcaagagaacgacctgcacgccgcccagctcgaactggagaaggaaagcaccagcctgggcattgcccgctacgagaagatcagggagcagcgccaggaggccgagaccggccccggccgcaagctggtcatggagagcatcgacgccaccgccgccgcgatcatggcgttcgtggccgaagccgacaccggcaagccgggcaagcgccacgccgccctcaagttcatccgccacctgaacccccacgccctcgcctatctgaccagcttcacctgcgtcaacgcgctggtcgccgatcaccgcaaggcggtgtccgtggcgatcaccctgggccacgaggtagccaacgagatcaacttctccctgctccgcgagaagcaccccggcctgtaccgggtggtccaggagcagctcaagaagtccacctcggcccggcactccaccgccgtcatgcggcacgtcatcgccgacgccgagttcgcccccgaggacgacaagcgcctctacctgtccgacaaggacgcgctgctggtgggcatgaagctcatcgagctgttcgtcgaggcgaccgggctggtcgagctggtcaccgtggccgagcgtggcaagcgccacctgctcatcgccgggaatcagaaggtgctcgactggctgaccaaggcccacgacagcgccgccctgtaccagccggtgctgatgccgatggtcgtcccgccccgtccgtggaccacgccccgcgacggcggctacctgaccgacatcggcggccgggctgacctcgtgcgtacccgcaaccgcgcctacaagcgcgagctggcgctggtcgatatgcccaacgtctaccaggccctcaacgccatccaggcaaccgcctggaaggtgaacgtgcccgtcctggaggtcatgcgcgagctgtggaacgcaggcggcggtgtcgccgggctgccggagcgcgagctgatggacctgccgagccgccctgccctgctggagaccgacccggactacttcaaggagcaccacgccgacgagttcaaggaatggaagcgcgaccgcgccaaggtctacgaggccaacgcgcgcagcgtgtccacccgcctcgccgccgcgcagaagatcgcccttgcggagaagttcgccgagtaccccgcgatctacttcccgcacaacctcgacttccgcggccggtgctaccccctgcccccgacgctgaccccgcagggtgatgatgcggccaagggcctgctgacgttcgcccaaggcgtgccgctcggcgaggacggtgcctactggctcgccatccacgtcgccaactgcttcggcgtggacaaggtgtcgttcgaggagcgcgtggcctgggtgcgcgagcacgaggagcagattctcgacagcgccctcgatccgctggacggccaacgcttctggatggacgccgacagcccgttctgcgcgctggccgcgtgcttcgagtggctcggctacagcctcaacggccgcgatcacgtctcccatctgcccatcgcgctcgacggctcctgcaacggcctccagaacttctcggccatgctccgcgactccgtgggcggcgcagccaccaacctgatcccgcagccgaagcccgccgacatctattcgcgcgtgaaggacgtggcccaggagaagctgcgcgcccgtgccgagagcggcgacccgctggcgatcaagctggacggccagctcacccgtgacatcgtgaagcagccggtgatgacgctgccctacggcgtcacgaagtcgggcatgcgcgcccaggtgctctccaagttcaagaagctgggcatggaggacgattgggagaccgccgagtacctggcgaccctgctgtgggagtgcattggcgaggtggtgatcgcagcccgcgcggcgatggactggctgcgtgacgcctccaaggtcgcctcgtcggccgacctgccggtgagctggacgacccctgccggcttcccggtcctccaggagtaccgcgaggaggaaggcgtccgcatccggccgcacgtcggaggccgcgaggtgaatttagtggtcaacatcggcggtactaagctcgaccgtcgcaggcagaccctcgggatcagcccgaacttcgtccactcctgcgacgccagccacatgatgctgaccacctgcctcgcggcagagaacggcatcgagtcgttcgcaatgatccacgactcctacggtacgcacgcaggccaggcagcaatcctcgccgccgcactccgacaggcgttcgtcgatcagtacagcggcgacgtactggccgacttccgacagcaactcgtcgagcagctcccgccagaagcggcagagaaactcccacccctcccgccgcatggcgacctggacctcagcctggtgctggagtcgcgctatttctttgcctag

SEQ ID NO: 529092 - DNA, 999 bp, Stenotrophomonas maltophilia
atgtcgccgcccatgctgccttccgatccgtcttcgccgctgcgccggcgcctgctgcgtgccgccctgctggcaccggtggcgggcgcgctggccaccctgcccggctgttcgctgccggaacaggtcgatggcaccttcctgcagccctggcgcagccacctgcaatggggcatggcggactggcagcgttcgctgcagtttgcgcgcagactgggctgcaggcagctggtactgcaatggaccggcatcagcggcggcgccgacggagattgggagctgcccgataccagcgtgcgcatgctgttcactgccgcggccgaagccggtatcgccgtgcgcgtcggcctgccgttccagcagcactggtggaaggtgattggcgctgacgatgcgacgctgcaggcgttcttcgccgacagcctggcgcatgcacgcagctggctggcgaaggcgccgtgggcacgcctgcaggcgttcaacggttggtacgtgccctacgaactggagcagtaccactgggccgacccggcgcgccagcagtggctggcgcagtggctgcacggcatcacccaggccagcgcgggcggcggtggcaactgggcgatttcctgctatttcagccgcctcgccaccgacggcaacctggtgacgctgtgggatgcggtgctggcgcaggccacgctgcggccgatggtgcaggatggcgtgggtgtggccggcgccggcaacgtgcagcagctgcaaccgctgctgaagcatctgcgcgagcgtggcgttgccttcgatgcgatcgtggaactgttccgcgaactgcccggcgggaacaacgatggcacccagttcaagggccagaccgccgatgccgcgcgtatcgaacggcagctggcgtgggcccgcgacagcggcgccgaacatgtgctggtgtatgcgctggacccgtggctgtcgcaggacacaccggaagctgcagccctgcgcaaacgctggggtgtgtag

SEQ ID NO: 529093 - DNA, 1134 bp, Stenotrophomonas maltophilia
atggccgagcgtgcagtcttccgcgacgaccacgacctgttccgtgaacaggtgcgtcgcttcatcgatgaacacatcgcgccgcactacgcccagtgggaacgcgatggcatcaccccgcgcgcgctgtggcgggccgcgggcgaggctggactgctcaactgccagctgcccgagccttatggcctgggcggtgatttcggccatgccgcctgcgtgatcgaggaactggcccgcgccaacttcctcggcatcgggttctcgatccactcggacatggtggcgccgtacctgatgcagtacgccacgccggccgctcgcgatgcgtggctaccgaggatggcgcgcggcgaagtgatcggcgcgatcgcgatgaccgagcctggagcaggcagcgacctgaagacgatccgcacgcgcgccgaaaccgtggacggtggctatcgcctgagcgggcagaagacctggatcaccaacggcagcaacgctgatatggcggtggtggtagcgaccatcgcgccggaactcggtgccggtggcctcagcctgttctgcgtcgatctgcgccagcccggtgtcagccgtggcgcaccgatggccaaggtcggccagcacgcgcaggacaccaccgaactgttcttcgaaggggtgttcgtgccggccgatcgcctgttgggtgaagagcggctcggctttgcctacttggaagagcagctggcagccgaacggctggcgatcgccctgcgcgcagcggcatcggccgagggcatgcttgaggagaccgtgggctacgtacgccagcgcaaggcgttcggccggctgctgatcgaccaccagaacacccgcttcgtactggcgtcggcggcggcgcagctggcgatgctgcgcagcttcctcgaccagtgcctgggcgagcagatgcaggggcggctgcagccgatgcgcgcggccatggccaagctcaacgccaccgaactgcagggccgggtgctggatgacctgttgcagctgcacggtggctacggctacagcagcgaatacggtatcggccgcgcctgggccgacgcccgcgcgctgcgcatcttcggcggcaccagcgagatcctgcgcgacatcatcggccgcgcgctgtag

SEQ ID NO: 529094 - DNA, 687 bp, Stenotrophomonas maltophilia
atgaacctgtcgatgaaatccctgattgccgcggcgctggtgctggcgccgtgcgcctccttcgcccagcaggcagcaccggaagggcgcctggcccagctgtatgccgcacggccgccggccggctcagcgttcgtgcgcgtgctcaacccgggcgcgaacgcagtcaaggccggtgtcgccaacggtgccgaccagaacgtgggcccggcggcgcgtgccacccgctacgccatcgtggaaggcggcaagccgttcaccgtgcgcgtggccggcaagccgcgtacgcagccggccgtggcggccggcagcttcaccaccctggtgctggatggcgctgcgccgtccaagccggtggcggtgctggaagacggcggcggcagcagcgatgcgctgaaggccgagatccgtttctacaacctggccgccggctgcgcgcagggcaagctggcgatggccgacaagggcgccgcggtgttcccggcggtggccgccgggcgcagcgcagcgcgtgcgatcaatccggtgaaggcgcgcctggtggccagctgtggtgccaaggacagcaccgcgctggaactgccggcgctgcagcccggtgatcactacagcctgttcttgaccggtactgccagcgctccggtgctgcaggggcagctcagtggtaccgacagcgtgagccgctga

SEQ ID NO: 529095 - DNA, 1479 bp, Stenotrophomonas maltophilia
atgcacttcgatttcgaccactgccgcttcgccgacctggaggtcgccgcgcaggccccggccctgcacgccgccgatggcgtgatggactgggcgcgcctgtaccgcagcacccaggactggatcgaacgtgcacgcgcggcgggcctggctgcaggcgatgcgctggtgatttccgggcacaaggaagcggccttcgtcgttgccatgctcggctgcctcagcatgggcgtcacctacgtgccggtagacaacatcaacccgcaggcgcgcctgcagcgcatcaccgccctggtgcatgcgcgcgcggtcttcgacgcggccgccgatgcgttcctgccgggtgccgaagcaccgcgcccgctggcggtaccggacctggcctacatcatgttcacctccggcagcaccggcgaccccaagggcgtgcagatcggccgcgacagcgtcgcgctgttcaccggctggatccgcgactgtctggcgctggggccggcgccggcgttcatgaaccagatgctcttcagcttcgacttctcgctgttcgacctgtgcggcgcgctgggcctgggcggctgctgcgtcctgtgcccgcgcgaggtgatcgccagcagcgagcagttcatcgaccacctgcgtgattcgaaggtggcggtgtgggcctccacgccgtcgttcgtgcgccagcagatcctcaacccgcgcttcgatgcagcgcatctgccggacctgcgcgtgttcgtgttcggcgccgaatcgctgaccccgcgcgtggcggaggagctatgggtacgcttcccgcaggtgcgcatcatcaattcctacggccccaccgaggccacctgttccaccacctgggtggagatcgacccgaccctgcgcgcggccgcgcccaacccgttcccgatcggcgtgggcaagccctatgccgaggtgttcctgatggacggcgagatctgcatggccggcgaccacgtcatgcgcggctacctggaacgcccggacctggatgccggtgtcctgttcgaacacaacggcaagcgtgcctatcgcagtggcgacctcggcgaccaggacgcgcaggggcggttctatttccgcggccgtcgtgatgaccagatcaagctcaacggctatcgcatcgaactggccgaagtggatgtcggcctggcccggctgcctggcgtggtggccggcgcggcggtggtgctgcgccggcccgatggcagcctggtgcgcatgatcggcttcatcgagacgacgcagccggccagcggcgaactgcaacgcgtgcccgaggcactggccgactggaaggaacagatggagtgctacatgccgccctacatgattccctcggagctgttcgcagtcgatgccctgccgcagacgatcagcaacaaggtcgatcgcaagcaactggagctgcgttaccagaccttggcacgcacgcttcgcatgacggagaaacctgcatga

SEQ ID NO: 529096 - DNA, 234 bp, Stenotrophomonas maltophilia
atggacaagcagacgatccagaaccagctgatcgatatcgtcgaggcggtgatcggcacgcgcgtgcagccggacgaatacatcgagtcgctgtttgattcgatgtcgaaggtgcagctgatggtcgaggtcaaggaccgcctcggcgtgaccctgccggtcgacgagatcgatacgctggtggattcggtgcaggtactggccgactacgtggccgagcacggcgcgcactga

SEQ ID NO: 529097 - DNA, 1581 bp, Stenotrophomonas maltophilia
atgctcttcaactccttcctgttcctgctggttttcctgccgatcgcgctgggcgtgcactacctgctgggcgcgctgcagccacggctggccgcgctgtggctgtgcgtggcctcgatcgtgttctacggatggtggaacccgcagttcgtcatcctgctggccggctcgatcgccttcaattacctggtcagcctggtcatcctgtcgctggccaagcggccgaagctgcagctgctggccaccgccttcggtgtagccgccgacatcctgctgctggtgcactacaagtacttcgcggcgatggtgaacttcgtccacgacctgggcttcaacgtcggcccgatggacacgctgatcctgccgctgggcatttccttcttcaccttcacgcagatcggctacctgctggactgtcgcgccggcgtggtcaacgaccgcagcccgctcagctacgtgctgttcgtgaccttcttcccgcacctgatcgccggcccgatcctgcatcacaaggagatgatgccgcagttcagcaagcgcgagacctaccgcttccaggctgagaatctctcgatcggcggcatgctgttcgtgattggtttggccaagaaagtgctgctggccgacaccctggcgccgtatgccgacgctggattcgcctccaccggtgacgtgcagttctggggcgcgtgggccacagcactgacctatgcgctgcagctgtactttgacttctccggctattcggacatggcactgggcctggcccggatgttcggcatccgcttcccgctgaacttcaattcgccgtacaaggccaccagcatcatcgacttctgggcgcgctggcacatgacgctcacccgctacatcacagcctatctgtactacccggtggcgatggcagtgacccgatggcgcacccgtcatgggcgcgcgaccggcccggccgcggtgtccaccgccgggggcttcctgtcgatgatcgtgctgcccacggtatgggcgatgggcttggccggtatctggcacggcgccggcgtgcagttcctgatcttcggcctgttgcatgcggcctacctggccatcaaccacgcctggcgcgtgttcgtgggtggccgcaagccggcggcgatgcgcacgctcaacccgttccagcacgcgggttatctgctgctgaccttcggtgcggtgctggtggcgcaggcgttcttccgcgccgatggtgtgcatgatgcctggcagctgatccagggcatgttcggcgtgcgtggctgggagagcatggaaaacctgggccatgtaggcggcctggcgctggccgatggcatgcgcctgctgctcggccaccacctgcagctgctctacatcctggtgtcgctggccatcgtctggctggcgccgaatgcgcaccagatcatgggcgtgtactcgccctcgctggccaagcccaacccggcaccgcgcgcgtggatgcgctggcagccaaacctggcctggctgctgctgatgctggtgctgctggctttgtgcctgctcaacctgcacaaagaaacccgtttcctttacttccagttctga

SEQ ID NO: 529098 - DNA, 1125 bp, Stenotrophomonas maltophilia
atgaatgcccgtcccggggcgcctgcgcccctgccgcccgctgccccaccgcgcgcccatcggctgaccgccgtggtggtgtcggcgctgctgttgatcggtctctgcgccggggggtggatgctggccaacgccaagctgccggccgaaaagctgctgccctccaagtgggccgacggcgaggccgggcaggcgatcaaccaggcgctgcgcctgccgatccagaacgaaggtgatctggtcggcgccgcgctgcgttaccgcctgctgggcgataccggcgaccaggtggcactgggctgcccggactggctgttctaccgcgacggcctgcgcccgcagcccggcgccggcgccaaggtgttcactgatcgcgtgcgcttgatgcagcactggtcgcagcagatgcgggccaagggcgtgcagttgctggtggtggtggtgccggacaaatcgcgcatcgaacaggcgcacacctgcggcctgcgctattccgaaccaatgcgcgcacgctacgggcagtggcagcaggcactggcggaggcgaaggtgcccagcgtggacctgctgccggtgctgtccgcgcaggacgtgcccgtgttctttcgcaccgacgtgcacatgaaccggatcggcgcacagcgcgctgccgatgtggtcactgcggcggcgctgccgctgctgggcgggcagggcggccaggcgttcgaggtcggcccattgggcgcgccgaagccgcgcatgggcgatctgatcgtgctggccgggctggagcatgtcgggccggcatggcggccttcgctggaccaggaaccggagcaggtgatcgccccggtccgcagcggcggactgcttgatgacacgccgccggtggaggtactgctgctgggcagctccaacggccggcgcagcctgtttgccgaacgcctgggccatggcctgggacgcgaggtatggaaccagagcatggacggcggccagttctcgggcgcgctgctggcggcctggccgcagcaggcgacgtggccgccgaccctgaagctggtgatctgggaattctctgaaatggccctgtccctgccgctgaccgaaggcgagcagaaggcattggccggtatcgactga

SEQ ID NO: 529099 - DNA, 1029 bp, Stenotrophomonas maltophilia
atgaagcccgtttcccgttcaaccaccgcgcgccgaacgcgcatgttgctgctggccgcgctgtgtgcgctcgccgccgcaggcccgctgcaggcgcaggcaccggctgcgccggtggccgccgccaaccaggattcgtccatcgtgctgaccggcagggacggttggctgttcccggcctggggcagcctgaccgaggtcgacaccgccgccgttgcccgcaacaccgcgctgatcgccgaagcacagcgtgcgctcgccgccgctggcgtgaagctgcaggtgctgttgctgccggacaaggcgctgttctacgaagaccggttgccggagggcaagcgcctgggcgatccggtgcgtggccgttatgcgctggagctcgagggtctggccaaggcccaggtgccggccgtggatgcgctgcagaccatgcgccaggtcaagcagggcggccaggatgtgttctaccgcagcgaccagcactggacccagccggccgccgacgcggttgccgtggccgtcgccgccaagatcaaggagcagatgccgaccctggccggccaggccggtaccggcctggcgctgggcagcgagatcaaggagcgccgcttcggcgacctggccgaactgttcctcaccgacgagcagcgcaaggcgatcggccgcgacaccttcaccgtccgccgccaagccgaacagcagtcgctgctggatgatgcgcaggcaccggtgcatgtgaccggccacagcatggtgcagccgtacttcggtttcccgcagaagctgtccaacctgatcgaccggccggtgtcggtaaactggaagccgggcaacgttggtcactgggtgatgctcctggaatacctggaatcggccgatttcaagcagaacaagccacaggtgctggtctggcagatgtttgagccgtcctacccgcagggcccggatgcacgcggccagtgggacaacgcctcgattatgacggcagagcagtggaaggctcgcctgcacaaggcactggggcagtaa

SEQ ID NO: 529100 - DNA, 2817 bp, Stenotrophomonas maltophilia
atgaagaccacgctgctgtccaccgtcattgccgtcgccctggctgccactacgccagcctacgcgcagtcggacgcaccactgccgctgtccggcccggcgtaccggctggccgagcaggcctttgcatcgtacgagcgcggtgactacagcgccgcctaccgccaggccagcgaggcctcgcggctgcgcccggacgtggtgcgcctgcgcctgctgcagatctacgcgctgcagaagctgggacgcggcgacgaggcgcggcagcaggcgcgaaatgccttgaacgctggactgaaggacccggccctggcggggctggccagcgcagcgcccaacgtcagcagcgcgaccggcgcccgcgccgcgccgaccacgcgccagccccctgccgaacgtgcctaccagcaggccttcgcgatcgccaccgaggcctacaccgcctacaacaacgaccagatggcggtggcagccagcaaggccgagcaggccttccgccagcagccgcagcagggcgcgtgggcgatgctgtgggtggcatcgctggaagcacagcagcaacttgagcaagccgatgcggccgcggccaccgcgctgcagctgggcgccccgaacgtggccgacctgcgcgccaagcgcgtggcgctgggccgccagcgtgcggtaaagccagcgcaggatggctaccaggcactgatcgcgcaggacttcggcgccgccgccggtttcgcccgtgaggcagtggcgcgcgcgccgggcgtggcgtcgcaccgcctgctgctgatgaccgcccagctgctcgacgggcagctggccgccgccgaacagaccgccaatgatgccttggacaacgacccggacgacaccatcgcgctggtcatgcgcgcctacctgcgccagcgccagggcgagaccgcgaaggccaacaccgatttcgatgccgcgctgaagcaggattggctggacggccagcagcagcgcaacgtccgcctgctggcggtggatgccgcagtggcggccggcgatcgcgagcgcgcctccgcgctgctggcgccgttgcaggccgatacgctggccgacgaggacgagaagacccagcagggcatccgccaggccgtggccgagcgcgccaaggccgtccgcgcggcgcgcgccggccagaccctgaccttgcagtcgtatccggcgccgttccagcagtgtcgcgacacgccgtatggcacccagtgcgaactgatgcccgccgacctgcagggcgatggtggtgcctcgcagcgcgcctatgccgcctacggccggcaggactaccagcaggccatcgtcgaagcgcgccaggccgtgcaggaagccccggacagcgtgccgctgcagggcctgctgaccaccaccctcgccgccggtaaccgcagccagcaggctgaagcgcggcagcgcctggacaccgcgctcagcgcgcatcctgatgatgctgggctgctgatgcagcgtggttacctcaaccaggcggcgcgcgagcctgcgctggcgctggccgacttccgcgccgccgaggccaccggcaaggcgcccaagaccgtggtgatggaccaggcctacgccagtgccgccaccggcgaccatcgccaagcggtgaccctgctgcgcggcgcgatcgatgccgccgatgccggccagctgccgctagacaaggcacagcgctataacacgcgcagcgccatcgccagttactcgcgcacctggggcgtgaccgcagcggccggctatcgcgggtcgcggcaggcggcgaccaacctgggcggtgcgtcgatcagcacgccgggcgcctcggcgttcagcacgctggaagcgttctggcggccgcaggcgaccaacaaccagcacggcaccctggaagcctacgctcgcattgccaacacgctgtacgacgctggcggcacgtttgaatcgctgctgttcaccgacccctgcaccggggtggaaacgccggacaaccgcgaacgcgccgaacgcctcagccggtcgcgctcgattgccgggtggccgtccaccatcggctcgttcggcgtgcgctatgcgttcggccagaccggcctcagcgtcggcctggaacgccgccagttcctcggcagcgcgacccgccgcggtggcatttatgccgactcggcggcggtacgctgccagatccagctcgaatccgaacgcccgctgcaggccaacctgctggcgcgctatcgcttgaacgacagtgccgggggctggatgacctatgccacctacggtttctacaaaggcaccggcgtgcgcaccgacgtcagccagtggtggacggtcagtggctacgcccaggccggcctgagctgggacgacaaccgtgcgcacttcaccatcgatgcgctcgatgccagcggcaaccccagccagcgggtgagtgaatccaacggccgtctgcgtcgccagcaggcgtttgccgcggccgaactacgcgccggccgcaactaccgtttcggtgccgaccagacccgctgggtgctgaccccgtacctggtgctgggggccgactggcaggaccagcgctcgcgggtgcgcggcatcaactaccccggcatcgggtcgcagtcgttcgcgctgtccgatacccagcgcagctggtcgctcggcgccggtcccggcgtcggcgcgcgctactggttccgcgaggaccactacaacgcggcgcgctcctacctcgacctgtcggtgtcctaccgcttcgccatcggcggcggtgatacccagcgggccaagggcctgttcgccaccgccaccctgtattactga

SEQ ID NO: 529101 - DNA, 2202 bp, Stenotrophomonas maltophilia
atgacccagaccggccgacgtaccttcctcctggtgtccaccgcactggccttggccagcggcgcggccatcgccagcgcggccgacaccgccgccgggcagttcgccgaatggaccggcgacagcaccgtgacccggcagatgacgctgcgccagctgggcttccgccagccgctggtgctcagtggccaggagagccagcgcgagatctacctgcctgtaccggtgggcgtgccgacccgcgacgcacagctgcagctggatggccgctacgtgcgtggccacaccggccgcacctccgggctgtggtcggtcgatggtgacccgatcgccgcgcgcgcgatcaccgatgcgcagggcgatgccagccagctgctggcgatcgatggcgaaccccgcgacaacggcttcgtccgcgtcggcgtgggctggtggtcgatcgtttccgattaccgctgcgccgaccagagcgcaccggccaacgtgctgcggctgtcccccgattcgcgcttcagctaccgcttcgatggtcgtgcggtggatacggtggccaaggcctggggggcattgccgccgcgcgtgcgcctgctggtcgatggcaagtcgttgcaggccgcgtcgtatgacgcagcctggcgtatcggtgccgcgctgcagaccggcggcaagcaggtggacgtggtcgcgttgcccaaggtcggcgacagcgtcgacctgaccggcatcagcataccggccagcctgatgggtgtgccggcctacgctgcgctggccactggcgagcacacgcacgcgatcaaggacctggccgaagtcggtgcactgctgtcgctgcgggacagcggtcctctggcggccgatgtgatgatcggcagtgaagcgctgcgcaacggcgtgcgcgccgcgctcgatgccctggccgcgcaggtgggtgccagcggcgccgatgccgccagcgcgttcagcgcgtggcgtgcggccgacatgggtgcgctggaaaagccggtcgccgccgcgtcggtgagcgtggccgcagtggctggccgtccgaccctggtggttgatccggccgccggtggcaaggtcgccgggttgctgtccgaacaatggcgcgcgtatgcactgggtcgttcgctgaaggtcgaccgggccggtgccccgccgatgcagggtgacctggtgctgctcagccgcctgggcaatattgccggcacccaggacatcgtcagccgcggcgaccgcactgccagcttcgagctgggcgcgctgtcggccgatggccgcctgcccgaggaagtggtgatcgacgtctccgctgcgccgaacgcgggcgggcagggcgcggtggccacgatcttcttcaacgattacctgctgggcgccaaggtgctgtcggccaatggcaagccgcagcgcctggtggccaaggtgccggcctacgcactgtcggcgcgcaacgaagtgcgcgtcagtttcctgcgccagcccgcgcgcccgtactgccatgacccggccacggcattcccggtatcgatcctgcccagcagccacatcaagctggccaagcgcaccctcggtaccgacttcatcggtgccgccagcctgctgtcgcgttccaacgaagtgttcgtgccaggcacctggctgcaggacgcgccggcgtcgctggccaaggtgatcgccatcgccagtgctgtcggtacctcgccggaagccgccgaactgaagttggtcgatgccggtgcggcgatcagcccgggcaagccatacctggccttcggcgtggcgccctcgggcttcaccctggccggcctgaaggatggccacctggtgatcgccggcaagccgcaggcgctgctggacctgaccggggttgaacatgccgccgcagtgcaggtggcctcggccggcggacagaccggcgtgctgtacagcgacctcggcacacaggggccgacgctggacacgccgttccgcctgctgcgcggtgacctggcggtgatcgatggcagcgacgtggtgcgcgacttcgacagccaggacccatacggctcgcgcatcgccgaagcaggcaatccgcagtcgggctgggaaaagcacatggtatggctgctgatcgccgtcggcgtggtggtgttcgcgctgctggccgcccgcatcacccaggtccgccgccgcaagtccgccagcaccgggcactga

SEQ ID NO: 529102 - DNA, 192 bp, Stenotrophomonas maltophilia
atgtcgtaccgcacgacgatggtgttgatggcgcgctcgccgatgttgcccaccttcttcacccggagcaaagtgacggcggcgaacctggcgcggggtgtaaaagagaagggcccgccggagagcgggcccttccttgttcatttgccggttgttgacgactggatgggcttcggggtggtcaggtcgtag

SEQ ID NO: 529103 - DNA, 507 bp, Stenotrophomonas maltophilia
atgcttccctcgcacggctaccaaggtttccgcaccgccccgatgcccgctggctgggtccagatgggggagagctgggtgctgtggtggagcggtcggcagatcgccaacgtcagatgcggcaaggatggcgcggtgcgcgtgcgtctggatgcccggaagatgtggcaggtgaaggaagcgcgggcggcgagcatcgcgcagggcaagcgctacgccgaacgctggtgcgcggcgagactctacccggagatgcgcctgcgcgcggctgtgacccggctgctggatgccacgccgggcgatccgtttgaaccgctgcccggcctgccgccgacccgagagcagcagcaacaggcccggcgcctcgccgaggcaaaggtcgcccgttcgaatcgggccggggtcaccagaatcaacaacttgcgaaagccgctgtatcgccacaggccatatcgggccatcaaaaggcatcatttggtcacagtggtgttaatggcgaatcaatag

SEQ ID NO: 529104 - DNA, 738 bp, Stenotrophomonas maltophilia
atgacgccaagcgaacttcattacaacctcaccgaagcagttcggacgatgccggaattcaacgtcgccgcgagcaatgtgccgctgaccagcgagcaaattcgatggcaagcatcggcacttgtcttgatggaactgcaagacaacctattggacgcgtcttcattcagatccgccatgtccagctccatccacgggctattgcgcgccaacgccggcatgacgttctatcaacttttggcgacagcaattgcccgccttgaactacagttgccttctgggattaggggagccttcataccaattggaaatcagttcgacgcacttcgtgcgatctcagaaatcgtcaggtctgctgagcaggatctgttcattgtcgacccttatgcggatgacagtgcacttgttcgatttgcgatgaatgttggcgagggaattagaactcgaattttcagagatggacaatatcgagattgcggcgcccgcctccgttcggcaggagatgcgtggcagcagcagtacggagctgcacgccccttggaaatcagaagtgctccaaacagaacactccatgatcgattcatcgcgatcgactcgacgaaagtttacttggtctcccaatcctttaaggatctggcagcacgctcaccggcaacaatacagagagctgagcagagcctcgccgacgagaagctccacgcatttgaagaactttggcagacggccgccctgctatag

SEQ ID NO: 529105 - DNA, 177 bp, Stenotrophomonas maltophilia
atgaccgaactgtccaacatcgtggcggccgagcgccgtctggaagtcctccacccggcaacccaagagccggtgggcctggtgctggtcctgctgcccgacacgcatccgcaggtgaaggcggcagcccgcaagggaatcaacgagcgcattctgccggcgcgaagctgctgctga

SEQ ID NO: 529106 - DNA, 333 bp, Stenotrophomonas maltophilia
atgaggcttgatcgcaagggtaacctcgttcttgaactgaccatttccagcttggatccggattacgacaaccaacggcgactcatggtctgcctaggtcgggtttcggatgcaaagccgattgaggtcgagtacacgcgcaagcagcattcagcgaaggagacatcgatttgggtcacctgcacttgggaaagccaagagcttgcgtcagttggcgcagtaatgtcgttcgtccgaagcgtaactactggggacttaaccgacctgcagatcaagcctgaatctgtggcgcgtataaagcaaattgcgggacctgactggaaatcgatctag

SEQ ID NO: 529107 - DNA, 426 bp, Stenotrophomonas maltophilia
gtgagcttgattgagagtatctgtgacgagctggatttgattagcctggagggttgtgcgccggcggacgtgggggtgctccagagcgggctgaatctcctcgaggctctagtcaagtattactcggctggtgagtacattagcccgcgcgaagcgtcgggagtattccacttgatgaatcttctaagggctgctgtatacgattcacgtcgaaagaacatgtttgagcgggagcggcaggcgtttgcggcgctcggtgaattggacgatgcggccgagcaagacagtaaggccgtcgaggaaattctgggccagcttgatcaggccttccgcaatgatgtgtgggcgttcaaggacgagggcaggttgttcgctggtcgccatgaaccgtcagacccaacggtcaaggcgctgaccgcccagtga

SEQ ID NO: 529108 - DNA, 564 bp, Stenotrophomonas maltophilia
atggaccgacatatcttcgaggtgctgaacatagtcaacgaggttaaggcgggcgcattctccgagatgagggagcggcgagtgttctcttcctcctgcctgttgttcgtcatgatcgatgtttgcgcatcgctggcgatgcccacagatctcagtaactcaaggaggttcgtccagtttcttgacgactactatggagagtatccaggcatctcaaatagcgacctttggtgggcgcggagctcgatgctgcactcgttggcgcacattggccatgggcatgagcgcggaagggcggttccaatctacttctattgttttcccgacaaagcagaggatctaaaggcgcaactaagagctgaaggtctggtgagttttaacgtgatggacatcgcacagctaaaaatgatcgcggtgaggtgttacaacgagttcactgatcgcttggaagccgacccggatctttccgcaaaggtggccgtcgtcgcgaagaacctcgggaaggatctgctagttcgacgcttcttagccgcatttccgaagtcatcgagcagagatacttga

SEQ ID NO: 529109 - DNA, 216 bp, Stenotrophomonas maltophilia
atgaccggcgccgagatccgcatgcagaagcggtaccggtcctatctgcagaagcacggcctctgctcggtctgccagttccgcgccaccggcgccactggcttccattgcaagggttggcccggccgggccggtacctgtgacgccgacggcaatctgccgacgttccgattcgatgacgccgtactggagggcatgcgcgatgcgcaacactga

SEQ ID NO: 529110 - DNA, 543 bp, Stenotrophomonas maltophilia
atggcgaccagccgcctgattatcagtatcgaccccggcctgaccggggccattgcggtgctgatcgacagtacgcccggcccggtgatcgacatgccgctgctgaccgtaggcgagaaccaagaggtcgacgcccggtcaatcgctgttttcatccgcgctgccaaggacatgaacccgggcgccgccgtgtccggagtgatcgaacgcgtccgggcgatgccaccgaagcgcggtgccgacggcagagaagaacgccgggcgggccctcagtcgtccttcaacttcggcgaccactacggcaaggccaaggcggcattcgagctgctgggcattccctacctgcgcgcggagccggctagctggaagcgccgcttcggcctgataggccaggataaggacgcggctcggctgcttgccatccagcgcttcccggctgccgcgttcaagctgcagcggaagaaggacaacggccgcgccgatgcgctcctgatcgccctgtgggccgagcaccagctggccatgggccaggccgccgcatga

SEQ ID NO: 529111 - DNA, 639 bp, Stenotrophomonas maltophilia
atgaccgcgacgactgcagcagcgcgcaagatccgcgcgaagcgggccggccggcccatctacgccacgtgcatgcgcgtgattgatccagaggcgggaaccggcgaggagctgggtgcgttcgttcccagcaacgacatcgatcggcgcctggccaaggaccgcggctaccgcgtcggccatgagtaccggctggagatcaaggcctcgcgcaatgccgccttccacaggctggcccatgtcatcgggcacctgctggtcgacaacgtcgaggcgttccgtgacctggacgcgcacgccgcgctgaagcaggtgcagctggagtcgggcatctgctgcgagatggtggagatggacgcgagcccggtggtgaaggcgcttctggatgccgcagagacggtgctgggcgcgggcgcgcgcaaggtgctgtcgggcgtgctaccggacatccggaccatcccggtgaagatggcccagtccttggccttcgattcaatggaagaggaggacttcgccgccttcttcaagggcatcaccgtctggatcggtgaccactacgcgcacgtaatgctggacgacgtgcgcgcggattactggcggatggttaatggccgtccggaagggaagcgcgtcgcgtga

SEQ ID NO: 529112 - DNA, 1725 bp, Stenotrophomonas maltophilia
atgcgcaccgtgaacctgatccagggcagcccggaatggcacgcccaccgcgcgcagcacctcaatgccagcgacgcgccggcgatgcttggggcctccacgaaccactcccacacagatctgatccgcgaactggccgcaggcgtaccgcgcgagttcagcgccttcgtgcaggagcgcgtcatcgatccgggccatgagtttgaggcgcaagcccgtgccattgccgagcagctggtcggcgaggatctctacccggtcactggcgttgccgggaagtactcggccagctttgacggtctgacgctgctggaggacatcgcctgggagcacaagcgcctgaaccagacgctgcgcgatgccatgttcgatggttgcaccggtaccgacctgccgctgatgtaccagatccagatggagcaccaggcgatggtctcccaatgcgagcgcgtgttcttcatggcttccgagtggcgccagacctccggcggctgggaactggtcgaagagcggcactgctggtacgtgcccaacccggaactgcgcgcgcgcatcgtcgctggctgggcccagctggaggccgacgttgcagcatttgagccgggtccggctagcgagcctgtgcctatgggccgggcgccggagaccctgcccgcgctgagtatccaggtcacgggcatggtcaccgcctccaatctggccgagttcaaggacaacgcgctggcggtgctgggcgcgatcaaccgggagttgcagtccgatgaggacttcgccaacgcagagaagacggtcacctggtgcaagggcgtcgaggaacggatcgaggcgacgaagcagcaggtacttggccagaccgcagacatcgatgcggtgttccgcacgatggacgacgtcgccgccgagacgcgcaagatccggctcgagctggacaagctggtggcgaagcggaaggaggaacgccgcaccgagatcggcaacactgcccggcgcgcggtgatcgaccacatccacgggatcaacgaaacgctgggcgcgcacgccgtcccgatgccgacgacgctggtggccgacatcgctgccgccatcaagggcaagcgctcgttctcgagcatgcaggatgccgtcgatgcggtggccaccaacgccaagatcaccgccagccaagcggccgaccgcatccgcgccaacgtcgccatcttcgccgagcacccggactacgccaccctgttcgccgaccgcgtgcagctgtgtgccagcaaagcgccggaggatctgcgcaacctggtggccgctcggatctatgaacaccagcaggcggagctggcccgcgcacagaaggccttggccgatgcagcagctggagcacccgcggcaacgcagaccgcagtggcgaaagctcagctcgatcctgccgcagaagctgcacgccatgtggagagaaacggacccgactcgcacgcgactaccttccctggccaccctgcattccacggaatcgacacggccagtaagcgcgaagtggtcaagatcaaactgggccagctggtggatctgatcgcaccgttgaagatcgacgccgagggtctgcgccagctgggcttcgagccggtgtccaccgaacgcggttcgcagctgtacgacgccagccagatcgatgccatgcgcggcgcgatgatccggagcctgcagcgtccactgtcgggcatcaatgcgcaggcagcctga

SEQ ID NO: 529113 - DNA, 216 bp, Stenotrophomonas maltophilia
atggacgtcgccctgtacccctgccacgccaagagcctgcgccgtgccggccaggcccgcgcccagctgttcgcccatgtgatcgagggcaagcggtacaccaccgcgcgggtcgccgagctcttggacatatcccacagcgccgcatacgagcggatcaagcggcgccctcacccgctcacctgggcgaacctgcagaaggtacgcatgccatga

SEQ ID NO: 529114 - DNA, 726 bp, Stenotrophomonas maltophilia
atgacacaggggttctggcgcttgctggcgggcacgttgtcctgcgatccccgtcagccttactgcgtagtggactgggacgtggtctcggcgattgccactgccgcagctgtagtcgtggccatgactgccatctgggtggagaacaggcaccgcaaccgtgaattgaccagatctgatcagattcggaagtccgacctcgacgccgcacatcagcgggaagtagcggaagcagaccggctgaccgaagctcggaagtcgcgagccagacggcttgccaagatatttgaccgcgagctctcggaagcggctaggcacatcattccgttgatgaaactggtcaggcagctgaaacctgagggcgtggaggagtttcgaaggatctacgcgaagccactgaaccctggcgtgttcaagatgcacgagcggtttctggaccagctggacgtattccccgacatgcttgcaattgccatcgtcaacaacatgaccaattggacgagcatcactcttttctcggaaggcctcgctgaatcgcccggtgtggctctgattccgttgcgcgacaagatccttgcggagctcaatgaggtactcaacgtgataggcgaaacaaaggttcagttgagcaagtactttaaggaccttcctggactccaagccctgacgtttgaggaaattcgggaaatgaacgcggccaaggccgcgaggcagaagcgcgaatag

SEQ ID NO: 529115 - DNA, 267 bp, Stenotrophomonas maltophilia
atgacacaccaacgctacgaccgccggctgccgaagcgcaccgagggcttcgcctggggccggtccatcaacaaggtgctgggcggccccttcctcaactggcgcctataccgacgcgaccatcgccgtgcgccgcacatgcaagtgctgacgttcttcgcgcacgacgatcgcgctgtgatcgccggccacctgcgccgcgcgcgtcgctacctgcgcgacaagttggaagacatcgacctagtagtgatgggagtagccgcatga

SEQ ID NO: 529116 - DNA, 654 bp, Stenotrophomonas maltophilia
atgacgacgcaaacgctgtcatcaatcagggtaccgcggtcgctgatccatccagatcctattctctacggcttttcctcccagcgaacgcatgaccagatcttcctggtcaagaattccgcgcgcgttctggtaaatgtctcgcgttatgaggtcaccaatttcgattcgggtatgcatttcatgcttctcgaatccactgacatcttcgctcaggccacgggcctgcgccatgaccttcgcaaccttcgtcgacgtcttcggaggaaggtcgaggaggtagccttcgatatcgcggcacgcctgctccagcttgttcccagaacgctgagtgaattcaacgttgcgctcgtcccatgcgcccatgatcacgcctgggttaactccaagcgcattcacttcgtcaaaaattcgggccgccaaaactcgacatatgtcgattgcaacagcgcgtttacgcgcgccaatcgactcgctttgcctatacgcgacgagcgcgagaaccagcgccaccactgctgcaaacacagttcctacagcactccacgcgtcccagttaacgacacacttttcgctgagccaccagcactggcttaccccgtcaagcgtcgacataccgcccccctatccgtgttcgagcgcattctgccatga

SEQ ID NO: 529117 - DNA, 129 bp, Stenotrophomonas maltophilia
atgacctacatccatccgaacgaccgggtctacaccgtgaagcgcgctctggctgctgccgtcgctcagaccgagggatgcaaatccgacatggccctgatcgacagccaggcggtgggcaatggctga

SEQ ID NO: 529118 - DNA, 891 bp, Stenotrophomonas maltophilia
atggctgaactattccggccatcgccaatggggcctctatcccttaccgggcaccaccgcaccgtaatttttgatcatggcgttgtcgatgcccgagtcggcaaccgcctccttgtatccggcctgtatcaccgtcagatcttcaatcatcgcgtcaagcacgatgcagatagcagcgcgatggagaatcaggttctcttcattcaccggcgaaatcccggcttcgtactctctattcaaggaccgaatcatgcctgcggatcgagccagcgccggcccttccgttgcgtgcaagtaatggagtcggtcgacgagaagatcgacagttggaaattcaatttttgcaagatcgccaatcacctcggatcgaaaaatgtattcccgcacgaatctctgcgatccagatatatcggtcaattttacttggagactggcgatctttttaatgttcctactgacctcgtcattgagctggaagaacagcagcatcctctctttccgatccctttcgcgctgccgatcggcttcactcctggcaatagataccgccaagttacttgcgcgatttgcttcatcgcccaagcgccaaacgaagtacgcagataccgctgcaactccaacaccgacccacgccacagcaaaagctgcccatgctccggcagccgcccaggcatcccaccacaccacacagtcgccctgaccgggattcatacaagggctgattccgctccagagcgttgtcacaaggctccaatccagaaagtagagatagcagagaagaaagagaagaaagggaagaaagagaggaatcaaattcatatcgcaccgtcgctgaagatcgctgggcattctgccatgtggttcgagcgcaatgaggccgcccatggctga

SEQ ID NO: 529119 - DNA, 729 bp, Stenotrophomonas maltophilia
atggctgaccagctgcccgccagtcgattcgtggagtcactgtttacgttttccgcgtctgaagaaaacgtacgtccagaccttcatccactccgtctgtcgaagccgtctatcaataagccggcttgcttcgctgagaagctgagaggcaagcctcgtgttccctctgagcaatttcagggctctcgccaactcttcgtcgtcgtaatttccatgaagcccgtcgtcaatccagcgccacttaccacgcaactcgttcaacaggaacgaagcctgtgcgattgcgccgccaatatcaccaagctcgtggatctctttccgaagttcggtcacctctgggggcgccaccaacaccgaccgactagtggtttccggatctgccatgtccaagatccgagcaaaatcatccgcctcaactcttttgcggaatctggctatctccttggcccactgatcaattggaaggtgcaaagcaacggcgatccacatggatcgcccctcggcctctttgcgacgacgaccgtgctcgatacctgccaagccaagggcaacagcaactgccagaacggtaccgatcgccgcccaagcgtcccaccacaccacgcacccagcttctccgggcggccaacacgtgcttacagcattccaccagctcattccctggtccccctgtggactggcaagcattctgccatgcccgtgtggccgggggatctcgctcatggctga

SEQ ID NO: 529120 - DNA, 1164 bp, Stenotrophomonas maltophilia
atggacgaaaaaattgatttccatggccacggacttcaggcgctcggcagtgtcgatttttctgacgatgcgttggcattcactattactgcgggtgtgaataacgagttttcgttcactgtcctgtatccatttaattcgcatgggccgggtgcagacgaggcgcacgtgcgaattctctatcatgctgatcatgctgagagtaacgtaaagccgattattttcgacggaaagaccgttggctggctttgtaccgtgggtgcgctttgctcgaaggatcacgattattatgagaacaagcacttcaggcgggcggcatacgcggcaactcatgcgcttcttctgcgtggagattacacgaaaaggattccagtaattaataatcaggagtttagagtttctgatttattcgaagaggagcagtcgctaataattctacactgccctagtgtgggagatcggctaggtccaaggtttcgtatggcactcccctgtcttcaccggtacgggtttgtaccagctgagggtggggctggggacgtctcgtttaggaccgccccggtggacttatttggggcggttgggaaaaattttaaactggaaattccctcggtggatctcggtttcgacgatttcatcgagcaggtattcagtcggctcctgccttcagcagatacgcctttgcttggatttttcctatattatcaactcatcgaaatgatgatggctaaggtttttgctcataggcagtcatgtactattgaggagatgcagtccgtcaagggcgatcccttcaggattaggcctctttttgatcgtctgaaggaggatatggccgaaaagaagcgaataaaacttctgtttggtgattacaccggggtctccagagatgctgtggaacttatgcagttctgcaacggctttttgcgagtttgtggtgttggcgaagagtgctcgcctgaagctgctttatatcaggttagaaatgtaatttttcatggaatgagggccgttccagcggctgcgtttgattcactcaatgagattgttggtcagcttgcgatcatcgtccctgagctgctcatcgccttttcccttccggaggctgtgaccgctgaagaagtaaaaatggaagtcttagaggcggaggtggtggagggatga

SEQ ID NO: 529121 - DNA, 1158 bp, Stenotrophomonas maltophilia
gtggagcttatatcaacgctgcatgatggtcgtatcgatgcgaaaaatgtcctggtgctggtaagcattgccgaatacttggcgatcgcgaaagagattattaagaacaacgaatttcagcgcaggcgcgtgaagtcatcgccgaccatctattcgctcctcaaggaagacattcaacgaggctgtgtaattcctccgattgtcctggctctcagtggtaatggtgctgatgaagttcaggccggcgacgaagtggaatacatactgcagcatagtcgcgacttgctgattctcgacggtttgcaaagaacttcgtcgatgatcgagcttgaagcggagctaaatgcccttggggatcgtgaggttgcccgaaaacttggagagcagaagcttcgccttgaaatctatattggcttgaacagacttggcgttctctaccgaatgctgacgctaaacactggccagacgccgatgagtttgcgtcaacaggtagaaattcttttcttggactattcgcgtgtgcccatgggtgggataacgctggttcgagagtcggatgacgacgctgttgatcaaattggcaagtactcattcaaagcgattattgatggttttagttcttatcttgagcggaatgagcttcctattgatagatacgatttgctggagagcgtaaaaagtcttcagaagctctccaaagaggacagcaatcagaatttattcaaggagtttactgagacctatcacgcgttggtggtgaagttgaacgagaccaccaatggcaaggcgtacagttcacaagagctggaaattagggggcagccatttggcttggatgccaggcgaattttctcgaaagagcaagccatggcaggatttggtgctggcgtaggtaagctccgcgatttcaacaaggtcggctctttcgatgatctgcgtgagtcaatcgataaattgattgttggggaggatgacctagatgcccttcttaagacgcttgaatcaatcaggctgagctcgaagaagataggcaactcgcaacggctatattttcactttttctttagggagatctttaatcccgaaggcgatgcttacaggaatgtaggtggtgcggttgatgcggcatataaaaagtaccagtcgcagactctctag

SEQ ID NO: 529122 - DNA, 207 bp, Stenotrophomonas maltophilia
atgatcatcctccacaacgtggagggtatgagccggacgttggctgagatgcggaaggaggggatcgaactgacgcccgagatcctggccggtctgtcgccttatcgaaccagccacatcaatcgctttggcgattaccacctggatcttgaaagggaagtggcgccgctgagctacacagccaaggtcctcgaacaggccccatag

SEQ ID NO: 529123 - DNA, 849 bp, Stenotrophomonas maltophilia
gtgcataaacttcgaagagctcttggctcacctggcggctacttggataatattgtcaaaggaaagaccggcagtcgcggaaagcgtctcaaggcgatgattcctgacattagattgcgatatgcgacgctcgagggcgcatatacaattgcggatattgctggcgttgccatacatgcatggtcagggacggagcgggaagaccttttgcactgttacgaagtttctgcggagtcactggcggaactcaagcgactgatcactgagcgccaggctgaaggcattcgcgacttctgtccgtactgtgggataggggcgccgaggcagttcgaccattatcttccaaaggaaaaattcccggaatttagtgtgcacgcacacaatctcatgccttgttgcggcacctgcaatggcaagaagtcagatttgtggatagatgccagtggggcacgtatttttctcaatttctacatcgattcgttgccaaccgctcctatgctgaagccaagtattcagtgggtcgtaaaaaatggcaagcgtgttccggcagtgacgtttgacctcgtgcggcctgcaaggtttcctgtggccaagttcggactcattgagtcacacttcgaaaagcttgcgcttttgagtcgatacaggaaccaagcacataccgagttcttgatactccgagatgcggcagttgcgagagaagctagaacttccattgcactaaagagatttctgtcaagattcttgcagagacgggaggccacgcttggtcctcacaactggagaattgccctgtatagggccatcgttgtggatgatccattcctcagagagtgcctaaagccgtaa

SEQ ID NO: 529124 - DNA, 1455 bp, Stenotrophomonas maltophilia
atgaagttctataagagcaaagctgatcgaaattaccagctaccatcagaggcgaccacgccgtgcatcgtatacttggtcgacaactgggacgactataacttcaaaactctttatcatttttgtttgttcaaaaaaaatggtgacaaagagctgctgggcgatgtcaagattttgcagcgcgacgtcaaaagcaccaaattgcccacatatttcacagggcttggggatgagttcgtcagcttggggcaggatctcgactactacaagaacgttcgcaagcacctccctaagacgcaccgtgccgtactggaggctttgaatgatgtcgttgtgagtcctcagcttcttgatgatgtcgaaacaaccagcggctttaggaactcccttattcgctttaatgacgcgcagatctgtctgcgggacggtcctgcattcctcgccaacggcgagcgacagaagggctattccttcacctacacgggggatattcctggggcgactgctggtgtacccattgatgtcgatttgcagccacaggatccggtcccaggcagaatttttgccattatcgggcgaaacggtgtaggtaagacacagtttctcgccaagttggcacgtgatcttgcaacgactcaacgggtctccaagaagactgtggatcagttagagtcggcctttgagcctaatcggccactcttctctcgggtgattgcgttgtctttcagcgcatttgaccgattccagcgtccagagcagcagaagttcttcagctacatatattgcggtgtaagggatgatagcggcggtctctcgcgtaaagcgcttgaatctcgacaccttcaatacctaaatcgcatcaaagagcacggccgggaaaatgtgtgggaaaagcacattgccaaggtgatgggcttgccagaagagatggtggacatcgagcaagccattgaacagctggagaatcccctcccaccctcaatgagttccgggcaatcaatccttgcctatttcatctctgccgcgcttgcttacctaaaagaagagtcgctaattctcttcgacgagcctgaaatccatcttcaccctaatgccgtcgcattgctgatgcagacgttgcagtcactgctgaatcagtacgatgcttacgccgtcatcgcaacccattcgccactggttatccaagaaattcccaggcggagggttgtacgatttgaacgggatggggatatcacaagtgctcacccgctggccacggagtcgtttggcgagaatatatccgagctcactcgtcaggtgttcgagaccgttgagataccaaatttctacaagaagactttttcaaagcttgccaaaacattgacctttgaggaggtgtctgcactcttcggcgatcagctgagcttgcatgctaccgcctacctagcctccctgtatgaggataacggtgcataa

SEQ ID NO: 529125 - DNA, 162 bp, Stenotrophomonas maltophilia
atgaccggcaaacgtcaagaggacatggaaagcaatagtggacttgtgtactattccattcaggaaggtccggcgattcatcaggagttcgatcatctgagcttctgcggagggtggcataatttcgccaataagtcagggagcgaggatgaagttctataa

SEQ ID NO: 529126 - DNA, 1428 bp, Stenotrophomonas maltophilia
atgtttctttcgaaactccagcagcacacaccgaccaacgaggacatctggggtgatgacccacttggccgtcgtgaatgcgctgtaacacttacacgcctcattagagccacaaccaagccctatgtcataggcatttacggaccttggggaagcggaaagacggtgtttatgcaccagcttcagctcgagctggaacaggaaaaagtgcccaccgtccgggtggatgcgtggagaactgactatctggcggatccacttgtcgccctcgtcgaagccatcaatcaaagacaggcagatgaggcggccgctcacggcggaggcttaacaaggtcccctgatgaactcttggaggcttcgctcgcgatagctctcccgctctcggagattggagttgctgccactgcggtcgccacgccgctactcgcggcgacgggtgccgcattgaagggcgcattggttgctgcaaaagaggtggtatcgcgaagggttaaggctagcaaggatctccgcattggcatcgagcatgcgcgggactatttaacggggcgagcgcgcccgggtgtcgttagcccgatcgtcaagccactggtaattgtcatcgacgaactcgataggtgcaggcccgactacgctgtgcgcatgctggagcgcgtcaagcacttttttgacgtcaacggcattgtcttcctcatagcatccgatggaaagaatctgcctgctgcagtcaactcccagtacggctccggactaaacagtgaggagtaccttcggaaattcttcgactatgagtacgtgctgcccgaacccaatgccttacagttcacaggcgtgctatttcagtcctttggctgggaccgaatcgtgcctgaaggtaacatgctgtttgatcagggcttcggttcgcgagagcagatcgcttcgtatgttcatggtatacagtcatttgatcggcgctacgactactctgaagcacttgacctcttccctaaagtagccgattggctcgatctgaagctaagggaccaggcgcaagccttcactctcatagacgtatacctccgcactcgcgagccagaagaggttgcattcccacagctctcggtcttcttggcatgtatgcgttttgggcgtgaaaagaagtatcgcgagatcatcaagaatcccacatcgcagtcgttcctcggtcagatggatttcgagcgtccggagagcagtggcctaaagcctctaagggattgggttactgccctcgcgtcatgggatcgtcctagtcagcagaaatcatcagtcatagtcaacaatgctagagagtacggaagtgttgatgagcctgaactgcttccaatccatgcgcgcttaagaaaactcagcaatatcggtctttccgatgtgatctcttccttctcaaggctcgctagggcatag

SEQ ID NO: 529127 - DNA, 846 bp, Stenotrophomonas maltophilia
atgctcgtcgagaatggctttgagctcacacgcgagcatgaagcgcccgacttcctcgcccgggatatcctcggcacgatcgcggtagaagtcactaccgtcaatccgacccaggacagtcagggcaatctgcaggcaccaccggagatctcgacagaggacgagcggcttgcctacctcaagcactacatcccaatcaagttcgccggtgcgctgaagaagaagctccgcaaggcgtactggaacctgccgcatgtcaccggcaagccattggtattcgtcattcaggacttccatgcgccggcggcgatgacattcgcgcgcggcgggttgatcaactacctatacgcatacgagcacaatgcataccacgacgtggacggaaggctcgtcgtggtggcgaccaaggtggaagagcatcgttggagcgacaggagggcggcgtcagggtttttcgatctgcctggggccgagcatgttagcgccgtgatcttcaacagcggcgcgacgctgccgaagttcaaccggataggctacgtagccggtttcggttcccggcgggtccggatgattcgccacggcaccgtctggaaccccgccccagacgcggccgaaccgatccccttcgcagtgcgcgtcgacgattcggactatgccgaatcgtggaccgaaggcctggacgtttttcacaacccacgcgcggcaattccgctcaaccctgagcattttccggcggccgtgcaccattacctgcaggcggacggcaccatcaattccgttcagtcggccgacctcgtgcagccgttggcctcctggacgcagattttcatttctgaagatatctag

SEQ ID NO: 529128 - DNA, 381 bp, Stenotrophomonas maltophilia
atgtggattctggacgaggtcgcctggttcgaatcggccgacgggcagctacttggggtgatcgtgcgtgaccgcaccgacggcgacttcctcggcatctacttggcccaggatcgcgtcgggcggttccgccagatcacccagaccgacgcctttttcgataccgccgaggctgccgcagccgcgctcgtgggcggagccccggcgttgttgacccgcctcgaggccgaacgtggccaaggcgacgaagggcccgcgtcggtagatttcttccggctcgaggtggagcgtgaacgcctgcatccgagcttcgccatactcttggataaagaaggattcagtccggcacgcgctatcgtcgaggcgatgatgcgctggtaa

SEQ ID NO: 529129 - DNA, 1410 bp, Stenotrophomonas maltophilia
atggaggccggccataagtctgcgggggttactgaaaccgagcgcatgctcgcggacttctgcgagcgctccttcctgaagttgtggacctacccgaacccgtataaggacgacggcaaggagctctgcgacgtcctggcggcttttggtgaccacatcttcgtcttcttcgatcgcgagaaggcctatggggagaacccggacaccgatcccctgattgcctgggaccgctggaagcgacgcgcgatcgatcgccagatcattaccgcccacggcgccgagcgctatctgcgcagtggccgccccatctacctcgatgccaagctgaccgtgccgttcccgttgtctgtcgacccggcggccaccgtccacaagatcgtggtggcacacggtgccaagaacgcgtgcgcgcgtagctctgagcagaacatctacggcagcttggccatcacctactgcgatccggacaagggccacgcaccgcgccctttccacgtcgacctggaccggcaggatccggtgcacctgttcgacagccacaacctcccaatcatcctgggcgagctcgatacgatcagcgacttctcacgctacctcgatgagaaagttcgagccatccgacgtttcgacgttctggcgtactgcggcgaagaagatctgctcgggcactacctattcaacttcgaccaggcgacgaatgtgcataggatcggctccgacgagccggtcaccggggtgatgatcggcgaaggcgaatggcacggcttcgtgaactccgccctgtatcagaacaccaagcgcgaagacgaggtctcctacttctgggacgagctgatccagcgcacctgccagaatctgctggacggcaccttgggcggcaacgccgacctgctccgcggccagagcgccatcgccgagatggtgaaggaaccgcggttcgtgcgacgcgccctgtcgagcaagattcgcgagaacgtcatcaactttcccaacactggcgggttgacgcgtcacgtgtccttgatgccttcgttctatccggaggtcggctacgtcttcttccagttgcgcgcgcccgaggcgatccgcgcgcagcccgactatctcgacaagcgtcgcactttgctcgagatcgcgtgcggcgcggcgcgcaacaagttcccgcacctgcacaaggtgatcggcatcggcatggacgcgccgaagttcgccgggaacaccaactccgaggacttcatcctcatgcccggcgagccatggccggacgacgtccgcgatcactaccaggcgctgaatgaggattggtgcttcttcgacacaccgcagcttcaaaagtacgaacagacagtcacccagtttgtcccaccgaaggctgctctcgtcggtgaaaagcttgggcgcaatgaatag

SEQ ID NO: 529130 - DNA, 162 bp, Stenotrophomonas maltophilia
atgaactcggtgaccatgaccgtcgacgcggagatcgacctcgacgacctgatcgggaacctgagtcctatcagcagggaatacgaggtgcgcaccatgtccccggtgccgccggcgctggccgacctgttctgggtggtgcacgggagggccatgtcatga

SEQ ID NO: 529131 - DNA, 1044 bp, Stenotrophomonas maltophilia
atggacgctgaagtgtcacccctcgccctcgtctccagcgacttcctgcgctatcagtacgaagtgctgggcatcgccgagtacatgacttcgccggaagtgacggaaatctgcatcaaccgtcccggcgagctgtacctggaaacccgtgcagggtggcagcgggtggacgtgccgggcctgaccttcgagcgggcccggcagttctgcaccgcggtggtgaacgagagcaacaccgggcagcgcatcaccgatgcagatccggtggtctctctcacgtttcccaccggtcagcgcgcccagttcgtgattccaccggcgtgtgacgcgggcaaggtgtcgatcaccatccgcctgccgtccaagcacaccaagtcactcacccagtatcacgaagatggattcttcaaccagatcctggagagcgacggcagcatcagcgaacacgatcgcgagctgctggagctgcgccattcgcgtgagtacgccgaattcttccggcgtgcggtgatgtaccgcaagaacatcgtggtatcgggtgcgacgggtagcggcaagaccaccttcatgaaagcgttggtgaatcatatcccggacagtgaacgcctggtcacgatcgaggacgcgcgcgaactgtttctgacccaaccaaacgtggtgcatctgctgtactccaagggtgggcagagcgcaagcaatgtcaccgccaagagctgcatggaagcgtgcctgcgcatgaagcccgaacgcatcatcctggccgagctgcgcggtgacgaggcgttctacttcatccgcaactgcgcatcgggccatccggggtcgatcacgagttgccatgccggcagcccggagcagacctgggaccagctggcgctgatggtcaaggcctccagcgaaggctctgggcttgagttcaacgtgatcaagcgactgctgatgatgaccatcgacatcgtcgtccacatcaaggcacatgccggttcccgctacatcaccggtatcgatttcaaccctgggcgcgcccaggggcaggagggctga

SEQ ID NO: 529132 - DNA, 987 bp, Stenotrophomonas maltophilia
ttgaggattggtatatttaataacaagggtggcgtgggtaagactacatatacctaccacgttgcgcatgtgttggccggaatggggaagaatattttgctcgtggatgcagatccgcagtgcaatctttcggcatattgtctcgccgataagtcaattgagcaggcgtggtcgcccagcggaaacagcctctttaagaatattgaacgtgttcatgaaagtattggcgatatttatgaccgccgcccttcggttgctagtgaggaatatgaggggatttggatcgtgcccggtgatcctatgcttagtgatttcgaagacgttcttgctgatacctggaatagggctaagggggggagcagcgcggacatccgcaagcagacggccattcatcgctatattaatgcagcggaggagaaaattgattcggatgtaacgtttatcgacatgggtcctaatcttgggccgctgaaccgcacgattctgacggcttgcgattatttcattgtgcctgttgcgcccgatcttttctcaattcgcggcacgcagaacctaggcaacaaactggtctcgtggcgctcggagtgggatcaggtcaagggtgcttctcaggcggttgatatagatcttccgagtggccggcctgtgtttctaggctacgtccgccagcagcacaatatgcggtcaaatgaggatgggatgacgaggggctgggcaatgtttggaaatcgccttgaggctgcaatccagcaaaacattgttgaaaagctggaaccgctgggtcaggtacagcactggtcagatgatggctgggatctaggtggaattcctaatcttcatagcttggttccgtattcccaggaggcgcggaagccaattttcgattgcactgcgcgcgatgggctgcgcggagcgcaccagtctaaagcgcgggaaacacgagagctctatgagccaatggccgaaactttggttgggctgctttag

SEQ ID NO: 529133 - DNA, 1647 bp, Stenotrophomonas maltophilia
gtgaatcagcatgccattgtcgtcattacaggaaagctaggtgctggaaagtccgggcttgcccacgcgctgcaagagacctatgggtttcgcgttcacgctccaagagctatgcaaagcgctggtcgtccagcagaaagcggcgacacagcgtcgttcgcaactgctcagcgcttagcctttgaacaagccatcctcactgagattttggagggcgtacagaagcttggagaggcggagcctgggctcgtcgttgacggcgcaccgtcttcttcggtggtcaatcaactgaggtcccgctttacgggtcgactgacgcacgtacatctgtacgcgtccagggagagacttcatgcgacgtatatggatggcgacggggccgcgccaggcgcgccgtcctacgaagaggtagatgtgctgtccgaagaagaggtggatgcactgaaggccgatgctgacgtgcgcatctcgaccactcgatcagatcacggcgacacgttggtgcgtgtcgcggcgcacctgcacctcctcacctcgccggatgtaagatgcgtcgatgtgctcgttggtggacagtacgggagcgagggtaagggaaatattgtcgcttatctcgcaaacgagtatgacgttctcgttcgagttggcggacccaatgccgggcacacagtcgccaacgcctctgggaaagcgatccaccatcagctcccatcaggagcaagtttctctaaggcctctctcgttctagggccaggctttaccatcaatgtcgagaagctgctcgctgaaattcaccagttcaggatcgagcaggagcgcatcttcatcgatcctcaggcaacaatcatcgagcaggaggatattgctgagcagggcggcggtgtggtgggggccatcgcatcgaccggtagcggcagcggtgccgccaaggctcggaggattagacatcggggctcgctgtccagccctgttaggcttgccaagcacatccccgagctagctagctttttgcgacccacggaggaggtcttggaagaggcttatcgcttccgtcgatctgtgcttttagaaggaactcagggtagtgctcttagcctttaccacggaacctacccctatgtgacgtcacgagatacgaacgttgcgggatgcttggctgaggcggggatttcaccaagtcgcgtgcgaaaaatactcatggtcgtacggacgacgcccatcagggtcgccaatcctgacggagaagagggtcatgtttctggatctttgaagaatgagactactttcgaggaagtagccaggaaagccaagcttgttgccgatgatgttgtcgcggcggagattacatcaaccacaaggcggaagcgccgggttgggtggttcgagtggcgagagtttcgtcgagcctgcaacttgaacgcaccaaccgatattgtgctcacttttgttgactacctggatcaagccaatcaacaggctaggcggtttgaccagctggctgtagatacgatcaagtttatcgaggaagtggagcgtgtcgctcaggccccggtgtcgctgatcaacacgcgcttcccccaaaaggatgccgattttgacgacttgcgatccatcattgatcgcaggaattggaccgctcgatcttga

SEQ ID NO: 529134 - DNA, 201 bp, Stenotrophomonas maltophilia
atgcgctttcaaggcctccacggcaactggccttacgatccattgaaaattggtatcaacgtcgagctgatcacccgtaagctgctgcgcgtggcgaagctccgccacaccaagatggtcagccccaggaatgaaattgttaaggtatgcgctcgtgctaattctttcgaagtcatagatcgacgtaagctctctggttag

SEQ ID NO: 529135 - DNA, 585 bp, Stenotrophomonas maltophilia
atgcagttccggctcggctctgccattctacttttcctaggctcttacctacccctagcgttgatactgttggtccaagacgtgcccaaagcgctctggggcacgcccctgtgcgccttggaaagcagctctcactgcacctaccagttgcttgagcatccttggctttccctaggcgcagtagccgccacgctgctttgtgttgtgagaacgatgcaggtgaccaagtcggtcacgccagccttcgcagtgcaggtgcacgaggtccggcctgtgcctaacgacctgatcaactacgtcttcccctatgtcgtctccttcatgggcttaagctacagcgaaccgcagaagctcgcgggatttgccgtctttctcatagcgctcttcgtcataacttataagtcaggtcagattctgatgaacccgctgctgattgtgcttggatggcagctctacgaggtcaagatgacccttggccaggcaaaggtgtcgcgtgttgccagggtattgaaacgcggtaagctgctgccagggcctcagcgggccgaaaagatacaagacgtctacttgatgggggatctatga

SEQ ID NO: 529136 - DNA, 918 bp, Stenotrophomonas maltophilia
atgacgcaggcagcatttcaggcctttaaggcctttaattttgatgaaacggaggtttatctctgggtctttaagcgaacatcgaagttcactgcacggcacgtgacggccgacccggcgcttcaaacagcacttaggaactttgctaaggccggacaggcacgcgttgttgagcaggtgccctattcgcacctagcgcagacgaacgagaatagctgcttgtcggtgagtatcggcgacacaagctttggactcgtaaaggaagttgtcgatcaacctgaaccagaaaaccatgtaaccgaggagaaggagcttctgaactcaacgggctacttggttaagttcgttaaaggtgatgaagtcctctatgcgatgcgccggtcatcgagcaactggaagacaagttacagcaagaagaacaggctaaacgtcttctttaagaatggaatgctttcggctgcggaagagcgcgagttcacgcttgaccccaactttgatatgtttgtccttggcgacaacatatgggtgacgaacaagccagggtttgaatcaatcctgcaatataagaccccttacgttgatgcatttgcgcaactccgggaattgccggagttcgtcgctatttttacggacatgtcgcctctagttgagcatgttgggagcaacactattcatttgcggcgcatggcggtcattcaagaaaggtcaatttatcaagacccagtcttcctagcatcggtgaaagcagtggcactcaagagaggccttggcattcaatttgatgatgaaggcaagattgtcccgaccgcagaaagcgctggccttatcatgcagatcctactggatcacgtcttggtgagcgaggtgacccaacatatgtattcagtcatctctgacgcggttcgcatggatggatag

SEQ ID NO: 529137 - DNA, 405 bp, Stenotrophomonas maltophilia
atgaccaagctcacactcgactctattgcgtcggcaaaagccaagctcgccgaagagctgcgtaagctggaagagcaggaggcaaagcttattgaagatgaagcatccgatgctttccttcaagtctcagatattctgagccgctacggccagcacttcaccgcaaagcagaaggccgatattgctaaccaggttggcggttcgtctaacgggcaggctcgccaaaagaaggcttctggtgaaaagaaagcagtcgcccagaaatactggctgccgcacacgcaggaaacttggtctggccgaggccgcacccctcgctcgttcgtagcgtgggaaggcacggcggcctataaagaatggaagtccaatcaccctgatgagaagttccccgcgtatccgggctga

SEQ ID NO: 529138 - DNA, 684 bp, Stenotrophomonas maltophilia
atggagttcgagaagatccggtcatcggtcaggctcgccgaatacgcggtcgtcaatcggcgaccgcttcgaacgaaggaagacgcactacgtgccctctcagaggagctcttagtcggcccgtggttgatcatgagtggcctcggcatcatctggaagcgtttgctctgggtcttcgtcctgacgtcgatcatcgtggccggtctttgccttgttgagcgggctttcaatcccgtcatgatcctcgccgcgctgacgctgggcgttatcagcgtctactttggccttcctactcgcacggtccttgctggtgtcaccgcaaagtccgttggagagcttgctggcgccatcgagggcctggtgaaagatcagggggatttggagcgcttgtcgtctggggtgcagctcgtaaaaacgcaaacgaccgagcgaatagcgcggttcaacgtcttcattggcatcgtctggggcgccttgttctggcttgccacggcacgcgtgctttccccgactgttgcccgggatgttttggagacgagtcttttcccaaccattgctgccgcaatctcgttcatcgggctgtttgtggtcgcagttggttatgcagctgctgtccgtgtcgtctatcagacgttggactttgctctgctggaagtcaaagcgacgcttggcttgcgggtttag

SEQ ID NO: 529139 - DNA, 1629 bp, Stenotrophomonas maltophilia
atggcgatctaccacgcaactatgaaatctttcagccggggaaagggggactcgtcagtcgctgcagcggcctaccgagctggctttgacgtgctagacgtcggcaccggtctcggtcataactactcccgacgtcacggcgtggccttccaccagatgctcgcgcccagaggcgctcccagttggtgcttggatgccaagaagttctggaacgccaatgaggctgccgaaacgcgcctgaatgccagggtctgccgggagatcgaagtgtctctcccccatagcctatctgctgatcagcgccaagagctcgctcttgcgctggggcaacttctagtggatcgctttcaagtcgctgtcctcgtggctgtgcataagccgagcaaacagggcgatcaacgcaaccaccacgtccacttgctgatgtctgcccgcaaagtgggcgctgatggcctaggcgagcgcgcatgtgccgagtttgatgctcgccaagggggcggaacacgtgcgctacggcagattaggaaagacatcgaacaggtgatcaatggacacttggcgatggccggacacaagagtcgggtggatcaccggtcactcagggcccaagccagggacgctgcactccaaggcgactttgagcgcgcacgaaccctcacccgcaagccaatccgtcaccttgggaaggcaagagttgctgtccagcggaagtctaagttcaccgcagagatacacggtgtcggtgggagagaggccgcgatgtccctcagtcggatcttgacggcacacatgaagctaagtgggggcatcctccacgacaccccaagcaaccacactcacgcagcagctttgcgcgaactccgaagggagcagttaggcaaggatagcgatgctggtctgcccgcacgggacgcgacgggtaaccctgtcagccaggccaagagccgattggcgggtgcctcgatgcccaagggcatccataccgcttacagcggccagacacgacacttgagtcgggttgcgcgcttagcccggtcaacaggcaaagacgcggagatgttgaacgctgaggcgaagctgatcgaagactggttggaagcgcagcgcgaagttgcccaacaggcattggaagtgttgcgccttgttcctggcatccaaatcgagcccgaattccagcaagcgcactcggccttggtttgccgtcgtgtcgacagctatgcgaacaaatcgttcttgtttgaagacaccgagtccctagcaaaggcggtaagcacctacgcgcggatggtgatcaggccctaccgggcccgcatggaggtgctgaatgcccaagcagcgctttctgagcatggagatgctccgaccagccaagctgccattcgagcgcgaagggcgctagcccgatcaaaggtccatgtgtcacctcggattgtcgccatccaaaattggcggatcaatcaggcacgccagaagatgacggacgcctgcaaaagcttggagaagaacttcgcagtgccgaaattggaggttccaagcgctgatgtgacgaggaacgaagcagatgagtcagcggcgcagcaagcagggaactgggagctgaagatcaggcgtccccgtttcgccccttga

SEQ ID NO: 529140 - DNA, 786 bp, Stenotrophomonas maltophilia
atgagcagaacgaattttagcgaacatctcagaaaatcttttcgtagcttcctgagagttcctgagtgtcgtgatggtgaactcgccgatctcaggatgaagctcgcggcgctagaaaaaaagcagaacgacgagatcgtcgatttaggcgttgatcttgcggcattgcgaaacgagcagaagaaggctcaggacgacagtagagatgaagtcaacaatgaacagaaggggggcgacgaaaatgcgcccacgccagaaaagtatttgacgtttttttcctaccttatgagcatctttctgcttactgggattgttgggtcgatagtgttctggcgcgcagggcgcattgccttctacatggcatacctgttgcctattttggcggcgatagttgctgggatgggtatatatttttctggtgacgattcgcgtttaaagggcttcccatcttttattaagaataagcctgaggcattttgctacaaggcatcgatgttccttctaatgggcggtcttgctgctttcgtaatgacggaaaacaagggcagtgcaatgcttgcggctctatttttcccgcctggacttgctagcgcgatgttcttctggggactgcgctcggaaaaatggaaaaggcctccggaaggcagcaactgcttgaatcgtgcgggttggatgtttgcttgggcgctactgatactctccactgccggtttctgctggtggtgctatgtgatctaccgtgatgggacaagcgagatcgaaaaaattttggcaggactttggtag

SEQ ID NO: 529141 - DNA, 231 bp, Stenotrophomonas maltophilia
atgggactgccggaggacgttgcaggtgttcggatcaaccgatacgagcgggctgtgcacgattgcgatacggagactgcccagaagatggcgaaagccttaggggtgtcgttagcctatctatatgcggagacggaggagcttgctgaacttattaaggaattcgcgtctctgccggtgaaggagcagagggaggtgttggctggggttaagaaaaggaacgcacgttaa

SEQ ID NO: 529142 - DNA, 312 bp, Stenotrophomonas maltophilia
atgttgaagtctcgccttgccgccattggcgcgctgatcgtctctctggctgcctgctccggtggtgggccctcccacgacgaccgtcagaacgcgttcctgcaatacgtcaaagacaacagcaacgacaaggccaaaatcagggatttcgaaagcggcaagtgcgtcaaggccgagggggcgccgagctacaactgcgcggtggcgagcaatgtgatggcaatggaccgggacttcggccacgagatggatggcgtctacgcgttcactgaggtcggtgacacctggaagatcactggccgcgtccagtag

SEQ ID NO: 529143 - DNA, 393 bp, Stenotrophomonas maltophilia
atgacagttggcaccttcctcttcctgcttgtcctgagcgcagccgtactggtcgccatcggcaccagccgagcatttcagtcccgaagccagcgggaggccttcggtcgggactttgaacgctcctactacggtgccccaggcggcttggcgatgtccgtcgagcggtccaggttgaagatccgtgctcgcaatgcagtcaagatctacccgctggcggatgtgcgctcgtgggagaagcattggcacaactcaaagcgtcaggggacgctgattgtgagtgtccgggatacggatcaccccgtgtggtccatcccgttccaaagcgagaacgagatgaatcagtggtatgaagtcttgaatcaggcgatcaacgagggtggaaagccctga

SEQ ID NO: 529144 - DNA, 894 bp, Stenotrophomonas maltophilia
atgactatcgaacacacacgcatcaaaacttacagccgagctaagggtcattccgctctcgcagcagccgcctaccggggcggttttctgctcactgatcccagatccgacgtcaagcatgactaccggggcagggctggaatcattcaggcctgctgcttggcccccactggatcacctgcatggaccaatgacccgcagcgtctgtgggcggcggcggaggcggcggagcgtcgtcgcaacagcaccgtatgtcgcgacttcaccatcgccttaccgcacgagctagacgacagacgccgctgggatctcgttctcgatgtgtcgcatgcgctgatcaagcggtatggctttgcgctacaagcgagccatcaccggccaaccaagaacgatcctcgctacttctacgctcatctgttggcaacgactaggcgcatggaggcctctgggctggcagccaagacgcgagtcctggacgggcgtatcaatggcaaaggcgagattgagtggatccgcgccatgatctccgaccgcatccattcccacttggcccgcaaccaggcggaaaccagagcagagcgcagtgaactgagccaacgaattgccgtgcgccgagatgaggggatcttcgtcaaagggctggcgagctttgagcagcttttggagcgctaccgtaaggaaggcagcctcctggcaatccctgaggagcacacagccgagcaggcgcgccgagagaaaggcgtcggagcgatcaacgcggttgcgagcggcatcgagcttgcgccgtctccgttagcaggctctctgcgtgatagagagatcagtgcaggtatggacggcgaagctcggtcaagagctccggtagggacacaagaccgtcgagatacgcattga

SEQ ID NO: 529145 - DNA, 234 bp, Stenotrophomonas maltophilia
atggcactactgcggagcgccgagactcgaggggtggtcatcgcagccgctgcgtcaaccaataagaatgtggcaatactttcgaaagccggtatcagcaagacctatggtgaccgtaaggttgacgaatatattagtgatgagaatttttggaaaacccacacgcagggagctccactgcggaaggcaagccgggaaggcgccgtattgatcctggcgcagaggagtatttga

SEQ ID NO: 529146 - DNA, 1032 bp, Stenotrophomonas maltophilia
atggccggtgtcgttcctgcccttcaaataggccagaagctaggggctggacatttcggcgttgtgtacttaggcaatgacagtatccacggtgaagtcgcggtcaaggtcctcgaacggaaggccggacaagatgacgccgagtgggatttgcataaagcaagctttctatccgaggcgcagaacctctcgaaagctaagcacccaaatgtggtccaagtattccatatagaggagcttccaggcggtcagagcattcgtttctgcatggcctattgtcctgggggttccctgcaagccctctatgagcaagggccaatgaatctgaaatcagtccgcaagattgcgacagaggttgcgataggccttggtgcgctacacacccgaggattgcttcaccgcgatatcaagcctggcaacatcttgattgatagccaaggcactgcacaaattggggatttcggcctagtcactgatcggttgatcgcaggctacggatccgtggccggatactcggaccatatcgcttatgaagtgtggggaggagcaccaacgagcgtcaagacagacttttgggcctttggcatgactcttttccgcctccttcatggcaaagactggtatgagcggagtcctgcacctagaagcgtcgttgctaacggtggctttgttaattctctgacttggcttccgcacataccaaaagcgtggcgttccgctatcagacgcatgctaaacgatgacccaaaggcacgctatcagagcgaccagcagcttctcaatgctctttctaacttgcctatcccagcatggactgtgaccgtgtcccctgcgaaggtagtttgggagatgcttgatgggacgaggaaaaagatcgtcgagtggacgacgcattcagcccgcagccacagctggtcggcgtggagtgagcctgtccgggggagtggcagaaagcgcacgctgggtggatcggggggcacgattgggaaagtcgaagtgcttcgacagttgaacggcttctttgacccttaa

SEQ ID NO: 529147 - DNA, 960 bp, Stenotrophomonas maltophilia
atgtccaaccccgcctatcagaagctggatgctaaagggctgatcgcgaaggggcaggcacttggcagaactcagcccgccaacgcaacgcttgaattgcaccgccgtctattgaccgccttcttcaatacgctgcacgaggccggagccatcccacattcgccgatgactgccttcaaagcccctcgtaaagatcttgtcgttgatccagaagagccagagcgactgctctcccaggaggaaatccagaagatctttgcacctgagacctttatcccttgggccaagaagtatccgcaccgcttgtggtgtccgctgatcgcactctacacaggagcccgcatcaatgaaattgcccagctcaaagctagtgacatcgtccaggaccaaggggtttggtgcttctcgatccaaaagacagtggatgcagatttagcgggaagcatcggcaaacgctcacggcagaagctcaaaggcaagagtgccatccgcaaagtgcccatccacagcagcctgattgaggcaggcttcctggacttcttagccgacatcgaggcctgcggacatcctcgcctcttccccaatctgtcagcgggcacctgccggcaaaccggagagcccaatggtcgttacagccaggggttcgtcaatcagttcgccaaatacatgaaagagttgggctttggcaaaggcatcggctcccatgcgttccgtcatacgctcgccactgaactggatgcaaagggcgtgcgagtcgagcacatcgcgttgatcacaggccattcgctcaacaagagagcgcccgtgctccaagagaactacgtgcacaagtcagcggccaatgtgcggaagatccaagttgaagcgctggcgcaatatcagccgtcagtgacattaccgagctacgtgcgcggacagtttaaagaacggttaagcaaagaggcaaagatgtatccgtaa

SEQ ID NO: 529148 - DNA, 363 bp, Stenotrophomonas maltophilia
atgaaggtcaaaattgtttcaattcatggtcacggggacgagagcaaagaatacgttctgctccgtgtgttggatgattgtgatatcggcaagtatcagttgagtgatacaacctatataaaggacaacactgtctccaacaaactccgtcatgtttactggttcccggataaggaggtgtcgaagggagacttggtatccttgtggacaggcatcggcaagcaggccacggttaaaaacgccaacggggaaaccgttcaccgcttcttttggggattaaagtctgcaatctggaacgacactggcgatgctgccgttcttcaacatgtagatcaatggagtcatttctcagcaaaggcatga

SEQ ID NO: 529149 - DNA, 1653 bp, Stenotrophomonas maltophilia
atgccaaagccgcttcttcttgcgcgcccatcagggctctacgcccgcttccttgttcctcttgaccttcgatcccgcttgggttgtcgcttcatcgtccgtgcgctgggtttgccctccggtgatcgcgcacgactggcggcggcgtgcatgagcgtggcactctccgatacgttcagcgcgatgcgtgcaggaagactcgtggacaagaaggaactggatgaactgctgcgtaaagtcgccttggggcagctgcgtgagctcaccttggagaacatttcgcttcccaacggagagcgaattgggcgcgcccaggttgatacgccccatgatgcggcgctgcttgccagcctcttggggttgtctgcttcatcgttaaatgaaacggagccagcggatcaagcagcgggatcaggctggcgcaacgaggtcatcaaaggccaggtgagtcagaccgtagcgcccccaaagggaggagtaacgctatctcacgcgattgaccagcatttggatgatctgcgtcgtgcaaagcgcgatccgaagaccatcatcgaaagccgccagacgcttcgcatcctgctcggactcgttggggatctgccagcggctgggctgacggttgatcatgtcagggcgctattggacggcgtgcagcactggccgaagaacgcgacgcagcgcgccgaataccgcacattgagcgtcaagcagacggtcgctcattccaaagcgaacggggagccgccgcctaaggcatggacgttgagcaagcattgggatcgaatggccgtgttcgttcgccatctgcatgctgccggagtgctggatcgcgatctgatggccgctatagttcgcccttcggcgaagaccgaggcggcgacgggtcgacctttttcgcatgcggagctcaaagcggtgttcggcgctgggtttgtgccctgggcgtcgaagtggccacaccgctggttcggtccaatgatcggtctctatagtggcgcccgcgtgactgaggtggcgcagcttcgagttgccgacatccaggcggtggaaggcatctggggctttgtcgtcacgacggaaggcgagggcaacaaagttaagaaccaaaacagccgccgctttgtgccattggcccagccgctgttggatgcgggctttatggcctatgtggaagacgtgcgaacggctggacacgagcggctcttccccaatctgccgaactccacagggcttgggctgggcaggcagctcagtcggcagttctcggcctatgtgaaagaccaaggcattgttgatcctggcatgggatttcatgcatttaggcactacctcatcacccacctggatcgggcgctggccgcaaccgggatgaagcctgagcagcgagagcctgtgattggtcgcatctcagggcactacaagccgcccgggacgacgctgcgcagggtgtatgtggacagggatggtctgccggttcccgcgttttgcgagccagagacgctccaagagcgcgttgacacgctggcgctctttacgccttccgttgtgctcccgacctattgctcctcgcaatttggcgcgcagttgaagcgggcatccgtcctcgccgcgcgggaggcgagggcagttgctgccagacgttccagcccgtaa

SEQ ID NO: 529150 - DNA, 543 bp, Stenotrophomonas maltophilia
ttgctggccagtgccggctttgccgatgcggggctccacagcagccattcgctgcgccgcggctttgctagttgggccaacgatcagggctgggacatgaaggcgttgatggagtacgtgggctggcgcgatgttcagtcggccatgcgttacctggacgggcgtgacccgttcgcccgggatcgcattgaagcgagcctgcccagcccaaccgcgccagctccggcgatggcgctgccggcgcccgaggtcaaatctgccctgcagctgctcctacgcatggtgctgaccccgtttgcccgcgccggccgcggcgcggccaaggcccggggcagaatcgaagagatctgcttggccccgttccaagcggtgcggctgaacaccgccagcagcgagtaccggttgactgttcccaccgatcccgaccgggatctggatgaaatcctggccacgttgctcgatgacatgcaccgcatggccgatacgcaccagtgtttcctggaagcgtctctcagtacagacgacggccgccactgggattga

SEQ ID NO: 529151 - DNA, 1575 bp, Stenotrophomonas maltophilia
atgagaaatggacggtctcagggggaccagatgggcaagcaatttccgctgctgcgcgtgaaccagtggctcaggacatgggatctagcagatttctctgagaagaagctgccgaggccggcagatcatttcttcatgggatccatcccgatcaaggagcttcgacgactcgccggcgtgagccgtcgccaagtggttgaaggacgtgctcctggtgattccggttatcaacgtgtgcacgaagctgagcgctcaaacaagatcgcgcgctatatgcgttggggctttccggtttcgtcgtctgccggtatcaacccagaagagcacccaaagctgatccatcctggttggctcccgactgcgattctcgtcaacgtgctggagccgagtgaaaccagaactcgtcatggcaaggtatgcgtcctctctgaggacgaggcgataaaaatcgacgagagtgcatcagggagttacgtactcacccttccagaaaaaactggtcagcgctctgactctcttgagcctcttgagataatcgatgggcagcatcggatcttcgccgtggacgagttggaggatctcgacggtgaatacgaggttcctgtcgtatttttctacaacctcaccaactcttggcaggcgtatctattctgggtgatcaacgtcgagccaaagaagatcaaccctagcctggcattcgatctctatcctgagcttcgcaatcagtcgtggctggaagagggcgagaagctggtggtgtatcgcgaacaccgggcccaagagctgactgaggcattgtggcggcatcgatcaagtgtctggaggcaaagagttgagctcctcggcaacaggattgaaggccacgtctccaacgcggcattcattcggacgctgatgtccacgtttatccgaaagtgggggccggatcacagaatcggtggcctgttcggatcgctggacgggcaaggaaaagatcgaattttaccctggacgcgggcgcaacaggccgcgttcttgatcgcagtttggggggcgctggccgacgaacttactcgttcggatgccaagtgggtcatcgcatgccgtgcagcgtataacgcaattgacctggacgctcgcaagagagctaaccccgctgagcttgatgccgcgctggcggggccccatacgctcttggccaccgatcaaggggtacgagccatctcatacatctataacgcgatggctcaagtttcgtacacatctctcggtttggaagagtgggaggtggagactatcgaagagactatgtcggacgaagccgtttcgatagctctccattctcttcagagtcaagcaaaaatcacaggattcttgagggctgttgcgaaagagcttgtaagcggaagcgttgactggcgtacatcaaaagcgccatctcttacagacgagcagcggcttatccagggtagctacagaggcagtagtggctatagcgcccttcagcaggtctgtctgcgagcgttggtgaattcccgtagttcggaggtcgcggaagctgctaagcaggttgctgcactggtggcgagttcatga

SEQ ID NO: 529152 - DNA, 1251 bp, Stenotrophomonas maltophilia
atgagtccaagacggaatagggccgccgcgcctaggcaaaggacgatgacggcagatgccgtgtgtaggagcgcgtcacatgtgcctgtagttgacgcgatctcccggctaggtccaattaccggaccaggccagatactcgatcaaagtggcgcggatcctgcagcgcagttggctggcgaacaaacttcacatcttgtcgagtcttggcagtacatgggcgctgctataagggcagtcctctgtaacgccagtgataacgccgtccattttgcctattacgcccagctccgagctgtgctgtccgtgtttgcgggaagcggcataagggtgaggctagggaagaatttctaccttgatgctcagggcaatcgccacgcgttcgtactaccaaatggtgacaggacgcatcctgttacttggtctctatgggatgagtgggtaaaaacgacatatgcgcaggagctgatgcagcgcaggatttcgcttgtggcgggcatcgcgcttggcgatattgctctggttccttctgggtccggtgcactaatgagtgcgtggggatatgacttagcctgcgggctggctgaccacactgcgcgaaaccaagctagctaccacgctaaggccacctcgcctagccccgttatgactaactcacatctttcgctcgtcgaaagaatgtggacgctgctactacagaatggcgaaggcgtcctttttgatgccacgctcgttcgctactttgttgatcgattcgttgccgacgctattgagcaatcacggggtgatgcacgccctgcggatcgcgcgtcactgctagcgcgcgtggctaatatgactgaggcaaggaccggtgttgcaagcggaactttgctccaggtcctcgatgctgaagtggacaccgggctcttcgaagttgcagctgctcgatcaacaaaagtggagaatgttgtaagcagagcacttttcctggtgagaatcgctacgctcgctcagtctgcaacgctcacggatggggctggaccagatgcgaaacgttggcttgctgcttggctgtcaagcgcgggactttacgatccccaggtccatgatggtccgtccgacattgccgtggactatgaggatgcgctggaggaatttcatgccgcagactggtctcgagcgcccgcctcgttatggggatcatcggctcgaaacactgccttgttaagtcgacccgagggattcatgggttgggcattaccgctgtga

SEQ ID NO: 529153 - DNA, 843 bp, Stenotrophomonas maltophilia
atgcctgccgaacccttgaaacccaacgcaatgaatctgccctttctaaagtggccgggcgggaagcgctggtttgtctcgaagcacctggactttttcccaaagagttttggaacatatattgaagcgttcgctggctctgcctcggtcttcttcgccctccagcccgagcgcgcaatcctctgcgataagaacgaggagctgatcgccacctatcgagcgatcaaatctcgcgtaaataaagtaaaagacgctttggagcaccacgcgaggaatcactgtagcgattattattacgaagtgcgcgcgagtaacccgagcgatattgtatcgcgcgccgcgcggcttatttatctcaaccgaacgtgcttcaacggcatctatcgagtcaacatgaatggacagttcaatgtacccaagggaacgaaggactcggtattgctcgcaaccgacaatttttccgtcgtatccgccgcgttaaggaacgcgaaactggtcactggggattttgctctcgccattgctgaggctacctcagatgatttggtgttcgctgacccgccatacacggtgaagcacaaccacaacggttttgttaaatacaacgaaacaattttctcttgggatgatcaagtaaggctagcggatacgctttacgcggcaatgatgcgtggtgcgcacattgtgggcaccaatgccaatcacccgtcagtccggagcctctacgcagaacgcggatttgaactcactactgtaagccgcttcagcgcaatttctggaagtggaaatagccgcggacagtacgaagagctcgtagtccgcagccctaactcacagcggtaa

SEQ ID NO: 529154 - DNA, 1020 bp, Stenotrophomonas maltophilia
atgctcaaccagtttgaattcaaaaaccttggacccatcgatgcaatccaaggaaaaaaccttcagaaaatcaacctgatcattggcgcaaatagctcggggaaaacattcctcctcaaagcactttacgctgcaattcgtgcacacgaggaagcaggccgaggagatgagcctagagaattctcagatgtgctcggacagaagctctactggacctaccaaaccgagaaactcggagatctcgttacgagaggagcacaaagacgttttagcggctcactcgccctgaacgacaacagtgcccttgccttcggctttggccaagatacaacgctcaaggtcgctgtccatcacaacaaccttcaaaagcgcgaggccaattcaatcttcctccccccaaaggaagttctgggcctcaacaaggttatcgtaaagtcgacaatccaagataagacctttggctttgacgcaacctactcagacctcgtaattgcactacagggcgcaatcccacgtggacgcccgatggaatcattcacaaagtccacaagcatgctagaaaagatgtttcaagggacggttgaacctacccaggatggcgaagggtggatttacagaaaaggaaacagtcgattctcgataaacataaccgcggaaggggtcaagaagatatcaatattgaccacattactgagaaacaaatacctatctccatcatcaataatttttattgatgagcctgaatccgcacttcatccaacagccatcactcaactgatggatatcatccttattctcgccaagcagggaatccaattcttcatcgcaacacactcatatttcgtaatcaaaaagctgcacctaatcgcgcgccaagagggcatgcagatcccacttctcagcccaaatgaaagcaacgaatggacacagcaatccctcgaagacggcatgccagcaacgccgattgtcgaagaatccgtgcgacttttccaggaagagctggagttacttagaaaatga

SEQ ID NO: 529155 - DNA, 984 bp, Stenotrophomonas maltophilia
atgaataaaaaaaggattttgatctgcgggggcgccggctacatcggcagtcatatgtctcattggctctacgagcgaggtcaccagctctatgtcttggacaacctgtcgacgggccaccgatctgccgttcgctggggcgaactcattgaagctgatctgctcaatcccatgtcactggaaatagcctttgaacgcgtcaaatttgacttggtcatgcatttttgtgcgcgctctctggtcggcgaatcagttatcgacccctacagttactatcagaacaatgtcacgggcactctcaatctcctgcatgtcatgcggcggcatgcggtgaacaagctgattttctcgtcgacggccgctgtatttgggaatccgttgatgcccaccatcaacgagcaacaccccaaaaatccgataaacccatatggcgcgagcaagttgatggtcgagcgcattcttgctgatgcctacaccgcctacggcatcagctctgttgctttgcgttacttcaatgctgccggcgcgctggcccaacatggtattggggaagcccatacctgcgagacgcatttgataccgaacgtgttgaaagctgcgctgggtacgggaccagcattaagcgtctatgggaatgactacgacactttggacggtacttgtgttcgtgactacgtgcatgtgcaggatcttgcattagctcacgcatgcgccatggacttcctggacgggcagcccggcgcgcatgcgttcaatctgggaaacgggcaaggctttagtgtgaagcaagtaatcgagacggctgccgaggtctcgggccgcccgatcccctacactatcgcgccccgtcgtgacggtgatccggcagttctggtggcagatagcgagcgagctcgacgtgagcttggctggagccctgcgtggactgaacttggcccgatcatcgagagtgcttggcattggcataggaaccaacccttctga

SEQ ID NO: 529156 - DNA, 1062 bp, Stenotrophomonas maltophilia
atgaaaaaggaacttagaaactcttgggttgatcacgctaaagcgttgggcataattttggttgtctatggccatgtcgctcgcggcttggtatcagcgggaatcatgcacgacagcgatctttaccgattgatcgatagcgtcatctactcgtttcacatgccgttgttctttttcctttcaggactcttctttgttgagtcacgacgtcggcgcggaatctccggaacccttgccacaaaaatagatacaatcctatatccatttattgtctggtctataatccagggcggaattgaggtcagcctttccaactacaccaatggctcactggcttggcgcgatgtgttccagatgttttggcaacccagagcacagttctggttcctctacgccctcttctttgtattcgcgcttgcattaataatttacaagtcacagtccagcagatcaatactgacagttttggcgatctcgtcggcagcttacatccttcaaggattgttggccgatcacagaattattctttacatcgccgacaattttgtcttctttgcactgggcgttgcttttacacatttctcgctagaagatcgcacaggaaatcgggacgccttggtgaaatgcgcctccgtcgtactccttgtttttattgccttggaaattgcactgcacagcactggcaaaaactacaccgacaagggatttatcagcttgtcagcggccatggctggtatatttatgattgttttcatttctatgatcaccgcatgcgcgggcattcggattctcggaacagtgggcgccatgtccatgagcatctacctgatgcacattatttcaggaagcggcgcaaggatactatttgggaaaataatgggaatccacgacccaggcactcacctagccctaggcacgctggctggattattcatcccattactcgcagcgttggcaatgaatagaattggcatggatttcctgttcgctccgccaaaattactgtcagctggtcgccgacttgaacgccttcgatccgccccgcggtcaaatccaagatga

SEQ ID NO: 529157 - DNA, 1161 bp, Stenotrophomonas maltophilia
atggcatcaattaagaaattcggccgcgtcgaaggaatttatttcgcatcgatagtgattcttgcattagttggcctattcagccccacttcctataacgtactcccggcgggccctatccttgagggcatactagcactgtgcgccgtcctgatactgcggacgccaaagagagagatgattctccctttgatgatggccaccgcgtatgtagtggtctcattcattctgatgtcagcctatcaaccttccaactatcttgatttcgcgcaggccttcaaggcgttcatctacatcattccgctatgcttcttcttcaagcgcgacattttccagagggatcaagcacttattgtgcttaagatcctcattcttgcattcgccatcaagtacgcctattcaatagcactcaacatcactcccagaatgggaacgaggcccgggctgcttattgagaacaactttgaactgatatttctattgatatatttctttgtcctgcatagagattttggccgaaaactaaccccttggttcttggcggtttccttcatcatcctgatatctggatcaagaagctcagcgctggcacttattgtggtgttttgcgggatatatctaaagaacttaaatactaaaacagtattctatgttgccggcctagcagtactaggatctttttcggcgaccatttttctatccagaggctatgcatcgggtggccttgaatccattgaccgcttcaggttcatgctggtattcatccacgaaatccgcgactggacagctctaaattacatatttggatcattcccaataaccgcgctctcgccggaatcctgccgttcattgtcattctatgacgtactatttagttactcaggaaatggatcttgctactccgtaatccttcactcctacttcttccgggtcatatttgatcacggtgcattcggccttgttcttcttttctccttcctggctgtggcattgagaaaatatggatacagcaagatggacgttggcgtggttatcggaatcctcagcgcatctgccctatctgtttcggccatgaacagtgtctttgttacgctggcaattgcacttgcaataggccttcgaaagcctaccgcgttggcacatcaaccgggaaaaatttag

SEQ ID NO: 529158 - DNA, 1077 bp, Stenotrophomonas maltophilia
gtgcagcgccgctctacggccatgagtgaggcgctcaacgcgaaagggatcccttcacgggtagtatttttgtatagaaaacgtggcgcttacgacggcttggacttctgccactctctgcttatgggaaagcccaaaggtttgctcgacgtcctgaaggtcctatggcgcctggctagagatatccgccagttcaagcctactgcagttgtgggaatggcgcattattcgtctccgatagctgccatcgccgcgttcgctttgggcgtacccaaccgcattgcaacacagacaaaccccccagcaacggttccgcttattggcaggatcctggactacgcttgtggagtggttggcctatatacctccaacatttgtgcgtctcatagtatcgaaagcgacttctccggccaccccaaatgctacagacgaactctcacgactgttgtcaacggtgtcggcgatctaccaccgccctccactgaactcaatcgaaaatcattgagggcgaagctcggactggatgagcgcagcatagtcatagttaattgtggaaggctctcttctcagaagaaccaagcactgctggtcgactgcatcaagcatatcgacgcccatttggtaattattggcgaaggtgaacttcgctccgatattgaggcgaggatcatcaggctgggcgtcagagacaaggtgacactcgtcggcgaggtggcaccatccgaaatcaattcatatctttccgttggcgacatctttgcatttccgtccaacttcgaagccttcggattggcagccgttgaagcgatgcggtccggcctgccaattgtcagctccaatcatccggcgctggccgaggtggtcggtgattcaggggttctcatcgatcctagagacgagaccagatggatcagcgaactcaatagcctagctgtagacaattcgcgccgctcggaactagcggataagagtcgatctcgtgccaaacacttctcattcgaaagaatgcttgatggatttgtattcgagtcgaccaagaacagtcctgcgacaccgacttcaaacgaaaagctctaa

SEQ ID NO: 529159 - DNA, 1245 bp, Stenotrophomonas maltophilia
atgaagatcagtaagagcgccgctaaagcaatgattggccctgttctttttgcagggtcaaacttgctcgtatctgttcttctgcaacaggctgattcggccaccaactttggagcgtatgctttcgcccaagtcgtcgttgcagcatcactaggaatatcaaacggcttgtttggaattccaataatttcagccatcgggaagggtgacgcaaccgaggtggaagcagtgcgttcgttggcgctggccaacgtagtcttctgcctgtttgcatccatcacttcaatgctactaatgcttcatgttacgggcggatcctacggtacatccctcttggcgctcgtcttcactgctctatcaggcgctcgatggtttgtacgactacattccctagccgatctaaacagcgcttccgcatttcgcctcgacggcatcttcagcgccatcgtagtgccaggatctttgctgctattcaagagcggattactcaatacagcctgggctcttggtctcatgtcgctcgcatgcgccgcttcactgtttggcgcgagaaaatatgctcggcgttatgtctgtagtttcgttggaattggaaagccccaagacttgagcgacctcaggaaaagaggcttggctgctgtatgcatttccatgtgctttgaggcaatcgccaccggaccagcctactatctttctatcgcacaaagcaccgcagcgtatgcgcctgtcgcggtggccctactatttttcagaccgtatggggttctgcttacagccgccatgcagtatcaaaggccgagagttgcgagggcgattagagatcaagggcatggatccgtagccaagatgctggcgaagactgtcatgagcctcggggcaacatgggctctgaacgtcatcggcatcatgattattgttcttgtcattcctgagcgcatctaccgaagtggctacgaggcagcaacggtcaatgcaagtctgcttctggttggaacatccgttctggtgaaagctttcagggagccccttgcatctgtgctcctagttaccgaccagttcaaacgcctcggtctagccgcgttgattggagctgccacgtccgcctcaatcctgttttacgtgcacttaagaggcacagcgtcgcactcgtcagtcttgtccagcgtactggccggcgagctcgccgcatttgtattcatactccgcgcatacatgccccagctcgccgggaaaactcagctgtga

SEQ ID NO: 529160 - DNA, 792 bp, Stenotrophomonas maltophilia
atgtcatctaaaagcacttgggtgcctctgaggcacattcgaattggggggcagcgagtagccgtggcttctcgcaaggaactgacgagcgctttaatttctgactgcgaaatttcgcccgcggagcgaaaagccagactggtgtttgacgtaaatggacagggtctgtcgctagccagcacgagtccggagtactgcgaagccatgaaggccgcgcacgttgtgcatgcggatggcggcttcatagtgacgttgtcgcgattcctcggtgcaggccgaatttccgaacgaagtgcgaccaccgatcttatggaagatttttctcaggccgccgtagagcactctctaactgtgtatttgcttggcggcactccagatgcaaacgaaatgtgcaggtcggcactgtccaatcaatacccgggcataaaaattgtcggcaataaacatggttatttctcgaccacagaagaaacagggattgttgaggatatctcacgacttaatcctgatctcttgtgggtggggctcggcaagccaaaagaacagcaattccttgctcgacatggcgacgcattgagagcgggctgggctgtaacctgcgggggctgctttaactttgttagcggttcttactccagggcaccaaagtggatgcagaagaccaaccttgagtggagctatcgtctccttaagaatcctaggcagttcttctggcgttacgcaaaaactaatccccacgccctctatctcgcactgttcaggaccaattggcgccaagcaccgcatcaatga

SEQ ID NO: 529161 - DNA, 1167 bp, Stenotrophomonas maltophilia
atgaagatcgccgttgtcggcaccggctatgtcggcctttccaatgctgtgctgctggcacaacaccatcaggtcgtggcattggacatcgatgcagaccgggttgcgctcatcaatgcccgtaggtcgccgatcgaggatcgcgacatcgcgtcgttccttgcgcaccgttcgctggatctgactgcgacgctcgacaagcaggaagcctacgccggcgcagactatgtcgtgatcgctaccccgaccgactacgacacgcagacgcattgcttcgacattagctcggtagagtcggtcatcgccgatgtgcagagaatcaatcccgatgcggtgatggtgattaaatccaccatccccgttggctgcacgaaggcactgcgtgagcggttcgcgacagacaggatcatcttctcgccggagttcctccgcgaaggcaacgcactccacgacaaccttcatcccagccgcatcattgtcggcgagcgctccgcgcgtgccagcgcgtttgctgaactgctgaaggaaggcgcggtccgcaaggacatgcccatcctgttcaccgatgccaccgaggccgaaggcatcaagctgttcgccaatacgtacctggccatgcgcgtggcctacttcaacgaactggacacctacgctgccacacatggtctggatacccgccagatcatcgaaggtgtcagcctggacccgcggattggcacccactacaacaacccgtcattcggctacggcggctattgcctgccgaaggacaccaagcagctgctggcgaactaccgggatgtgccacagaacctgatccacgcgattgtggaagccaacagcacccgaaaggatttcattgctgaagagatcatcaggaagaacccgaaggttgtgggtatctacaggctggtcatgaagtccgggtccgacaatttccgcgcctctgccattcagggtgtgatgaagcggatcaaggcaaagggcgtagaggtgatcgtgcatgagccaacactgagggaccagagtttctacaattctcgggttgtcaatgatctagtgaagttcaagacagaagcggacgtcattatcgcaaaccgtctgtctgaggaccttgaagacgtgcccagaaaagtctatacccgcgacctctttgggagtaactga

SEQ ID NO: 529162 - DNA, 939 bp, Stenotrophomonas maltophilia
atgcaactgcatgaaatgtggcgaaaggcctacaacgagaaccggttccttaggcacttgtctgagtatgagctgcagcaacgggtgcgtgatgtagtgttgaacatgatcaccctgacgccacaggcgaagatcggattgggatctcccgaagatcctgaggcgcagcggttcatgctcaagtggacccaggttcttcaggagatgcagctccgatacggcccatttcccaacggctttacaagtgggttcatccgcgagcagccgctgcccgatcttgtcggagagttgggtcgcaaggccgccaacgtgtttgcagcattggatttggatccaagaaacagcttggtcaaatacggcaagagtgaacatatggccgccttgctcagccaaggaaatgcacggattcagcctgccagcttcttcaaggctagccacctcaacggagcggtacgtgacgacgagctgagtctagccttgtctattgtggtatctcgcgatgatctcgtagcgctcgtcaagaatccacatgatgttccgaagaattcaggcgaccaagtcatgcacgccaaccacacggcagagggtgattactggctctactgtgtgacgcaatcagttgagcctcgcttgtttgtcgacttcgaggcccaggcatgcgtgattattagaaacaagaaagctttcgccgagcgactccgccaagctgccgactctcagaccccatcggccgagcattcatgcggggacgcaatctacgtcgatccacaccagcccgagaatgcacacatcagcgtgccctttgccaagcatttccgatacacgtaccagcgtgagtatcgatttgcgtggatcccaagagtgccgactcaggcattgagcccaattgacctcactatgggggcgctcgacgacatcgcgacgttggttgagctatag

SEQ ID NO: 529163 - DNA, 759 bp, Stenotrophomonas maltophilia
atgaaccccggcgtctggctgctgccggcgccgcttgagcatcgccacaatctcgaagatccaaccgcccgcttcgacgccatggagacgcccggcgcgaccctccgtatcggtctcgcacacggttcgatccgtgacttcggctcgcagggcgaaacgaggaaccagatcgcgcccgatcgcgcacgccgatcgaacctcgattatctggcactcggtgactggcacggggcactccgcgtcgatggtcgtacttggtatgccggcacccccgaagtcgaccgctttcagcgggacgatcccggacaggcccttgtcgtcgagctgtcgaccggtgtggagccgtccgtcacgccgatccgcacgggccgcttccaatggcttttgcgggactggatggtcagtgaccgggcagcgttcgatgccgagtgcgatttgctcctcggcgcgatcgacgcgcccacaacgcttttgcgccttacgctggctggtatcaccagtctcggcgaccggattgacatgctgggtcgactcgaaaacgatcttagccatcagctgcggtatctcgacgtgcgcgcggatgatctggtgggtcggccgagcgaagaagacattgcgaacttggccgtcgagggcatgctcggggcggcggcggcgatgcttaataccaggatcgaaagtggcggcgaagatgcggcggttgcgaagcgggcccttgagcgcctcttcgtcgaatataaccgggaggagtcggcatga

SEQ ID NO: 529164 - DNA, 2622 bp, Stenotrophomonas maltophilia
atgagtttcgtcattcgtcgcatcgtggtgaagaacttccggaaattccgcgcacccgtcgtgatcgagggccttaccgacggcctcaacgtcgtcatcgagccgaatgagacgggcaagtcgacgcttctcgaggctttgcgcgcggccttcttcgtccgcttcaacacgcgcaatcagctggcccaatccttcgccccacacggcgatgcggtcagtcctgaggtcgaggtcgctttcgatgtcgatggcacgccttggtcggtgaccaagcatttcttgcgcagcgcctcggtcgaagtctcggggcctcagggccgtgcgcagggggaggaggccgaggcgcggttgaatgcgctgctcggctcggtccgcgacacgagccgaggcggcgatatcgcgacctatggcgcgctcggtttactttgggtcgcccagaccgacgccttgtccgtgaccgcgcctggccagatcgtgcgcgacagcatcacctccacgctcgaggcggaagtcggatcgatcattggcggcgctgcctatcgccgcgtcagggatcgggtcgaggctcagtatgagctctactggacaccgaccggccagaagcgtggccggcaaaccgatgcgcgtgagcggctcgaggccgccgagaccgccgcgcgcgaaaccgcggatcgattggccacgctggagcgcagcttctcagatgtcgaggctgctcgcgcccgcctgaagatcatccagcgcgagatgtcggacaacacagacgcgcagacgcgtagcggcctggtcactttgctcggtatcgcacgagcggcggcccagatcctcaccacccgtcgtgccgagcaggaagcggtgaacggcaaggtgaaggcgcttgcggaccttcagcagcgccacgacgacgcgacgcaggcccggatgaatgccaacgttgcgctgacccaggcaaccgaacagcgtctcggggtcatcgacacattgtcggcggcgaagcagagggtggtggatgcgcgctccgcactcgattccgcacgcacggaccgtcaggccgcacgaacagccctggctgaaggcgaagagcggatccgacaaagccgtcgcggtgccgcgatccaggccgcgcgtcggcggcatgccgacctcctgaagcttgaggaacaaaacagcaccgcgaaggcactttccgacagggcgatcgccccgaaagtgctgacgtcgcttgaagcgcatgatcgcgccgttgcggaagcgcaagcggtggtgaacgccggcgcaacccggattgcattgtccggctcagcggacggaattacgattgatgacgagccaatggcaatcggcgcgcacatagttgatcgcgaagttcatatccgcttcggcgccaccgagcttcagatcacgccgccggcgtctgccaccagcgccgcggaggtcttggcgtctgcgcttcgtaagcggaaaacggcgctcgacgatctcggcgtcgtcgatcttgctgccgcgagagcccgcaatgagactgccagggatgccgcagcggagctgcgaactctggaggcacgcatcgaagcggccactcccgccgatgatgtccttcagcttgccgctggatccgccgcgctcaaactgttcgtcgccgagctcggcacggaagatgccataggggagggggaacttcccgatatcgcggcgctcacgaaggcgatggatacggccgatagcgccgcagcccgtgccgaaggggcccaggatagcgccatcgaggccctgcgtcgcgccgagcaggaggaagcgccgcttgcgacggcagaagccagggcctcgagcgatgttgccaacgccgtcagcgcgcttgaggcgatcgagcggcgacctgaatggaccacgcttaccgaaaatctggccaaggcgcgcgagcaagccgctgaggcttcggtcaaggttgaagacgcgctccgcgatgcttctgcgcacgacgtggcggcaatcgagcggaagattgaattgatcgatgcaagggtgcgcacggccgtagagacccgaactcggctggagaccgatatcgcgcgccttgaagggactattgagagcgaaggcgggctcggcctcgccgatcggacagctgccgcctccgaggaagttgaggtggctcgtcttgctcttcagcgcatcaccgatgaagctcaaacgctgaaggtgctgcgaagcacgctcgatgccgcccgtaacgagacgtcggccaaatttgtcggtccggtggcggcgcgagcgaagcgtcatatcgagcgtctcctgccgggatgcgagctcaccttttcggaggatctcggtctcgaaagcgtgatccgtgcaggcatggaggaaagctgcgcgagcctgtcgcgcggtacgcaagagcagcttgccgtccttacgcgcattgcattcgccgatatgctcttggagcagggaaagcccgtatcgctgatactggacgatccgctggtctactccgacgatgcccgtctcgacaccatgatcgagattctgtcggaggcagcaacccgcatgcaggtcgtccttctcacctgccgtgatcgcgccttccgacatgtcgctggaaatcggatcgcattgtga

SEQ ID NO: 529165 - DNA, 1218 bp, Stenotrophomonas maltophilia
atggtggccgatcgcagcgcagtttcgacaattgctggctatttctatcaattcgatcgctcgatcctcagcatcctgggactatccagtgcgaatgattcggtatcgatcgaatgcatcgaggatatcgacatccacacggctacggaaacgactgccgtccagtgcaaatattacgagaaatccgaatataatcactcggttatcaagcccgccatcatgttcatgctcgcgcattataaagcgggcctcaccgccggtcggccaacgatccagtaccagctaagcggccattttgcgtccgggcaagataagttggcactcccattcgatatcagcttcctcaaaacaaattttctcacaactgcatcaaaagataagacggttaaaaaacacgaagagcttgacgtcagtgacacggagcttgaagaattcctaaaagttctctcaatcgacgtgaatgcggcgaaattcaaggatcagtttcaggcgatcatcgatagtcttgtcaaacagttcggatgctcaccgttcgtggcagaatttttctattataacaacgccctgcgggtgatcaaggaactggcgatcgagccggacgaggctctgcgcgccacgacaagggcagccttcataaagcgaatagatacatcttcttacatttttgatgagtggttcatcgccaagctcggcacggctaaatattatggcgaactacgcaacgagtttttcgcggccggcgtcaatgtctccccggccgaccgtcttttcatcatccacccggcaggcgaaacatacagccgaaacgtggtcaagacgcttctgaagactatctcccggaaatactccaagctctccaagcgagatgcaaagcccttttcgccctacgtgctgctcgtgggcatcgatgatagtgaacttgccggtctcaagcaggagctgcacaacgaagacgttcccttcgttgacggctacgatttcaagggtgccaagttcgatgccgggtcgatctcccgaccggcatccgcccacgccggtccggccctgaggctattctgcgatcttgcggaggcgaggcagacctttctatcgttccaacgctcgcgcgagatctacgagttctatcgcagtcagcaggttgaagaatttggtgatagcgctataaggcacatccggttccagattccaaattacgaagatatcgacaagatcatttag

SEQ ID NO: 529166 - DNA, 1668 bp, Stenotrophomonas maltophilia
atgagtgaggtaaaagcagaagtcgtcgctgtctttcctaacaaggtcaagatcgtcgtcgatgacctcgagaatttcaggattgctgaagaatctctacgcgtcggctcatatttgaagatcgccgacaacgagaattcggtactggtcgccatcattgagaacttccagattcaggcgcgcgacgacggcagccaggactatgtgatcgaggctttcccgctcggcattctgcgcgataagaagtttgagcgcggcggagacgccctcgcgatcccgccgaagacggtccagccggcgtcgatcgacgatattcgcttgatctatggcagctcgttacccgtgaaggatcgcttctgcttctcgaggctcgcgacgaacaaagaggttgaggttcccgtcgacgggaacaaattcttcaacaagcatatcgcggtggtaggttccacgggctccggcaagtcccacacggtcgcaaagatcgttcagaaggcggtcggggctaagggcgactatacgttgaacaactcgcacgtgatcattttcgatatccattcagaatatcgcgcggcctttccagaagcgaatttcatcgacagctccagtctggtactcccctactggatgctgagcggtgaggagttggaggagttcttcctcgacaccgaggcgaatgatcacaatcagcgcaacgtgtttaaggatgccgtgatccagagccgtaaggcgcactttaccggagcggatgacgacaagaaccggatccacctggacacaccgctcctgttcgatattcgcgatgttctggatcatgccaaccatcgcaacacggagatggtcgataccggagaggtatatgcttcgagcaataaggaaaaggcagggcagcctaagctcacgcagggcagcctttatgggcggctgaccaacttcgtgaaccgtctcgagagcaagatcaacgaccggcgcctcgacttcttcctaggcgagaaatccaagtcgatctcttttgaggaaacgctacggtccattctcggctacagcacgggcaagctgcacaatgtgaccgttatcgatttgagcggcgtcccgttcgaagttttgagcatcacagtctcgctgatctcgcgcctgattttcgagcacggctacttctacaagcgcctgcgttgcgccgtcgatccgcaggaaaagatcaacaacgatgcaccgattcttctcgtttacgaagaggcgcacaagtatgtgccgaatagtgagctgtcgaagttccgcgcctcgaagatgtcgatcgagcgcatcgccaaggagggccgtaaatatggcgttacattacttctcgcgagtcagcggccctcggagatctccgagacgattttttcgcagtgcaacaattttatcgcaatgcgtctgaccaatccggtcgaccaaggctacgttcgtaagttgctgccggactcgctggggacgctcatcgataagatgccggctttcaagcaaggggaggcgctgctggtcggagaatcgatcgcgctgccgtctgtagtccagatcgaggcatgcacggtggctccagcgtcgactgatattccctattgggatctctggcaggagcaatggaaggatctagcgatcgataagatccgcgacgagtggttgcgccgctaa

SEQ ID NO: 529167 - DNA, 291 bp, Stenotrophomonas maltophilia
atgaaagttgaagtcatgaccgatcaggtcgaaacccgttcgttcccggcccgcgagggcaaggcagcagtgcatttccgtgagcagaaagcagcgatcctgcgtccgggagatttcccgcttccgttcaagctgacgcttgacgatgaccagcagccctacaagccgggcacgtatgagttgtgcccgtcatcgctggagagcaacaagtatggcggcctcgattttggccgtcgcatccgccttctgactccttctccggctcccggcccggccgcgacgaaggcctaa

SEQ ID NO: 529168 - DNA, 615 bp, Stenotrophomonas maltophilia
atgaccgccgttcaggaaatgctcgacgccgccaaaaagggcgccggagtcccgtcggacaatgttttgagccagaagcttgggattacgagggccgtcatcagcgcatggcgaaacggcctctatccggtcccggatgagcgaattgcgcagatttgcgagatcgctaagctcgacggccccatgtggacggcacggctacatgcagagcgcgccacctctcctgcagagcggaaaatgtggcgcctcgcgttggacaggttgagcgcggtcgccgcagtgttggtgctggcagtgttcacagcacccggcgccgcccgcgctaaagccattgattcacaaggcttttccggctccgatcagccgcattctgtatattatgttaaaaacatccccgaggacgctggcgtaccgctcgcctcaatcaccggccttgctatgccaagccaagagaagccagcctccccagcgtgcccctcgcggcctggcagctacggcttcctccatcgtccgatcagagtcttgtgcatgacccaggcgatccagccgcagaccaagccgccccccgcgacaatgatctcttcctcttcaaaggcggctccattcagtccttga

SEQ ID NO: 529169 - DNA, 201 bp, Stenotrophomonas maltophilia; identical to SEQ ID NO: 516587

SEQ ID NO: 529170 - DNA, 336 bp, Stenotrophomonas maltophilia
ttgctgcaggcgctgggccttccgcccccggcgcaccgtactgcgcccgatgacgcccctggcgtcgagccggattacgctgcggacattgcctatgagctggccaggatcgaacaggccgtgcacgacgtcgatgctgcgacactacgccaccatgcgcaccgcctgcagggcacgctgcagatgtgccgggcaatggatcaggccggcatggcggccgctctgtgggagatggggcatgaggccgcgcccgactgggtccaggcgcggcggctgctgcagggattgcagcagtggcacggctcccgcagggcggaagccgcaccatcggcctga

SEQ ID NO: 529171 - DNA, 825 bp, Stenotrophomonas maltophilia
atgagcaacttcgtcaccgtcgccgacggcgcccgcatcttctacaaggattggggtaccggccagccgatcgtgttcgcccacggctggccgctgtcgtccgatgcctgggacccgcagatgctgttcatgggccagaacggcttccgcgtgatcgctcacgaccgtcgcagccacggccgctccagccagacctgggacggcaacgacatggacacctacgccgatgacctggccgcagtgatcgaagcactggacctgaaggatgcgatcctggtcggccattccaccggtggcggcgaagtggcccactacatcggccgccacggcagcaagcgcgtggccaaggtggtgctggtcggcgcggtgccgccgctgatgctgaagaccgaagccaacccggccggcaccccgttggaagtcttcgacggcatccgcaagggcaccggcggcgaccgctcgcagttcttcaaggacctgaccacgccgttcttcggcgccaaccgcgacggcaacaccgttacccagggcatgcgtgatgtgttctggctgcagggcatgctcggtggcgtcaagggtcagtacgactgcgtgcacgagttctcggaagtggactacaccgaggacctgaagaagatcgatgtgccggcgctggtcgtgcacggtgatgacgaccagatcgtgccgttcgatgcctcggccaagctgtcctcgcagatcatcaaggacgccgagttgaaggtgtaccccggtgcgccgcacggcctgaccgttacccacgccgaccagttcaacgccgacctgctggcgttcgcgcgtaagtga

SEQ ID NO: 529172 - DNA, 387 bp, Stenotrophomonas maltophilia
atgttgaatgcgtattggagtccgctgttgtgcctgctgctggccgcgggcgcgcacgctcagaccaacgtctacaaatgcgtggacgggccgcatccggtctaccagcagacgccgtgccaggggcatgcggaatggcgctgggaggtgccggcggagccggcctcaacgggtgcaaccatggccaaggcggcgagcccagcctcaagccgtccgcgtgtggtacggcaggcgcgtgcgcgggctgcactgatatcgatcagcgcggatcctgccgcctgtgagcgcgcgcggcagcaacgcgcaaaggtgctggccaatggcaagcgcatggacttcgtgcagcgccggcaactggacgatgccgtgcatgaggcgtgccgctga

SEQ ID NO: 529173 - DNA, 714 bp, Stenotrophomonas maltophilia
atgcgagaaacttcagggggcgcggtcttcgcccggcacgcgcgcggcgcggcactgctggccgtgaccatgatgctggtggcaccggcggcgatggctgcccgtggcgaccgcgaagcagccgcagagccggccgcacgtaccgcaccggtggtgcgcaacaccgttgacgagctcaagcagctgatggatgcccgccagctgaccgagctgcgcaccacctacaacggcaattacggcgccagcctgctgttcaatgccaacaccctgacctactacgtcgccctgttccaggagaagaatttctggcgggtgatcaagaccgatgccgtcgacaacgccgagcgtgtctaccgcaccttcgcgcagcagtccgagcagctggcccaggtctacatcgacaccacccgcctggaggccggcaagcgctataccgagcgcctggtggcctacaacgaggaacgcctgcgcgccctgcagcaggaaatggaacagcagcaggcacagtcggcccaggtcagcgccgcccttcagcaggcccagcagcaggcggtcagcctgagcagcgacgtgcagagcaccaacagccagttggattccctgcagcgccgcatccagatcctgcaggccgaacagggcaacccggagctgagccttcccaagccggacagcgtgccctcgccggcaccggcggctgccagcgacggtcgctga

SEQ ID NO: 529174 - DNA, 2160 bp, Stenotrophomonas maltophilia
atgaaacgcccacgccagttcagtttcagccgcccacggggcggcatgtcgatcaccatgatgctggtcatgctggcgttgctggcgatgctgggcctgatcgagatcggttacctgttctgggccaagcgcgatgcgcagaaagtcgctgatctggccgcactggctggagcgcaacggctggagctgtgcacctcggacaacagcgacaacagtgctgcgcggcagagcgcactcacccagaacaggttcgctgggagcctggaaatccgttgcggaaactggaacgtgacccgggccaccgaggggcacttcagcccggccgtcgatgctgcgaatcaacgcaacgccgttcgtgtcatcacccgccgcgcggtgcttcccttcttcgggcagaacagcagcctgccgaccgtgaccgcccaggccgtggcgcgccgtgcagagcccacggcggttttcagtgtcggctcgcaactgctccgcatcaacggcaacacgccactgggaaatgtcctgaaactggtgggtgccgacctcgacaagaccaccctgctcggctacgacggccttgcacaggcgcatatcactccgaacggactgctgcaggcactgggcattccgatcgacgtcaacatgggcgtggccgagttcaacaatctgctggcgggccgcaaggtcaagctgggcaagatccttcaggcgaccgttgacctgctcacccagcagggcgttgcccacgtggacctgagtgcgctggagaatgccctggtcgtgcagggcatcgacctcaagcagctggaggtgaaactcggctccgatgacagcggcggcggcttgttcgcacgcgtggtcgcgccggatggaacgatttccagcgcgctgcaggccgatgtcaatgtgctggaccttatagggaccagcatcagcatagccaatggcggccgcgcggtctcggtcaatgacctcaacctgttgggcttggtcaatgcgaaagccgccgtggtggagccgccgtcgatcgccatcggaggcattggctcgcgcgcctacaacgcgcagatccgcgtcttcctcgacatcgacaccaacaacatccccgttgcaggcggcgtactttcactgctgggcatccgcctgaagctgccggtccatgcagacgtgaccaatgcaatggcgaccctgaccagcctgcaatgtggcagcacgcctcccacggcgacgatcaaggtcgagtcctccgtgctgcgcgcctgcgtcggcaaggtggccgacagcgagcggttttccaagcagaatgtctgtggcgacaccctgcagaaggaacagatgctgacactgctcggcgccccgttgatcaatgacagcatcaaggtcaatacgctgaccgacacgcaaagcctcaccctccccgccggcgcgaccggttcaacccaggtcaactccctggaggtgggcaccgccgtgtccgagctggtcagcgaactgctgcgcgtactgtccggggtgctcgatccgcgcgacgatggcatgagccagggctcgaccgcagcgcagttggccgatcgctacctgaaagcagccaacgttggtcgcaagcgatacgatgtcgacgcaaccatcaagctgctggaattcggagacagtacgcagggattgaaaccactgggaaactgggacatcaccaagggggtaccgaccagctgtgtgctggtgacctgcatggtcgacggcaaggtctggcaaggattccgcaacgcagtgaccggggttggctcggggctcctcgatggcgtcctgggagcgcttgtgggtgggctgctggtcaagcagtgcaacagcctgatcggcgccctggatgacaccacctacaacaattgcatgaagtacaacctgacttcctacctgcagaccgccgatgccggcttcctggaccagttcgccggcgacggcgtcaccgcccccggcaatggcccggtcagttgttcgggcctgctgtgcttcctgctgaagcccgccctggacgtcctgaagccgctgctcaacagtgtcggctcgctgctgcgctcgctgctggcccaggtactgggcctggaactgggccgtacggatgtgcatgtccagtccatccagtgcacgcccgcacaactggtctactga

SEQ ID NO: 529175 - DNA, 459 bp, Stenotrophomonas maltophilia
atgaccgcgacgcccctgacccgacgcctgctgcccgttctgatctgcctgttaccggccactgccgtgcaggcgcagcaacagccgctgaccggtcggatgcttggcggcagcacgccggctgtgccgacgtcgcagccgctgcagtccgagtcactggccaccgtggacctgatggccccgccagcaccggtgccgcaggcggcgcccgcagcagtggccatcaccgatggcaatgctccagccgcgcgacccggccgcagccagatcggcgataccacgcgcaacctgttccgcctgcaggcatcggggcaacgggccgggcagcacctgccgatcctcggcgaccaggcgacgctgagctacgcccgctacatgaagagcttcgaacacgagatcccggacttctttgaaaccgatgtcgccaagtccaagggatcatcctcatccggacgctga

SEQ ID NO: 529176 - DNA, 897 bp, Stenotrophomonas maltophilia
atgcctgccctgcgcacttcctgcctgattgttgccctggccgccgttgccggcgccagcggctgtgcatcgaccacaccgaagtacctgcgcgcgcccagcctggccgcgcccgaaccggcgccgcaggacagccgcaatgcttacctggagctgatcgaacgcatgcagcagcaaggcgcatggtatgcctcgctcgcccacgtcgacgccttccgtcagcgctacggcgatccgccggcattgcgtctgctgcaggccgacgcgctgcgcgagacgggccaggccgatgctgcgatcgccctgtaccgcgatctttccagtggtccccaggccgccgcggccgcacatggcctgggcctgattgccgcgcgccgcgacgacgacgccggcagtgagcaggcactggcgcgggcgaccgaactgcagccattgaatacaagctatctcggcgacctcggctatgcgcggctgcgcgccgggcagttcgagcgcgcgcgcgaacccctggccaaggcgctggagctgtcgccgggcaatgccaaggccactgccaacctcgcgctgtgggcggtgctgcgtggcgacaccaccaccgccgaacgcctcgcccagcaggccaacctcaacgacgagacccggctcagcatccagcagcaggcggcgcagatccgtgcccgcctgcagcaacgccaggccgcatcggccgctgccgcagccgtgccggccactgcgcgtgctctcgccagagatgccgtcggcaacccgcccgccgccacgcgactggcggcggaaccacgccgcgacagccgcgacgaacgcgatccgcagcgcctgccgccctcgatgctggaacgcttcagcacctccgaccacccgaacgggaacagaccatga

SEQ ID NO: 529177 - DNA, 936 bp, Stenotrophomonas maltophilia
atgagcgccagcgcctggttcgccctctccctgctcgtactggctgcaggtatcgccctgctgggtatcggcggctgggtacgcagccatcgtgagcagcgtacaacggccacgttgaagaccgccctgcagccgcgcgaggcgtcccgtgaccccgaacctgcacggcacgattcgctgggctggctcgaacgcttcggccgtgccctcagcggcggccgcctggaagcggcattgctggccaatgaagaccggctgctgttggatctggccgggtggaacacccgccgcggtacggccatctacctcggcctgcgcctgctgctggccgtgctggtgctggcactggtgctgacattcagcagcgtcaccgggctggccaggatcatggtgatcatcggcgccttggccgctggcctgctgctgcccaagttcattctctcctcctgggtgaagcggcgccggcgcgcggtcgacaacgagctaccgctgctgatcgacctgctgcgcctgctgcagggcgtgggcttcagcatggaccagagcctgcagacgctcggcgacaagctgcgcgatgcattgccggtcctcggcggcgagctgcaggaggccaacgtcgcctatacccatggccgcacgcgcgcgcagtcgctgcgccggctgagcgaggtctatgcagacgatgacctgaccagcctgatgcagctgatcctgcaggtgcacgcccatggcggcgcggtgcaggagccgctgcggcagttcagcatccgcctgcgcgaacagcgtcgcaacacgctgaaggaaaaggtcggcaagctctcggtgaagatgaccgtggtgatgatgctgaccctgctgccagcgctgatgctggtccttgccggcccggcgctggtcgcgctggccactaccatgtccaagatggggtccccctga

SEQ ID NO: 529178 - DNA, 957 bp, Stenotrophomonas maltophilia
atgggaaccggcgcgctgctgggcatgttgagcatcatcgcggtgctgctggcgctggcagcctggctgtggggcacggccagcagccgtgaacaacgccaggtttcaatgcggcacgccgagcagcagctttcgcgcggaagcgccacgggcggagcacccgccgggccgtccgtcaccgctgccaacgatccggcgcggcccgccagcaccgggcgccgcgtgctgccgctggatggcctgctgcagcgcgcagggctgcagaccggctggaaaattcccatcatgctgctggtaccggggctggtactgtcggtggtggcgatgctgcggctgggcaccgcatggatgtttccgctgaccctgctgctgtacctgcttggctgctggctgtgggtgatgcggcggaccacgaagctgcgtgcgcaactgctgcatcagctgccggacttcctcgacaacctggtgcggctgacggcactgggcaacagcctgcaggccgcgttccaggttgcttcgatgcagaccagcgcgccgttgcgcgggctgctggacactacggtgcgctttgcgcgcagtggcatggagctggaccgtgcactcgcacaggcctcgcatccctatcgcatggatgtgttgaaggtgttgtcggtggtgatcggtgtcagcgtgcgcatcggcgggcgctccgaccagatcctgcagcgcatgggcgatttcatgcgcgatctggaacaggcccagcaggagcttgcggcaacgacctcggagacgcgcatgtcagcctgggtgctgggcctgctgccaccggcctgcgcggtgctgatggcgatcgccagcccggacttcttccagccggtgctgcacgatccgcttggccacaagatcctgctgcttgcactgggcatggagcttgtcggtggcttcctgctgtatcgcctggccaaatcgctatga

SEQ ID NO: 529179 - DNA, 1350 bp, Stenotrophomonas maltophilia
atggaagacaaggtaaccccgttcccgcatgccgttgcccggccggtgctgcccgaaagctcgccgggccaccagccgttcgcgcagaccgagcagtaccagaaggtgctctcggccgcgcatgagcacctgctcaacagcatcgaggacgagcgcatcgacatcgattcctgggcccccgacaccatcgcccgttgggtgcaggtgcagacggtgggcttcatccaggagtggcgcatcccgatcaacgaagaggaaatgcaggtggtggccaacggcctggtcaaggagctgaccggctttggcccgctggacgacctgctgcacgacgcgtccatcgaagacatcctgatcaacggtttcaaggatgtgcacgtgtcccagggcggccagctcaagcgggccacccagcgcttcaccgacgatacgcatctgctgcgcatcctgcgccgcatcctcgccccgcttgggcgccggctggatgactccaatccgatggtcgatgcgcgcctgcccaacggcggccgtctcaacgcgatcatctcgccactggcggtggatggaccgatggtgtccatccgcaagttccgcaaggacccgttcacccccgatgaactgctggccaagggcaccttcgatgcgccgatgcaggccttgctgaaggcgatggtgctgggccgctgcaacatcctggtatccggcggcaccagctccggcaagacctcgctgctgaacgccctggccagctacgtccccgcgaacgagcgcgtgatcaccgtcgaggacaccgccgagctctcgctcaaccacccgcatgtggtccgcctggaaagccgtatcggtggcgccgaaggccacggtgcggtcagtatccgcgatctggtccgcaacagcctgcgcatgcgccccgaccgcatcgtggtgggcgaggtgcgcggcgccgaggtcctggaaatgctgcaggcaatgaacaccggccacgacggctcgatggccaccatccacgccaactcaccgcgcgactgcctgtaccggatcgagatgctggccggctttgccggcttccagggcagcgaggacagcctgcgccggcagatcgccagtgccatcgacttcatcgtgcagatctcgcgcctgggcagcgggcgccgcgtgctggtatcgatcaccgagatcaccggtgtcagcgacaacctgatcaccacccaggaaatgttccgccacgagctgcagatcgacggcaacggcaaagagatcgatcgctgggtcgggctgggcttccatccgcactcacacaagctggagccgttccgccaacaactgcgcgaatcgctctacggagacttctga

SEQ ID NO: 529180 - DNA, 1212 bp, Stenotrophomonas maltophilia
atgaacctggtcctgtatggaatggatcgcgaactgctgccccggctggcggccaaactgccgccgaccactaccctgcactggcaggacagcagtacgccgacctccgcccaggatctgcaacgtgggccgcagagccttgtgctgctcgatttccgccccgaacatgcggccgcctccagcgtgctggcgcagcaactgcaacagacagagccggatctggcattggttgccgtcggtgccaccagcgccggccaggtggaaggcgtcgtcatcgcattgcgggcgggcctgcgtgatgtgctggatctggacagcgacaacgtcggcatcgaggccgcgctgcgccgcgccctgtcgccacgaccggctgccgccgcgcagcacgcgcacaaggcgcgcctgatcgtgctgctgggcgtgcgcgccggggtcggcaccagtacgctggccgcacatctctcggtgctggcacagcagacccgtgcgctggcacagggcgaggcactgcatcaggacggcctgctgatggagctggcccagccttcgggtgacctcgcgctatacctcaacctggacagccgcttccattacgaagacgcgctgcgcaacgccagccgcatcgatgccaccctcgcccgcacggccatggcccgtcacgattccgggctcgtgctgctggaccgcgccagcggcagcgatgcggtaccgccgtccgatccgggtgcgttgctgcagcgcctgcgcaccgtgttcgccagcgtgctgtgtgatgccggtggctgcccgctgcgtcagctgccgccgctgctgctggaccaggccgacgagatctggctggtcaccgatgcctccatcgccacactggtgtcgctcgaccaggcactgaagcatcttgccgggcagcgcgaacgcgagaagcgcctgcagctggtgatcaaccgccacgatgacagcagcggcatgagcccggagcagatcgcgcgccgattcgaggtgcccctgctggcgacgcttcccgaacgaccgcgcgtgcgcctggctgccagccagggccacctgctgctgcaggatgcaccgcgcgacccctacctgcgtgccctcgctccgctggtttcgcgcctggatccggctgcgtgcccggtccaggcgcagggcctgcgggaaagactctcccttgccctgggtggatcgcaatggaagacaaggtaa

SEQ ID NO: 529181 - DNA, 1359 bp, Stenotrophomonas maltophilia
atgaccaaacgtcgccgcagtccacgcccctccacccgccagcgctggctggccctgctgctggtgctgctggcaccggtgacgagcgtggctgccgacgacctggtactgcaggcacgtgagcagcgcccctggaccctgccgggcgacctggagcgggtcgccattgccgatccgggcgtggccgatatcgtgatgctgcgcggccagcgccaggcattgctggtcggcaaggcgcctggcaccaccacgctcctgctctggcaccgcaagcagtccgagccacagcgcctgcaggtgcgggtacaaagcgcggtgcagggtgcggccgacgccggcgcgaacgggctggtattcacccagcaggacaatcagggcctgctgcagggaagcaccgacagcgtgctctcgcacatgcaggaacagaagaccgccgccatggcgctgggcaaggaggggctgcttgccgatgcgtcgacggtcagcagcggcggcgtggtccaggtcgaggtcaaggtggtcgagttcaacaagaccgcactgaagcagatcggcatcagtttccagaaccgcaatggcaacttcgcctacggcttcgcccgcccgggcggccagttgccgggcaacaccggcatcctgcccggcatgaaggaaggcaactccggcaacgaagccgaatcgcccatttcttcggccttccgcctggtgttcggctcgaccaagggcctctggaatgccgatgtcgacctgctgcagagcaatggcatggcgcgcgtgctggccgagccgacactggtcgcgctgtccgggcagagcgccagtttcctggccggcggcgagctgccgatactggaaccgcaagggctgggcaccacgacgatcacctacaagcccttcggcatcggcctgaccgtgacaccgacggtactggccccgaaccgcatcgccctgaaagtcgcaccggaagccagcgacctggactacagcaacgccatcgcgctcaacggcgtgcagattccctcgatcaccacccgccgtgccgacaccacggtcgagctgggcgatggcgagagcttcgtgatcggtggcctggtcagttccaacgtggtgtccagcgtcggcaagatcccgctgctgggtgacctgccgatcatcggctcgttcttccgcaacttcgactacaagcgccaggacaaggaactggtgatcatcgtcacgccacgcctggtgaagccgctggcacgcaacaccgacctgccactgcccggcgaccgcgaagccaagccgcacatgcccgaatggggcgcctggctgctgggtccgatcagccaggatccggtgcccggcttctcacgctga

SEQ ID NO: 529182 - DNA, 1038 bp, Stenotrophomonas maltophilia
atgctcaagttgacccgcattgctgccgtcgccctgatcgggctggccgtgctgctggcggtgatcgccttgatgatcgggcgcaagcaggccgcgccggccacggttgccccggtcgcgcggagcgatgcccaggcgatcaccgtggtggaggcggtggcacgcctgccggccggcgaaccgatctctgccaacggattgcgtctggcacagcgcagcgccccggttgccggtgccgccaccagcatttccgccgtggtcggaaaggtaccggtgcaggacatcgccgaaggcacggcgatcagcagcaatgcactcgcgcagggattctcgctgcagctgcgccccggggaacgcgcactcgcggtcccggtggacgagctggtgggtgccggcaaccgcatccttccgggtgatttcgtcgacgtgttcctcaacctgcgcactgcccaatccagcgccagcggcccggccgatgcagcacagacgcgcctgctgttgtcacgcctgcgcgtgctcagctatggccagcaggacatcgccccggccaaccatgacgctgttgccagcactgaagccgatgcccgcaacgatccgcgcgccgctgacatcaccggaagcagcagcacccagagcacgggcagcgagactgcccagcccgcacgcagcgcggtactggcggtaccggtggccgacgccaaccggctgctgctgggtgcacagcagggcaagctgttcctggccctgcgcaaccctgccgattccggccagcccgatctggcgctgttcccgcaggcacgcggggtgatcgatccgctgcgggggcttgatgcggagcagcagcttgcgctgcaacggccagagaatcacgccttcgccggcatcgacggcgatgcgttggccgggcgcagcaacacaccggcgcgcagcgcccaggatgccccagcacgcgcacccgcaccgcggcgtagttctccgcgcgcatcgggtatcgaaatcatccgaggcgacagctccgccccccgtggttccctttga

SEQ ID NO: 529183 - DNA, 483 bp, Stenotrophomonas maltophilia
atgaacatccagaacccacgccggcaacgcggcgtggccagcatcgagttcgcactgatgctgatgctgggcctgctgccactgctgttgttcacgttctccggcgtgatgatcatggcggcccagcagaccctggcaaccgcctcggccgagggtgcgcgcgcatcgctgcgctatggcagcgccaacgaacgccgtactgcagcctgtgttgcggcgcgcagttcgatgcagtggctgctgaacttctcgggtcagccggtcgactgcagcaatggcggaagcaacgccattctggtttcggcgcaggccccctgcgccggactggccagcgcccagtgcatgaccgtgacagtcagctacgactacgcaagccaccccttcctgcccggcaccgccacgctctacaagtgggtgatgcgggctcccatccgcagcgtcgcggtcgctcagctcgacctcggcagcggcagcggcaactga

SEQ ID NO: 529184 - DNA, 546 bp, Stenotrophomonas maltophilia
atgacactgctgggattgctggccatcggtgtgtgcctgcggatcgcgatcagcgatctgtacgcccgtcgggtgcccaacgcctggctgctgtccgcatgcgcgatcaccgttgtcgtgctcatcgccggacagttcaacgcgccgcgcctgccgtgggcttcccacattgccggcgcggcgctcggcctggtcgcattgctgcctttccatgcagtgcgctggatgggcgccggcgatgtcaaattcttttcggtactgggattgatgctgggctggcaggcactgctgccgatctggatcgcggccagcctggcggcgggcgcacatgccgcactggtgctggtatcacgccggctgggtccagtactgcccatcggccttcaagcccatatgcatcgggcaagttcgcaatggcattcgcacccggcgctacgcggaatgcagagcgcccgccagggacgccaaggcattccctacgccgcctacctagcggtatccgccatcgcctggatcctcatcagcacgtacggaggtgtggcatga

SEQ ID NO: 529185 - DNA, 192 bp, Stenotrophomonas maltophilia
atgaacgcatcgatccgcaagttcctgaaggaagaagatggcgttaccgcactcgagtacggcctgctggcggctgtgattgcgggtgtcctgatcgcactgggcagcacgcagatcaaggatttcttcgaaacgctctttgagaatctcaccaagcttgccgacaaggcgtcaggcaacccaccggcctga

SEQ ID NO: 529186 - DNA, 981 bp, Stenotrophomonas maltophilia
atggtcgatggtggggtaggagacagcgacgacagcggcctgcggtcgatcgacctggcgacgctgagcggcgtgcttcgtgtatgtgatgtcgaactgctactgctcgatggcaatgggccgcgggcggccttcgcttcacgcgtgcacgaggaggcgttgttctgcagcatcagctgtggattccattgccgtggacgattcatgctgccgccggactgggcgatgctggggtatctgcacgcgaccgatgaaaccctgagctggtgccacggtgtaccgctcgtacctggaatggcgttgaccgtgatgccggagggtatcagcgagttcaccctaagcccgggcacgcacatgaccctgatgctggtgccggtggcacgggtgcagcgcaagctgaccgaactgagcctgcgcagtacaccgccggccggacaggcactttcgctgttcaacctcgccagcgaggccgccccgctggcacagcactaccagcagctgcacctgcagctgggccagggcacgggcctgcagccggaagaaaccgagcggctgctgcacgaacacgtgcaggcactgctgggcgcgggttccgccgatcgcccgggttgcagccgtgcgcggcgcacgcattatctgatcgcacagcgggcggaaaacttcatgcgcctcaacctgcgccgcaatatctacatgaatgagatctgcgatgctgccggtgtcagcgagcgtggcctgcgctacgcgttcgaggacctgttcggcacgtcgcccaatcgttacctgtcgatgctgcgcctgtgcgcggcctgccgcagcctgtcgatggctgattccagccgccgttcggtcaaggccatcgcactcagctgtggcctgtgggacctgtcgcgcttcgccgacaactaccgcaaggtcttcggtgaactgccgcgtgacacgctgatgcgcgctcccgcacagatcggtcagcccgcctga

SEQ ID NO: 529187 - DNA, 837 bp, Stenotrophomonas maltophilia
atgaaacagcatcgcatcgcccgcactggccagatggccgcagtgctgggcctggtcctgggaatgggcctgctggccgcctgtcgcagccatgcgccggccgccgagggtcctgccgaaaccaccgccgtgcagttcccggaggcttcgaaggcctcgttgaaggaaggcatctatcccgacgtcgccgacctgcgccgtttcgcgccgggcatgagcaagcgccagctgtataccttgctgggcacgccgcacttcaacgaaggcatgtggggcgtgcgcgagtggaactacctgttcaacttccgcaccgcgcagggcgcggagtatttcacctgccagttccaggtgcgcttcgacagcaagggcatcgcccaagggggctactggaagccggaatcgtgcgcggcggtgctggaaccgccgcggccgccagcgccgccagcaccggcaccgttgccggagcagccgctgcggttgtcggcggatgcgctgttcgggttcgacagcgcggtgctcagtgccgaaggtcagcaggccgtacagggcgtgctggcgcaggtgcgcgaggccagtcaggtgcagtcgatccgggtgaccgggtacaccgaccgtatcggcagtgccagctacaaccagaccctgtcgcagcgacgtgccgaggccgtgcgcagcgcgctggtgcagggtggggtgcctgcggccagcatcagcgccgaagggcggggcgcagccgagccgatcgtgcagtgcgagcagcgcaaccgtcgcgagctgatcgcctgcctggcgccgaaccggcgtgtgcagattgctggaatggcccagccgcgctga

SEQ ID NO: 529188 - DNA, 303 bp, Stenotrophomonas maltophilia
atggtgcacgcgatgaacgcccaattcctgcctctttccatgaagacggaagccacattgagtgtgtacggccagctcggcaaccatgcggtggtgcgcattcccgggcggcgcctgccgggcttgatcctgcaggcagacaccgtggccggcttccttgcccagctgcaggaagcccaggcctgcctgcgcagtggtcgcgcacagcgcaccgacgccgaactggacatgctcatcgacgtgttgcagcagtggtatgcgctgatcgaatcgcgcctggccgacgccggcgaggcactgtag

SEQ ID NO: 529189 - DNA, 828 bp, Stenotrophomonas maltophilia
atggccagcccatcccccgttgatcagaacaccctctggaacggccccggcggccagatctgggtcgcccagcaggccatcctcgatggcctgttccagccgatggccgacctgctggtcgccgagttgccagaaaccgtcacgcaactgctcgacatcggatgcggcacgggcgcaagcctgcttgccgccggtgcggcacgcccggccgcccactgcaccggcctggatatctccacaccgatgctggcaatggcgcgcgaacgggcagaaacggcggggctggacgctgacttcattcttgccgacgcgcaacggcaccctctgccttccgcgcacttcgactggatccagtcgcggttgggggtgatgttcttcgaggataccggtgcggccttcgccaacctgcaccgcgccacgcggcccggtgccggcctgcgtttcattgcctggcgcagcgctgacgagaatccattcatgaccacggccgagcgcgcggtcggcgatgcgcttgagcttccgccgcgcgtacccggtgccccgggacagttcgccttcgcagatggccaacgcgtgcagcgcctgttgcaggctgccggctggaaggatgtggaggtggttgcggtggaccttccgtgttcgatcgcacgcgatgagctgccgacctacgtcggccagctgggcccggtgggccaggcgctgcgggcgctgcccgaagcggaggccgctgggctgcgcgaccaggcgctggcagcattcacaccattcatcgacggcgatcgggtccgcgtggatgctgcctgctggttgatccgcgcacgcgcatga

SEQ ID NO: 529190 - DNA, 408 bp, Stenotrophomonas maltophilia
atgcgtgaactggatatcggcgaggtggtcaagcgcagtggcgtgccggcctcgaccctgcgctactacgaacaactggggctgctgcaggcaattgggcgccgtggcctgcgccggcagtatgacgaacaggtgctggaacggctggcgctgatcggtctcggccaggcggccgggatgtcactgcagcagatcggggcatcgctgccgccgcagcgtggatgtatctccctggatcgtgaggcgctgctggcgcaggctgatgtgctgcagaggcagatcacccagctgcagcgggtgcgccggcacctgcagcgcgcggcggcctgcccggaagcgcaggatgcgcggcagtgcggttcattccgcaagctgctgcgggcgcagcagcgcatggcgagtgggtga

SEQ ID NO: 529191 - DNA, 717 bp, Stenotrophomonas maltophilia
atgcgctttattgagaccttccaggccggtcccttcgccgacaccgtggtcagcctgctggccgctttcgtactgggcacgctgatcggcgccgaacgccagtaccggcagcgcaccgccggccttcgcaccaacgtgctggtggccgtcggcgccgctgccttcgtcgacctgggcatgcgcatcgccggcagcgccgaggcggtgcgggtgatctcctacgtggtctccggcgtcggcttcctcggcgccggcgtaatcatgaaggaaggcatgaacgtgcgcggcctgaacaccgccgccaccctgtggtgctctgcggcggtgggcagctgcaccggcgcggacatgctggccgaaggcgtgctgctgaccgtgctgatcatcgccggaaacaccctgctgcggccgctggtgaatgcgatcaaccgcattccgatcaatgagaccgccaccgaggcgacctacgaagtgcgcctgagcgtggatgccgaagccgtgccgcgcgtgcgcgagcggttggtcgatgcgctggaagcagcgcagtatccggtcggtgatgtgcagctggtcgagcacgccgacgcacccaccgacgtgatcgcggtgctggtcagcacggccgtcagtgccgatgagctggacgtggtgctggcgcggatggagcacgtgccgggcgttctgcatgccacctgggaagtcagcacccgcgattga

SEQ ID NO: 529192 - DNA, 1773 bp, Stenotrophomonas maltophilia
atgtcttcgcccgtttcgccatcgcgcctgcatctggccttccagggcctgcgcctgcgcctgcgtggcagcgacctgtggttcatcgcgctggcgctgctggttggcctgatcgccggctacctgaccctgctgcagtcgggcatcgcgcgctggctgcagggcacgttgtatgggctggacgacggtatgcgcctgagctccctgccctcgctgacctggaccgcgctactggtgctgccactgggcgggctgctggtcggcctggtcagcctggcggcgacgcgactgaaacggccactgctcgatgcggtggaagccaatgcgctgcacggcggccgcatgtcgatgcgcgacaacctgatcgtgctgacccagaccctgctgtccaacggctgcggcgcgtcggtcggccttgaggcttcgtatacgcagatgggcgcgggcagcggctcgcaactgggcagggtgatgcgcctgcgtcgcaacgacgtgcgcatcctggtcggtgccggtgccgccggtgccatcgccgctgcgtttggtgcgccgctggccggtgcgttctacgccttcgagatcgtcatcggcgcctacacccccgctgcgctggcaccggtggccgtcgcagcgctggccggcgcgttcgtggccgaccaggccggcatcgaagcctatctactgccagcggcctcgaccatcgacgtgcgcgccgccgactacgcgatctacggcctgctcggctgctgctgcgcgatggtcggcatcgccatcatgcgcctgatcgcctcgatcgaaggcacggtcaagcgcagtcccctgcccgcgtggggacgaccggtggtgggtggactgctgctgattcccctggccctggccagcccgcaggtgctgtcgtccggccacggcgcgctgcatctggacctgaccacccacctgccgctgatctggatcggcggcctgctgaccctgaagtgcctggcctcgggcatctcgctgggcttcggtttccgcggtggcctgttcttcgcctcgctgttcatgggcaccctggtcggcgcgctgttcgccgggctgctgggcatggccaccggcgttccggtggtcgacgccacgtccgccgcgctggccggcatggctgcactggccgccgccgtggtcggcgcgccgatgaccatggccatgctggtgctggaaggcacccacgacttcctgctgaccagcgtggtgatgagcgcggtgctggtgtccagcacgctggtacggcagtggttcggctattcgttctcgacctggcgcatgcacctgcgcggcgagaccatcaagagcgcccgcgacgtgggctgggtgcagaacctcaacgccggccggctgatgcgcaagggcgtggccaccactccggccgatctcgatgccgccgcgttccgccagcgcttcccgctgggctcgggcagccgggtgatcctgatcgacagcgagggccactacgccggcatcgtgcagattccgcgtgtctacggcgacggcgtgaagccggaaaccatgatcggcgaactggccgagaaccgtgacgtctcgctggcaccgtcctccgacgtggtcagcgtgatgcagcgcttcgaccagacccaggccgacgagctggcggtggtggctgccgacggccaggtattgggcgtcgtctccgaagccttcgtgcgcaagcgctacgccgaagaactggacaagcgccagcgcgagctgatgggcgagcgcgtcgacgacaccgactga

SEQ ID NO: 529193 - DNA, 2082 bp, Stenotrophomonas maltophilia
atgcccatccctgccctgcaaccggcccgcctgccgctggccgccgcccttgccctgtgcctgctcccggccaccaccgccttcgcccaggatggcgccaccacgctggacagcatccaggtctccggcagctggctgggcaccggcctgcatgacagcgtgaagcgcttcgcgggcgcgcgcaccgtggttgaccgccagcgcatcgaggccagcggcgcggccagcctcggcgatgccatgcgccgtattccgggtgtgcaggtcaccgacaactccggcaccgctggcagttcggtgtcgctgaacatcggcgtgcgcggcctcaccgggcgctactcgccgcgctcgaccgtcctgttggacggcgtgccgctggcggtggcgccgtatggccagccacagctgtcgttcgcgccgaccagcctgtccaacatcgagtcgatcgacgtggtgcgcggcggcggcgcggtgcgctacgggccgcagaacgtcggtggcatcatcaacttcagcacccgcgccattcccaccgaggccggcctgcacggcgaagccggcgtccgctacaccgcctacgaccatggcggcggtgacagcacccagtacaacgccttccttggcggtaccggcgacaacgatctgggcgccgccctgctgtactccggccaggatggtcgcggctggcgccagggcagcgatgaccgcttcaacgatctcgcgctgaagttcgcctacgccatcgacgaacagcaggagctgcgtgccaagctgtcctactacgacgtacgctcgctgacgccgggcggcctgacccgtgcgcagtacgaggccgatccgttccagaacacccggccgaccgatttctggaagggccaccgcaccggcatcgacctgggctacaccaacacgctgtcggccaacagcgagttcgaggtgctggcctattacaacgagagcacccgtgccagctcgctgatcaacgccgccaacacccagctgaccgtgcagccgcgcgactaccgcgtgctcggcatcgagccgcgctatacccagcgcctgcactggggcagcgcggtgcatgacatcaccgccggctaccgcttcctgcgcgagcgcggcaacgaccgcagctacaccgtcgcccgccgcaccggcgcggccagtgccaccacccgcttcgacaacgccaccgacgcgcacgccttctacatcgacgaccgcattgcgatcggccagtggcggatcacgcccggcgtgcgcatggaatggatcgacatggaccgccgccaggccggaggcacggcgaccttcagcagccgcaacgacaaggccctgccctcgatcaacatcgcctacctgctgactccgcagctgaccgtgttcggcaactacaccacctcgttcggaccggtacagaacatccagctcaattcgcagaccgccagcaatccgctgaacccggaagtggccaagaccaccgagctgggcgcacgctggcaggatggggcactgcgcgcggaagtgaccgtgttcaagatgcgcttcgacaaccagatcctgcaggtgccgggcatcaccccgcccaccttccagaacattggtgccaccgaccacaagggtgtggagagcgcactggagtaccacttcgccgaggacggcgcgctggccgggctggagctgtacgccaactacacctggaccaaggcgatccagcagtccggcgacaaccgtggcctggacgtgccgttctactcgcgcgacaccgacagcatcggcgcccgctacgcgctggccggctggaccttcaacgtctccagcacccaccagagcggccagttctccgacgccgccaacacctgggccgagagcgctgacgcgcgcgtgggacgcgtgccgggcgtacgcctgtggaatgcccaggtggcctggcaggtgccggggctgggtgacagcgagatcgcactgggcgtgaacaacctggccgacaagcgctggtacacccgcaatgtcgatggcaacgccggccgcatggtggccgcgccgcgcaccttctacgtacagggccgctaccgcttctga

SEQ ID NO: 529194 - DNA, 921 bp, Stenotrophomonas maltophilia
atgtcccaagccgccttctaccccgtcggaacccctggccagccgtggggagcggcggaacgggaggcgtggcgtggccgccagcagcgcctgcgtcgctatgacgaggaggtgctgccccgcatcgaggcgctggcttcgcgcttcgacaaggtggcctatggccagctcgactacgctggcgagacctacactctgttcgccctgcgcagccgcgattggaacccggcgctgccggctgccctggttaccggtggcgtgcacggttatgagaccagcggcgtgatgggcgcgctggaattcctcgaaaggcacgccgccgactacgccggcaaggccaatctgctggtggcaccgtgcgtgaatccgtggggcttcgagcgcatcaaccgctggaacttcgatgcgatcgacccgaaccgcaatttccgcgccgatggcccggcccgcgagtcgaccgcgctgatcgagctgatcgcaccgatcaaggaccagttcgtgctgcacatcgacctgcacgagactaccgacagcgacgagagtgagttccgcccggcgttggccgcgcgtgacggcaagccgttcgagccgggcctgattccggatggcttctatctggtggacgacagcgagaacccacaaccggccttccagcaggcggtgattgccgaggtggagaaggtcacccacatcgcgccggccgacgacaagggcgagatcatcggttcgccggtggtcgctcacggcgtgatcgagtacccgctggtgaagctgggcctgtgtgccggcatcaccggtgcgacctacaccaccaccaccgaggtctacccggacagcccgcgggcgaccccgcagcagtgcaacgacgcccaggtggcagcggtgtgcgcgtcgctggattacgcgctcgcccatcgttga

SEQ ID NO: 529195 - DNA, 852 bp, Stenotrophomonas maltophilia
atgccctattcccctgaatccctgcaggccttcgtggaagccgcggcgctgggctcgttctcggcggcggcgcgccgcctgcgcaagacccaatcgacggtcagcaccgccatcgcccacctggaggcagacctcggcgtcagcctgttcgaccgcagcggacgctacccgcagttgaccgaagccgggcgccaggtgctcggccatgcccaggaaattctcgccgccgatacccgcctgcagcagttgagcgtgcggctggccgccccggtcgaagcgcggctgaccgtggtgttctccgacgtctatcagctcgatccggagcagcgcgtgttgcagcgctttgccgaagcgttccccgagatcgaactggaatggctggatgccgaaggcgaagacgtgctggaactggtgggtagtggtcgcgccgcgctgggcctgctgccgcgccaggaaagctatccggatggtctggtggcacggccgttggcccatcacagcgagctgtcggtgtatgtggcgcacgaccatccgctggccgacgccggccgtcgcgcggccgcccagctggcacggcaccggcaggtgcgcctgagcgcggaggtcgaccatgcgcgggcggttaccgggctggcgtggaccgccaccgactacctgatggtgatggagatggccgaggacggcatcggctgggccgagctgccacgcgcgctggtacagcgctacgaccgcgggcagctggtggaactgactctgcccggctggccacgacgcatccacagcgacctgctgtggcgccgcgacacgccgccggggccagcggcgctgtggtgggccgacgcgttggggtga

SEQ ID NO: 529196 - DNA, 354 bp, Stenotrophomonas maltophilia
atgtcccgtactgttcccgcccgtggcgcgctggtcgcctgggcctgcctgaccgtggcgatcgttgccgaagtggtcggcacctcgttcatggcccatgccgcccgcgacggcggctggaccggctacctgatcatggccggcgcgttggcgctgtcctattacttcctggccctgtcggtccgccgcatcgccgtcggtgtcgcctatgcggtgtgggaaggcctgggcctgaccctgctgaccgtggtcggcctcaccgtgttcggcgagagcctgtcgctgcagcagctggccggtctggtgctggcggtggtaggcatcgtctgtgtcaccctcggggaggcgcactga

SEQ ID NO: 529197 - DNA, 324 bp, Stenotrophomonas maltophilia
atgaataccctggccctgtttttcgtgatctgttctgccttgatcgacgtcgccgccaacatgatggtggccaagtcggaaggcttccgccgctggcgctggggtgtcggcgcgatcgtcatggtctggatcgccttcgccctcctgggccaggcagtgcgctacatggacctggccactgcgtatgcgatgtggggtgcgatcggcgtgatcggtaccgccacctgtggtcgcctgttgttcggcaaccgcctgcgcccgatcggttggatcggcatcgcgctggtcactgttgcggtgctgctgctcagcaccgcgaagtaa

SEQ ID NO: 529198 - DNA, 2949 bp, Stenotrophomonas maltophilia
atgaaactaccctgcccttctcctcgcccgcttgccatcgcgctgtgcctggccctggccacgccgtgcctgttgccggcggccgcccacgcacaggatgcagccaatgccgttcgctggcagatcccggccggaccgctcgaccaggccttgaccacgttcggccagcagtccggcctgtccatcgccgccgatgcgcgcctgacccgcggccgccacagcagcggcgtgcaggcctcgctcaacaccgaggccgcgctggcgcagctgctggccggcaccggcctgaccttccagcgcgatgccagcggtgtggtgctgcaggccgcccccgccaccgatgccggcgtgcgccggatcggtacgctgcgggtcgccggccaggccggcgaaggtgcgtcgccgtggggtctggccgatgccgatgccgtttaccgcgacagcggctcgcgcgtgcatctggaccaccagcagctggagcggttccgcggccagtcgattggcgatgtgctggccggtgcggtcggcgtgcataccgccgacgtgcgcaacggcggcgcactggacgtcaacatccgtggcctgcagggccagaaccgggtgccggtgatcatcgacggcggccagcaggccatcgacgtgtaccgcggctatgccggcgtgcagcagcgcagctacctcgacccggatctgatcagctcggtcagcatcgaaaagggaccgagcctggccgccaacgccgccagtgcgatcggcggcgtggtctacatggagacgctgaacgtcgatgacatcctcgacgacggccaggcctggggcctgcgcgtgcgtggtggcgtggccgacaacagcatcgaccgcacccgtaccttcaagcagatcgcgcgcggcagcgacaaccgcaacagcctgcgtgacccgcgcgactggaacggcagcgtggccttcgcccagcgcggcgaggactggcagctggtggccgcttacgcgcgtcgccgccagggcaactacttcgccggcagcaatggcgcgcaccgctacgacgaccagcatctgtccagcggcggtaccggcatgtccagccaggccgtttccaagctgtaccaccccggcgacgaagtactgaacacccacaccgacaacgaatcggcgctgctgaaattcacctggacgcccaaccccgaccagcggcttgagctgagccatcgttacttcaactccagcttcggcgagatcatgccgtcggcgatcggtcgcgtgggcgagtccaacgaatgggtgacctacgtggacaaggccaacaccatgttccagttcgagcccgggaagatgcgggtcaatgccacctcgctgcgccaccgctaccggcccgaagcacatccgtggctggacctgagcagcacgctgtggttcaccacagccaccagccgcatgttcaacagcaatatcgccaacacgccgctgttcaaggaaatggcctccgaccagatgcccgacacgctgggcgagacttacggccccggcctgcagtcggacgtgaagacccggcgctggggcgtggacagcagcaacaccacccgcttcagcaacagcctgggcgactggacgctgcgctacggcgctgcgttccagcatgaggacaccgcaccgaactcgcccgtgctgccggtggactacaacaacaaccgctacctgcgctccggcacgcggcgcgaagccagcgttgtcgcctcgctgcaatggcagccgtgggactggctgtcgctgaccgcaggcggccgcttcatcgactaccgcacccgcgaccgcaatcgcgtggccttcgtcagcgaatcgcgcgacctgcgctataccttcgcgcgcctgagcaaggggggccagctgctgccgggctggtacaaggagtggtacccggatgcacagggcaactacacctacgactcgctgcgcgctacgccctacggcgacagcacgctgggccagagctacgacttcgatggcttcatccccgacccgcgcggcgccaacggtttctacaccaagcagattcccaccgcatggggctacaagccggcgatccgccgttccggccacggcttcgcgccgtacgcagaggcccgcttcagcctcgatcaggacatgttcttctacgtgaagtacgcgcagggctggaagatgcccagtctgttcgaatcgacgctgggcaacagcacctcggcaccggtggccgacctgaagccggagaagaaccgttcctgggacatcggcttcagcctgctcaagcaggacctgtggcgcgatggcgaccgcctggcgttcaaggtggcctggttcaagaacgatatcgacaacgcgatcacccgtcgcttcgactccagcaactgggcgttctatgtcgacaacgtggacaactacacggtatccggctacgagctgcagtccggctatgacgccggcatcgcctacctggacctgtcggccagctactaccagcgcgcgcgcacctgcgacgcggccaccgccaagcgcctgcgtgaagacccctatgcgaagtggagcaagctggacaccacgccggattgcgtggatggcggcttcggtacctcgtttgtcaacgcacagaatccgccgaagtactcgatccacagcacgctgggcttccgcctgttcgacaagcggctggataccggcatccgccgcacctacaacagcggccccacccacgaactggacaagccctggaataccaccggctcgaccgggttgcagaacatctacctgcccaccgcgatctacgacttctatgcgcgctggcagttcaccccgaaggccgaggtggaactggtggtcagcaacctgcgcaacacctactacatggacacgctggcgatgagcctgatgcccggcccggggcgcaccacgcggttgaacttcaccgcacgcttctga

SEQ ID NO: 529199 - DNA, 945 bp, Stenotrophomonas maltophilia
gtgagcgcggcattggccggcccggcgctggaacaggctgccgaatggtttgcgctgcgccaacagggctggagcgacggcgaccagcagcgctggcacgcctggctgcaggccgatgctggtcacgccgacgcctggcgacgggtcgaggcggtctggcaatcgttcgccccgctgtcggctccggcagctgcaaccgcatttgatgctgcgcgccttcgcaggcggcgggcgctgcgcagcatcggtggcgccctcggcatcggcgcggtctccctgctcggcctgcatgggattcaggcgcagcgccgcctgcagacgcagcgcaccgctgccgggcgtaccggtcattggacgttggccgatggcagccagttgtggctcaacgccggcagcgaagtgaccgtcgacatcggcaacggccaccgcgccctgcatctgctgcgcggcgaactgctgctgcagaccggccaccaccccgcattcgtcggcctgcccctgaccgtgcatgtacccggggcgcgcctgcagccgatcggcacccgcttcgcggtcggccgcgaagcgcaggacagccggttggacgtgttcgagggtggggtgcggtgcctgccgatgttcggtgcggcgctggatgttcctgcgggaagtgcgctgcagatcggaccgatggggggactcacaacggtcgctgccgatcctctgcgcggcgactggcaggacggacgcctgcgggtgcaggacacgccgttgatccgggtgatcgacgaactggcccgtcaccatcagggctatctgggctgtgatccggcactgtccgcattgaatgtcacagcggtattgccgcgcctggacagcctgcaggccctgaaactgctggcgcgcgccctgccgatccgcatcgagcagcgttggccgtggtggaccgttgtgcgcccgcgttga

SEQ ID NO: 529200 - DNA, 519 bp, Stenotrophomonas maltophilia
atggccgtgcccgccgcctccagcactgcgctggcggggttctaccgcgaacaccatggctggctgctcggctggctgcgccgccgtacgcacaacgccgactgcgccgccgacctgacccaggacaccttcctgcgcctgctcagccgccggatcgatccctccgagctgcgcctgccgcgcgcctatctcagcaccattgcgcacgccctgctggtcaaccactggcagcgcgcggacctggaacgcgcctatctggccgcgctggccgcgcaaccggagccggcgcacccttctgccgaggagcgcacgcaggcattgcagctgctgcacgccgtcgccgacatgctgtccggcctcgccgagcggccacggcgcgcgttcctgctggcgcggctgtccggccttggctatgcagagatcggcgtgcagctgggcgtgtccgagcgcatggtcaagaagtacatggcgcaggcgatgctgcattgcctgcgcctgtccggcgacaccacagcgtga

SEQ ID NO: 529201 - DNA, 381 bp, Stenotrophomonas maltophilia
atgttcagccacatcaccgttggaacgaacgacatggacgccgcgcatcgcttctacgatgcactgttcggtgcgttgggcgcacgtccgggtgtcttcgatgacaagggccgtctggtgtatttcaaggatggccgtatgttcatcgtcaccgcgccgatcgacggtcagccggcatgccacgccaacggcggcaccatcggcttcaccctcgacagtgctgaggccgtgcgtggctggcaggacgccggcgtggcccatggcggcaccgccatcgaagacccggccggcatccgcagcatggccgggcgccagctgttcctggcctacctgcgcgacccggatggcaacaagctgtgcgcggtgcatgtgatgtcgtaa

SEQ ID NO: 529202 - DNA, 1980 bp, Stenotrophomonas maltophilia
atggatgtactggagccgcaacaatccccggtgcgcacccttcggcctgtgttcgccttcgcggcgatcgttgtcgtggcgttcgcgctgttcgtcagcctgttcccgctgggcgcaggccgcctgctgctgaaggcgcaggactgggccgcactcaatgtgggctggtactacctgctggccatgaccctgtacctggtgttcgtggtcggcgtggcgctgtccaagtacggtggcatcaagctcggtgccgaccatgacgaaccggagttcagttacctctcctgggccggcatgctgttcgctgcaggcatcagcatcaccctgttcttcttctgcgtttccgagccgctgacccactacctgcagccgccgcagggcgatccggcggcgggcgaggccggcgcgcgccaggccatgcagctgctgttcctgcattggggcctgcacggctggggcgtgttcgcgctggcggcgatggcgatggcctacttcgcctaccgccacaacctgccgctggcgctgcgctcggcgctgtacccgctgatcggcaagcgcatcaacggccccatcggttacaccgtggacgcgctgggcatcgtcgccaccgtgttcggcatcggtgccgacatgggcttcggcgtgctgcacctcaatgccgggttggcgcacctgttcaacatcccgcattccaacctggtgcagatcatgctggtggtggcgatgatgggtgcggcggtggccgtggccgtttccggcgtggagaagggcgtgcgctggatggccaacatcaacatgctgctggcgatcgcgctggtgctgttcatgctgtttgccgggccgacgcagtatctgttcagcaccttgatgcagaacctgggcgactacctcggcagcgtggtcggcaagagtttcgatgtgtatgcctacggcggccgaccggaatggctgggcggctggacggtgttctactgggcctggtggatcggctgggcgccctttgtcgggctgttcatcgcgcgcatctcgcgcggccgcaccatccgcgaattcgtgttcggcgtgctgctgattccgctgggcttcaccctggcctggctgtcgatcttcggcaacagcgcgctggaccaggtgctgcaccacggccagcaacagttggcgcagctggcggtggatgatccaccgaccgtgctgtatgcgctgctggacggctacccctggagccgcgcggtgatcacggtgacagtgctggtcagcttcatcttcttcgtgacctcggccgactcgggggcggtggtgttgtccacgctgtcctcgcatggcggcgcacccgaggatgatggtccgcgttggctgcgggtgttctggggcacggtgatcgcggtgctgaccgcgggcctgttgctggccggcagtatcgacgcactgaaatcggcggtggtgctggcgtcgttgccgttctcggcgatcctgttgttgatgatgtgggggctgacccgcgccttcggtgacgaatcgcaccgcaagcgcgcgctgcagtaccggccgtcgccgctgatcggcgacgatcgccaccaccagggctggcgccagcgcctgagccaggcgatgcatttcccggtgcgcgaccaggtctaccgcttcatggatgacacggtgaagccggcgatggaagcggtggccgagcagctgcgcgggcagggctgggacgtggccacgcgcttcgaggcgggcgacatggagttgacggtcaaccatggcgagcagcaggacttcctgtaccgggtgatcctgagcggttacctgaccccgtcgttcgccgcacagcagctgcgcaaccagcgctactaccgcgccgaggtgcacctgttcgaaggcagccaggactacgacctggtgggctacagccgcaagcagatcatcaacgacatcatcagccagtacgaacggcacctgcagttcctgcacctgagccggtga

SEQ ID NO: 529203 - DNA, 2682 bp, Stenotrophomonas maltophilia
atgtacctgcatgcggtactgacggctcctcccccgttcggcgttgtcgcttccatgtaccgcaccaccctgaacctgcttgctggcgccattgcgctgggcctcaccgccggcgctgccggcgccgctgaatccgccgacaccggcaaggacagcaccaccctcggcaccgtgctggtgaccggttccaacatcaagcgcagcgataccgccgggcccaacccggtgcagatcgtcagccgcgaacagatcgagcagaccggccgctccaccctcaccgacgtgctgcgcaacctgtcggccaatgccggcaacagcttcgacgagcagtacaccggcagcttcgccgccggctcggcctcgatcggcctgcgtggcctgtcgccgaagaacacactggtgctggtcaacggctaccgcgtgtccaacttcggcttcgcgctcaatacccaggacaccttcgtcgacctcaacgcgctgccgatcagcgcggtggaacgcatcgaagtgctgaaggacggcgcctcggcggtgtatggctccgacgccatcgccggtgtcatcaacatcatcctgcgcaagaacttccagggcgtggaagtgggcggcggcttcggtaccgccacacagggcggcctggacgaacgcaaggccaacctgctggccggcttcggcgacctggagcagcagggctggaacgtgctgttcgggctggacctgctcaagcgtgatcgcctcgacgccgaccagcgcgcctatacccgcagcggcgatttccgcgacaagcccggcggacgcctggccggctggtccaccgccggtggcaattggctgtccaacccgcgcgcgccgcaaccgttcgccaactgcccggatggcagtcagctgcgtccctacagcgatttcggcagcaccctgcccggccaggcctgcgccttcaacgcgcagccgttcaagaccctgcagcccggcgccgagcgcctgcaggcgtcgttgagtgcgacctaccgcttcaatgacagtgtcgaagccttcgccgacgtgctgtacagccacaacaaggccgaccagatcttcagtgcgccgctgaccgttggccccggcctgcgtgcctacaacccggctaccggcacgctcatcgacgtgccggcggtgctgccggtcggccatcccaacaacccgggcagtacgccactgccgttcgagtacaccttcttcgatctcggcccgcgcctgaaggacaacacgcaggtgttctaccgtgccctggcgggcgtgcgcggcagcggcgaacgctgggactgggaagtggcggcactgacctcgcagagtgcacagcgcgagtacgtcgacaacttcgtcaatcgctatgcgttcgagcagatcctgcgcgagggcagctacaacttcctcaacccgtccagcacgccgggcgcgctggatgcactgcgcctgcagaccaagcgtccgggctggtacaagctgcacgcgttgaacgtgaaggcctccacctcgctgtgggagatgcccgccggtacggtcggctttgcctggggtgcggagttccgcaaggaatcgctggacgcgcgcaccagtgcgcaggtgctgtcgggcaccgaactgcgtccggccatcaacgtcgtcaatggcgagcgccaggtcagcgccgcctatgccgagctgagcgtgccgctgcaccgcacgttggagctgcaggtggccggtcgcggcgatcactacgatgacttcggcaaggcgttctcgccgaaggtggcgctgcgctggcagccgctggacagcctgctgctgcgcggctcgttctcgcgcggcttccgggcaccctcgctgccggagatcgcgccgggccagaccgtcagctacggctcggtgatcgatccgctggatccgctgcaaccgggcggcagccgtggcgtgaccaacatccgcaccggcaacccggatctgaaggcggagcgctcgcgcaacttcaacgtgggtgcagtgtggtcgccggatggtgataccagcatcggcctggactggtaccgcatcgagcaggacaacctggtcaagccggacagcgcgcagttcatcgtcgacaacccgacgctgttccccggtcgcgtgcaacgtgatgcgcagggacgcatccagttcatcaccaaccagtacgccaaccagggcgaactgaccacctcgggcctggacctggacgccaaccgcaccttccgcaccgtgggctggggcaccttcaccgtggccggcagctggacccacctgctcagcttcaagcagccgctggtggctgggcaggcaccgtatgacggcgccggcaacaaccgccacggcgcgctgccgcgtacccgcggcaccacctcgttgaactgggcggtgggcgactggagcagtacgctgagcctgcagtacgtgagtggctacgaccagcgtgtggcgacggcaaccagcaacccgggcctgcgcgaccgcatcaagccgtatcaccagctggacctgtacgtagcgtacgaaggtattcccaacaccacgctgtcgctgtcggtgctgaacctgaccgacaaggacccgccgttcgaccccgccggtggctccaacggtttcgacatcagccagtacaacctgcgcggacagttcgtctcgctgggcgctcgttacaggttctga

SEQ ID NO: 529204 - DNA, 978 bp, Stenotrophomonas maltophilia
atgcgcgctgcccagtacccctccttcggcaacccggccgacgtccttgccattgccgatgcgccgctgcccgagcccggccccggcgaggtgcgcatccgcaccgtgctggcctcgatccacaaccacgatctgctgaccgtgcgcggcctctatggctacaagccgaccctgccggcgatcggtggcagtgaagcgctgggcgtggtcgatgcactcggcgatggtgtcgacggcctgcagatcggccagcgcgtcgccgcagcctcggtacacggtacctgggccgaggccttcatcgcgccggcacgcatggtgattccgatgccggaggcgatccccgacgaaatggccgcgcagctgatcgccatgccgctgagcgcgctgatgctgctggagttcctgcacgtcgaggcgggccagtggatcgtgcagaacaccgccaacggcgcggtgggcaagtcgctggcgatgctggcgcgggcgcgtggcgtgcatgtagccaacctggtgcgcaatgcggatgccgtcgcacagttgcaggcgctgggtatcgatcatgtgttcgacacctcggtggacggctggaaggatcgcgttcgtgaagcgaccggcgaagcacaggcggcggccgccgtggattccatcggcggcgacgccagcggtgacctggtcgacctgctcggccacaacggcacgctggtgtcgttcggcgtgatgagcggcgaaccgatgcgcatcccggccggcggcctgatctacaaggaagcgacggtgaagggcttctggggcagcaaggtcagccaggcgatggcggtggaggacaagcgccggctggttggcgaactgctgaagcgtgcggctggcggcgagctgacgctgccggtggagcagatcttcgcactggacgacatcgcccaggcagcgaaggccggtgcgggttcgggtcgtaacggcaaggtgctgctgcggccgtga

SEQ ID NO: 529205 - DNA, 2364 bp, Stenotrophomonas maltophilia
atgaccgacagtaccttccgcgtggccgatctggccggcgctggcgacgccttgcgcgccggtggcgagcgcgtgccgacctggatcaccaaggaggccggcaaccgccgcctgccgttcgaggccgagcgcctgcagcgcagcatcgacgccgtgcatgccgagttcccgcagctggacgtgagcgactatcgccgcgtggtgcaggcgatggtcgagcgcaaaccgagcatcagcgccgacgacctggtcgatctgctgatccgtgaggccgaatcgcgggtggacctggttgcacccgagtgggaacagtttgccgcgcgcatctacctgcgccgcctgtacaagcgcgccagccgcaaccgcttctacgacgtcggcctgaagtacggctcctacgttggcctgcaggaaagcctggctgaccgcggcatctacagcaacgacatcctgcgctgctattccaaggaagagctgcagcaggccggcgagatgatcgacccggaacgcgaccgcctgttcgcctacaacggcctgtacctgctggccacgcgctatctggccagcgaccgcagccgcgaggtctacgaactgccgcaggagcgctggctgaccatcgcgctgtacctgatgcaggaagaaaagccacgcgaacgccgcatgcagctggttggcgaggcgtactgggcgctgtccaacctctacatgacggtggccacgccgaccctggccaacgccggcaaggtcggcggccagctgtccagctgcttcatcgacacggtggatgacagcctgcagggcatctatgactccaataccgatatcgcccgtgtttcgaagcatggcggcggcgtgggtgcctacctcggctacgtgcgcagcagcggtgcgccgatccgtggcgtgcccaattcgtccggtggcgtggtgccgtggatcaagcagctcaacaacaccgccgtatcggtggaccagctcggccagcgcaagggcgcggtggcggtgtacctggatatctggcaccgcgatatcgaggccttcctcgatctgcgcctgaacaatggcgaccagcgcctgcgcgcgcatgatgtgttcacctcggtgtgcgtgccggacctgttcatggaagcggtcgagcgccgcgccgactggtacctgttcgacccgcacgaggtgaagcaggccaagggctggtacctgcaggacttctacgatgagacgcgcggtgcgggcagcttccgcgaccgctatgccgaactggtggccgacgagcgcatcagccgccgcacggtgaaggcgatcgatctgttcaagcggatcatgctcagccagttggagaccggcaatccgttcctgttctaccgcgacgaggtcaaccgccggaacccgaacaagcacgcgggcatgatctattccagcaacctgtgcaccgagatcctgcagaacatgagcccgacgcggatgatccaggagatcgtcagcggcgaccagatcgtcaccacgcgccgcgccggtgacttcgtggtctgcaacctgtcctcgatcaacctcggccgggcaatcagtgcgccggatgacctgctggccaccgacgtgctggagcgcctgatcccgatccaggtgcgcatgctcgacaacgtgattgacctcaacgcgctgccggtgccgcaggccaccatcaccaaccgcaagtaccgcgccatcggcctgggcacgttcggttggcaccacctgctggcgcaacaggcgatccagtgggaatcaccggatgccgaggatctggccgaccgtctctacgagcgcatcaacttcctgaccatccaggccagcgcgcagctggcgaaggagaagggcagctacccgatgttcgcgggcagcgactggcacaacgggcgttacttccgtgaccgcgactacagcggggccgcgtgggacagcctggcccgcgaggtcgccacgcacggcctgcgtaacggctggctgctggccgtcgcgccgaacatgagcaccgcgcagattgccggttccaccgcgtcgatcgacccgatctacagcgcgttctactacgaggaaaagaaggacttccggcggccggtggcggccccgggcctgtcgctggaaacctggccgtactacgagaagggtgcctacaaggtcgaccagttcgccagcgtgcgccagaacgcccgccgccagcgccatgtcgaccagtcgatcagcttcaacctgtatgtgccgagcacgatccgcgcgagcaccctgctggagctgcacctgagcgcctggcgcgaaggcctgaagaccacctactacgtgcgctccaacgacatcgacatcagcgaatgcgaatggtgcgccagctga

SEQ ID NO: 529206 - DNA, 1041 bp, Stenotrophomonas maltophilia
atggcaacccccctcgaccgcatcaagatcctcgaaccgcgccatcccaaccgcagcaccggcatcatcaacggccgtaccagcggcatcctcaactggaacgatatcccgtatccgtccttctatcgggcctacaaggagctgtcgaccaacttctggattcccgacgaggtcgacatgaagctcgatgcccgccagtacggcgagctcaacgcacgcgaaaagaacgcctacgattcgatcatcggcctgctggccacgctcgactcaccgcagacccgtttcatctacaacgtcgccgagtacatcaccgacccggccgcgcatgccaatgcggcgatcatcggccagcaggaagtgatccataacgagagctacagctacgtactggcctcgatcaccgacctgccgaaccagaaccgcatcttcgagatcgcccgcacccacccgaccatcatcaagcgcaatgccccgatcatgagcgcgtatgacgacttcatgcgcgagaagaccgccgagaccctgctcaagtcgctgatccagtcctcgatcctggaaggcatcaacttctattccggtttcgcctacttctacaacatggtgcggcagaaccgcatgaacggcaccggcaagatcatcagcttcatcaatcgcgacgagctggcccataccaagttcatcagcgagctgatccgcgccatcatcggtgaaaaccccgagctgcagaccaatgagttgaccgcctatgtgcaccagtcattcgaacatgccatcgagcttgagacgcagtggtcgtcggaggtgctggatggcatcgatggcatcgacgtggacgagatggtgcgctacgtgaagtaccgcgccaacaagatggccggcatgctcggcatcgagcgcctgtacagcgacgccaccgacaatgtgatgccgtggatcaaggcctacgccgacaacttcaccgagaccaagaccgacttcttcgagatgcgcaatgcaagttacaagaagaccaacgtcgacaacggcttcgacgatctctga

SEQ ID NO: 529207 - DNA, 468 bp, Stenotrophomonas maltophilia
atggtggtcgcctccttgagcggcaacacccgcgaactcggccggcagatcgccgagcgctgccgtgccgtggggcatgccgtgcactggtacgaggccgacgacctgcggcaggcgccgccgctggctgccggcgaggccgatctggtgctgctgggctgctggaccgacaacgccggccgcacgccggcggagatgaaggcatgggtggccggcatcgccgagcgcggcgagcggccacggcagctggcggtgttcggcaccggtgaaacgcagtgggggcaggagtactactgcggcgccgtgcaccggctgatccgctatttccgcagcgactacccgccgctggagatcgaacagatgccgcatggccaacgccatgccgggaccatcgatgcctggaccgatgcggtcctggcccattactggagcaacaccgatgcagatcatcgacgccaccacgcctga

SEQ ID NO: 529208 - DNA, 327 bp, Stenotrophomonas maltophilia
atgcagatcatcgacgccaccacgcctgagcagttccagcagcttctggccgaacatccgcgggtgctggtggatttccacaaggaccagtgcccgggctgccggatgctggaggtgtcgttgcaccgggtggccaacagcgtggcggggcagggcacgaccctgctgcgcgtgcagttggaagtgctgggtgaggcgttcttcagggagctggggctgcggcagaccccgacgttgtccctgttccgtgacggtgatgagcgcacgcgcctggcagggttccagtcaccgcagcagatcgaggccgcgatcgcgttgcatctgtag

SEQ ID NO: 529209 - DNA, 1332 bp, Stenotrophomonas maltophilia
atgaacaccctggcgccccacgacccttcggcctccaccccggccagcctgggcgcgctcaacgcctcggtcgccgttcccgacaagggccattggtggttccgcctgctggccttcctcggcccgggctacatgatctcggtcggctacatggacccaggcaactgggccaccgacctcgccggcggttcgcgcttcggctacctgctgctgtcggtcatcctcatctccaacctgatggcggtgatcctgcaggcgctgtcggcacggctgggcatcgccaccggcatggacctggcgcaagcctgccgcgcgcggtacccgaagccggtgaacctggcgctgtgggcgctgtgcgaggcagcgatcatcgcctgcgacctggccgaggtgatcggcaccgcgatcgcattgaagctgctgttcgacctgccgctgctgtggggcgcggtgatcaccgcgctggatacgctgctggtcctgctgctgatgaaccgcggcttccgtgcgctggaagccttcgtgatcgcgctgctgatggtgatcttcggctgcttcatggtgcagatcgcgctggccgcaccgccggtgatggacgtgctgggcggattcattccgcgcgcgcaggtagtgactgatccgcacgcgctgtacatcgccatcggcatcatcggcgccacggttatgccgcataacctgtacctgcattcttccatcgtgcagacccgcgcctatccgcgcaccgacgagggccgtcgcagcgcgctgcgctgggcggtgaccgacagcaccctcgcgctgacgctggcactgttcatcaacgccagcatcctgatcctggcggcggcggtgttccatgccaatggccgtttcgatgtggaagacatcgagcaggcgcaccagctgctggcgccgatgctgggcgtgggcgcggcggcgacactgtttgcgattgccctgctggcctcgggcctgaattcgacagtgaccgccacgctggccggccagatcgtgatggaaggcttcctgcacctgcgcctgccgccgtggctgcgtcggctgatcacgcgcgcactggcgatcattccggtggtggtggtgatcatgctgttcggcgaccagggcgcggtgaagctgctggtgctgagccaggtggtgctgtcgatgcagctgccgttcgcgatcattcccctggtgcggatcgtgaccgacaaagtgacgatgggcgcgctggtggcaccacgctggctgggcgcgattgcctgggtgatcgcgctggtgatcgtggtgttgaacgtgaagctgctggtggataccttcagcggagcctga

SEQ ID NO: 529210 - DNA, 471 bp, Stenotrophomonas maltophilia
gtgggcaagaccgacgattcgacatcgctgaaaagcacccccttgatcgaggctgagcgccaggtcgagagcttccggcaagtgcgcgaagcgcaccggatggagctggtggaggactatgtcgagctgatctcggacctgctggccgacggcggcgaggcccgccaggtcgacatcgccacccgcctgggcgtggcccagcccaccgtggcgaagatgctgcggcgcctggcccgcgatggctgggtggtgcagcggccgtaccgcggcgtgttcctgaccccggaaggcgaggcgctggcccatgccagccgccagcggcaccagaccgtggagcgtttcctgctggcgctgggcgtggaccctgatacggcacggcgtgatgcggagggtatcgagcaccatgtgagcgagcagacgctggcgctgttcgaggcgttcgtgcgcaaggccgagggcgaggcgccgtaa

SEQ ID NO: 529211 - DNA, 522 bp, Stenotrophomonas maltophilia
ttgctggcctgtgccgtgctgctggccgcaccggcgatggctgcggacctgcacgcgcaggtctcggcctcgctgatgcggccggaacagcgctcgctgcgaccgatgcaatggacgccgccgccgaaactggtggcgctgtacttcggtgccgactggtgtgcaccgtgccatgccttcgtacccacgctgcgcagcgtgcgtgatgccctgcgccaagccggcgccgataccgaagtggtgtacgtcagtctggatgagagcgaggctgcattgcgccgctacatgcacgcgcaggagatgccgtggccggtactggacccgcgccgcgccgcgcgcatgccggccctgcaggcattggccggattggcaccgccaaacctggtgctgatcgatgccgacggcaaggtgctggccaatggctggcaaggccggcgttaccaaggcctgcagccggtgttgaaggaatggacgaaacgggcgtgcgcgcaggaacaggcccgctgcccgcctgacctgtag

SEQ ID NO: 529212 - DNA, 2160 bp, Stenotrophomonas maltophilia
atgcccgttgccacgcccctcttccatcggctgcccctggccgccgccattgccctgaccctgccgctgcctgcactggccgccacctcgaagccgaccgagctggaccgcgtgcaggtcaaggtcagcaccgccacccgcagcgaacgcctgctatccgatgtcccgatccgcaccgaagtgctgcgcaaggaagacatcgcgctgcgcgcggccaccgacttctcgcgcgccgccgagctgatcaacggcctgcgcgtggaaagcaactgccagaactgcaacaccagcgaagtgcagctgctgggcctgcccggtgcctacaaccagctgttgttcgatggcatcccgctgttgtccacgctgggcagcgtctatggcctggagcagattccggccgggttcgtcgaccgcatcgaagtggtcaagggcggcggctcggcgctgtacggcccgggtgcggtggccggtgtgatcaacctgattccgccgctgccggcgcgcagtggtggccatgtgcaggccggcgtggatgtcctgaagggcacaccgcagaagaatgccgacgtgcgcctggacctggtggcgaaagatgccgacgccgggctttcagtgattgcccagcgcaactggaacagcggcatcgactacaacggtgacggctacaccgagatcacccgcaagaacctcaaagtcggcgggctgcaggcctggtacgcgcccacgccgggcacgcggctgcgcctggacctgcaggtgaccgatgaaacccggcgtggcggcaatcgactggatcagcccgaatacctggccaacatcgccgaatcgctggatacgaaataccggcgcggcagcgtgtcgtgggatcaggaaatcaatgccgacgtcgatttccgcctggcctacgccttcgccgacatcgaccgcgacagtttctacggcggtcttggcgacgtggttaccgatccgtctgcacctggctatgacccgtcgcagctggatcccaacgtggccggcagcgcggcctcgcgttcgtggcgccaatacggccgcacccacaacccgctgcactacatcgacagccagttgaactggcgcctgggcgcgcacgcgctggccttcggcgtgcagtacaagcacgaggcgctgcgcgacgacaaccgcaccggtgacgggcagcgcttggcggtgttggaagatgcaaccttccacaatctgggcgccttcatccaggacgagtggagcctgcgcgacaacgtcgacctggtactgggcgcacgcgtggacaagagctcggagctggacagcgcggtgttctcgccgcgcatcgccctggcctggcaagccacgcccgacctgaaatggcgagccggcatcgccaccggcttccgtgcaccggagatcttcgtcgaggacgtgcacgtcgatacgctgggtggcgagcaggtgcgcgtgcgcaacaccgatggcctgaaggaagagcgcgcgttgaccactctgttcggcttcgactggcgctcggacccggccaatccagtgtggagctgggatgctaccgcctcctatgcacgcatccgcgacaccttcgcgctgggcgagatccagcgcggcgatgacggacaactgagccagctgcgctacaacgcctccggctccaacgtactgggggcggaaaccaacctcggctggcaaccgtcgccgcagtggcgcctgaccgccggtgcctcgtggtaccgctcgcgcttccgcgaaccgcagcgcatcttcgacgacaccggcgacggtggcgacaccatcatcgaaagccgcgactacctgaagaccccgcgctggaccggcctggcgcagctcagctggatgcccgccgagccgtgggaaaccttcgtcgcgctgcgccataccgggccgatgtcggtgctgaacaaccggttgggcgagctgcaccgtacgcgttccttcctggtcaccgatcttggtgctcgctggcaccgacatctgggcgcgcaggcgcagcaggaagtgtcggtggccgcgggtgtcaagaacgtgttcgatcagcgccagaaagatctggaagtgggcgcgcagcgtgacagcgactatgtctacgggccgcgcttcgcgcgttcgtggtacgtcaacctgcgctatgcgttctga

SEQ ID NO: 529213 - DNA, 657 bp, Stenotrophomonas maltophilia
atggccgccgccaccgccttgtcgacgcctgaagatgccaacagcccggcccgccgtacggtgagccgcgaggatctgctggccgccgccctgaagctgatcgggccgcaccgcagcctgtccacgctcagcctgcgcgaagtggcacgtgaggccggcattgcgccgaacagcttctaccggcagttccgcgacatggacgaactggccgtggcgctgatcgacgcggccggccgctcgctgcgcaccatcatcggcgaggcccgccagcgcgccacgtctaccgccaccagcgtggtgcgcgtttccgtggagaccttcatggaacagctgcgcgccgacgacaagctgctgcacgtgctgctgcgcgaaggcgcggtcggctcggacgacttcaagcatgcggtcgaacgcgaactgcactatttcgaagaagagctgcagcacgacctggtgcgcctggctgcactggacggcgccgtgctgcatgcccccgagctggtggccaaggccatcacccggctggtgttcgcgatgggtgccaccgccatggacctgccgccggagaaggatccggaactggtcgaacagatctccacgatgatccgcatgatcatcgtcggcgcccggacccccgccgcattccgccgcggctga

SEQ ID NO: 529214 - DNA, 1110 bp, Stenotrophomonas maltophilia
atgtatacacaggtgtatgtgcgcccgtatagttcactcatgagcgctgtcgtccgtccgtccctgttctctccgtaccgctgggtgtcgccgtcgctgttcgatttctgggcgggccagctcaatcccctgtggaccctgcgcgagccggtggcccgcctggtccgccgcgagccggctggcgagggcgcggcgaccctggtcctgcgcaccaaccggcactgggccggcatgcgcgccggccagcacgttaacctcggcgtcgagattgaaggacgcctgtgccagcgcagctacagccccaccgcactgggtcggcgcgagctggcgatcaccgtcaaggcgatcgacggcggccgggtcagccagcatctggtcaaccatgcacagccgggcgaactgttccgcctcgatgccgccttcggcgagttccagatgccggccgcggcgccggtgctgctgctggctgccggcagtggcatcacgccgatgcgcagcctgttgcgcgacgcctgccagcggccgctggcagcaccggtggacctgttctactgggagcgcactgctgcccatctgcagttccgtgatgaactgcgggcgctggctgcggcacatccgaacctgcgcgtgcatctgctggccacccgcgagggtgaggcgccggccgcgcgaattgatacccatgatctgcaggtggccggtgatgacacgccgcttgcgcagcgccatgtgctggcttgcggcccggacggcttcgttgccgctgcgcgcgaacgcctggcgcaccaggtggccggcttccaggccgaagccttcaccccgccggcgccgctgcgcgatgccagcagcgaaggagaggtgtcgctgacgcttgcgcgcagtggccgccagctgagcgtgccgcgtggccgctcgctgctggaaagcctggaagcgcatggcatcaagcccaagcacggttgccgcatgggcatctgcaacacctgcacctgtgatcgcgtcagtggcgccacccgccaccttcgcaccggcgacctgcagtccgaaacggcacagccggtgcggatctgcgtgagcgcaccgaccaccgacctgactctggatctctga

SEQ ID NO: 529215 - DNA, 1149 bp, Stenotrophomonas maltophilia
atgacccgcgctaccgaccgtgccctgagcaccgccgagatgcatgccttcggtgaggaactcgatgcgatccgcgaccgtgtgatcggcagcctcggcgcctccgatacccgctacatccgccgtgtggctgccgccgtgcgatggttcggcgtgggtggccgtggcctgctgttcctggcagcattctcgccgctgttctggatgccgctgctgtggccggccgcgatcactggcacgctgctgctggcgttgtcgaagatcctggagaacatggagctgggccacaacgtcatgcacggccagttcgactggaccggcgaccccaagctcaatggcaacacctacgagtgggatatcgttgccaccgccgacaactggcgcaagacccacaatttccgccaccacacctataccaacgtgcgtggcatggacgatgacatcggctacggcctgctgcgcatcttcccggaacagcgctggaagccgttctacctgctgcagccgatcatcgcgccgatcttcgcgctgctgttccagtggggcgtggccgcgcaggacctgcgcctgggccgttggctgaagggccgcatcagtggccgtgcgatgtggatgcagacccgcccggtggcgcggaaaatggcccgccaggtgctgaaggactacgtgttcttcccgctgctggccggcccgttcttcctcaccgtgatgctgggcaacatggtggccaacggcctgcgcaacatctggacctacgtgatcatcttctgcggccacttcaccgcagagtcggaaaccttcccgaaggaatgcctgcgcaatgaatcgcgcggtcactggtacctgcgccagctgcgcggttcgtccaacatcagcggcggcttcctgatcaatgtgctgtcgggcaacctcagccaccagatcgagcaccacttctacccggacctgccggccaaccgctatgcggccattgccaaggaagtgaaggacatctgccgccgttacggccagcactacaacaacggctcgctgccgcgccagttcggccaggtggtctggcgcatcctgcgccacgcgttccccagcaagccgcgccgcctgccgatgccggacatcatgtccgcaccggcatcggccaacgcgggctga

SEQ ID NO: 529216 - DNA, 336 bp, Stenotrophomonas maltophilia
atgaacatcgaagccctggaatgcatgcttgccaacggcaaggacggcgcgctgctgcgcttcggcctgggcaagggttggctggatgcggggaacccggtgcgcgcggccacccatctgggccggtgcgtggtgcttgatccgcagtattccgcggcgtggaagctgctgggcaaagcctggctggccagtggccagccgctggcggcgcgcgaagcatggcaacgcggcttgagcgtggccggcagcaagggtgaccagcaggcacacaaggaaatgcaggtgttcctgcgccgcctggaccgcgaacaggcggccctggcgaaggcgggctga

SEQ ID NO: 529217 - DNA, 579 bp, Stenotrophomonas maltophilia
atgagcggcgaaacgctgccgtacgccgggccgtgggcgggggttttccccgccccggccccggtgccgtcggtcgagatgccgccgcgggccctgcggcggctgctcggtcactttcctaccggcgtggcaatcgtctgcacgcgcgatgcgcagggcaaacccatcggcctgaccatcaattcgttcgtgccggtgtcattgcagccgccactggtgctgtggaacctggcgttgcatgcgcagagcctgtccaccttccagcgcgccacccgctttgcgatcagcgtgctggcggccgaccaggaagcgctggcccggcgctttgccgatccgcaggtccgcaaccgcttcgacggcctggcattgctggatgatgacgaggatgccccaccacgcatcgccggtgcggtcgcccatctcacctgtacccgccacgcacagtggccggtgggtgatcatctgctgctggctggccgcatcatcgaagtgcacgagaacggcggcgcgccgctgctgttccatcgtggccgcttccagcccggccccaccgaattgctggtggaggtgcgcggatga

SEQ ID NO: 529218 - DNA, 630 bp, Stenotrophomonas maltophilia
atgtcgtactcgcttcccccgcttccctatgcctatgacgccctcgagccgcatttcgatgcgcgcacgatggagatccaccacagcaagcaccaccaggcctacgtcaacaacctcaacgccgccatcgagcaggccggcatcgccgagcagccggtcgaggcgctgatcgccaacctcgatgccgtgcccgaggcgcagcgcggcgccatccgcaacaacggcggtggccacgccaaccacagcctgttctggaccgtgctcagcaccaacggtggtgcgcccgatgacgaactggccgccgccatcgaccgtgacctcggcggtttcgatgctttcaaggaggccttcaccaaggcggcgcagacccgcttcggcagcggctgggcctggctgaccagcgatcgcgatggtcgcctgcaggtggaaagcagcgccaaccaggacagcccgctgatgggtgcggccgtgggcctgtccggcaacaccccgatcctcgcactggatgtctgggaacacgcctactacctgcactaccagaaccgtcgcccggactacatcggtgcgttcttcaacatcatcaactgggccgaggtcggccggcgctaccgccaggccagggcctcatga

SEQ ID NO: 529219 - DNA, 378 bp, Stenotrophomonas maltophilia
atgaccacgtccgaaccctcgccgcgtcaggccaggcaggcgttgcgctgggtgatccggtgcagtgcaggcccgctgccggaacgccagcaacgaaccctgcagcgctggctgcgggccgatccgcagcatgtgctggcctggcgccagcagcaggcattctggcgggggctggatgccgccgggccggaggtgctggccgcgctgcccgggttgacggctgatcgccaagggttgcgcccgatcgcgtcgcgccgccgcctgccgtggctgctggccagtgctgccgccgtggtgctgatggttgccgctgcgccacacgcgctgctgctggcacgcagtgacctgcacagcaccgatgcaccgcgcatggtgtag

SEQ ID NO: 529220 - DNA, 138 bp, Stenotrophomonas maltophilia
atgcgaggcaagggcttctcgtggaggcagcggcgggtcatgaccgtgctgactctgatgggcgcgtttggggccttcgtagtgctgagtgggctgccgatgtttattttgcggctcaacgcgcagctggttcagtga

SEQ ID NO: 529221 - DNA, 282 bp, Stenotrophomonas maltophilia
atgtatgcgatcgcttttgatttggatcagaagaagcttcaggccaactaccacgtaccgtcttaccagaatgcctattccgatatcgagaaagccttgaaggctaagggtttcaatagacaacagggcagcgtctattttggtggtccgactgtgactgccgtgacttgtgttttggcggcgcaagctctgagtgcggcatttccatggtttaaggcttcggtgacggacattcgtatgcttcgtatcgaagaggacaacgatctttcttccgcgctgtaa

SEQ ID NO: 529222 - DNA, 441 bp, Stenotrophomonas maltophilia
atgaacacaagcattgcagccgccatgggcttcgacgacctctacagtggcagtgaggccttccgcgagcgcttcgatgagatgctggacgcagtgaagctgctgccagtggctctccaagagcgcgggcggtcactgaggtatccccaactgcacaacgcttgcgtgatgggagatgtcgaactggtgatggcgctcttggccaccggcttggaccccgatgcgtatacctacactgacgacgatgaggatcagcctccactggtctggctggcccgtaacgtggagctcgatttcgatgttaagcgtcagatcgccgaggcactgcttgcggcgggggcgtccgtggaagagggggagccaaaagaggaggctaagatcattggcgacgacgatttcgccagtttcttgcatgccaagagtctatctggcgtgggctaa

SEQ ID NO: 529223 - DNA, 504 bp, Stenotrophomonas maltophilia
atgccactcaacccagttgataccacaaccgaccacggcagctacaagggtgatccagccaagaccgcctttggaaagttaaacgataacgacgcgtacctaaatggcaggatcaatgacgtcgccactgccgcgacgaacgcagatacgaaggcaacgaatgccgcgaacgtagctgccggcaaggccacgaagggctcaaacgggacctggcctgacgcgattcctaccgcttcggcattgtgggggtctccggctcgtatccagaggtggaatagcaatacccaagatcgtccagttccctttggcttggcgatctgctggtcaacactcggccacttcaacaaggtcaacgacaactggatcagccagatggggtttggtactgacggcgaggtgtattacacgcagtcggtcaacggcaaccagttcgtggcgtggaggaaattctggagtaccggaaacaccacggtcgacgccaacaacttcatcaagcgagcctga

SEQ ID NO: 529224 - DNA, 171 bp, Stenotrophomonas maltophilia
atgaaaaccaaatggatcgtctggtggcagggatcaggtccgtcgaggggttcccacatcatgcagctcaccaactccgggctgggctacgacggagcgatcgcatacctgggcgctgattcgcacgacctcgcccgtgagatcgtcgagaactggaacgaatcgccatga

SEQ ID NO: 529225 - DNA, 315 bp, Stenotrophomonas maltophilia
atgggcatcgtcacaatcgtcccgccacctgtggacgaccgctcggggctgactcgcacccagggcaccagggtgctggtcgatggccaagagctgaagggagtgaccaaggtcgagctggtcgccagtgtcgacgacgtgtggcgcgctcggatcgagtgcatggctcacgtgcaggtgatgcccggcatgttgctggaagttgagtcgcaccggccgcagtcgtggtggcggcggatcgcgctccgcattgctggcgtgggcatcgacgcaacaagcctgacctccaccgcaagcaggaccgagaagccctga

SEQ ID NO: 529226 - DNA, 378 bp, Stenotrophomonas maltophilia
gtgaacgtcgaccgattcaacccacgcgtgtggctgcgcaactggctgctgaagccgacggcaacggaagcctcgctcggtcaggaactgcctaaccgcatgaccctgacggcagagcgctttgcagtagtgaacacgcatgcgcaggggaagccagtcgctcagccgtttggatgcgcagatgcgcaggtgtccttggacagggcgcttgctgagaagatcgaaaaggtggtggacgcttgggctgaacgtgagtcccgcccaggtggcctgctccatggccgcgggcctgacgcgtcgtggacgctgaggaaggacggctacttcaagatccaaggtttggggccgagcgaggggcagaccgatgagcctgtctga

SEQ ID NO: 529227 - DNA, 210 bp, Stenotrophomonas maltophilia
atgactctcttctttggcggctacaacatccggccggaacacatctccgccgtctcgtccgtgtccgatcttggttcccaccagttccccggccggttcactgtccaggtgatgctggtcggcggccagaccctccaagctgcgtttgacgatgagggcctcgcgatgaagacccagctcgaagccaagaccgcagcagggttgacctaa

SEQ ID NO: 529228 - DNA, 681 bp, Stenotrophomonas maltophilia
gtgaagctagtcctgatgaagcaaggcgtaaatgcgcctctccaaacgctgaccagcagtcagggcgagatcaactttatctgcaatcttgtaaggatcttcaccgctgaaccattggccaagcgagtttttctgagttccttccacacaggcgttcgcatcgtccaacaggagaacgaacttaacgagatcgtcagccaagtcagggaattcatgacccaccagcaatgcgtcgcgtacctctttgaggacttcagtgctctgccttgctgcatcgagaacgcgtggcacgcgatccccggctcgcagctcacagacggcgtcaaagagctcaagcaactgcgtttgaatgaggtcgagagatctcgcaaacgagcatttggcacgcgcgacttccctggcccttcgggatttctgatcacgccagtacagcgcagtgggaaccgctgcggcgaccagcaccgacaatattccaccgatcgcttgcacccaggcggctgcactgtcctggctagacccggtagcacgttctgggcctccactggtaagcgcccaggtcacaaccacgccagcgaagaacgtcataacagcaacaatggcccaatctcggtcagttcgtccttgcttcatttctttccccctgtgttggagcggattctaccgcccggggtggccgcgtga

SEQ ID NO: 529229 - DNA, 930 bp, Stenotrophomonas maltophilia
atgagcactgatgcgcgcctgagcgtcggccttcctggccaccccaagacgaagaagctgatccgccgtctggacgcctcggcgggctggtccctggtgtgcctgatcctgtgggcccgcgcaaaccggcccgatggtgacctgtccggcatgtcagccgaggacattgagctggccgctgattggaccggcgagaacgatgcgttggtccgtgaactggcgtccgttggcttcctggacggcgtggaaggggcctaccagttgcacgactgggctgatcaccaaccatggtcggcagggtcggacctgcgttcactgaaggcgaaatggaacgcggtgaagcgtcatcacggcgaagctgaggctgatcggcaagtgcccgagtatgcgcggattcgtgctgcaagctacgcttcggatgctgcgagcaagcaaaaggatgctactagcaatgctgctagcagtgatgcagcaatgcgcccagcagcttctagcaatgctccgtctccgtctccgtatccaaaagaagaaaagcccccccatacccccccggctgacgccgagggggcaaagcccggacgacggaagcgagagaagatcaccttcgccgcgttcctcgacctgtgccaggaggcgggagagtcggccatcccgcggaccgatccgatcttcacgttcgccacggacaccgggatcccgagggacttcctgcacctggcttggcgcgagttcgccgcccggcaccgcgacagcggccggatgcagaaggactggcgggcccatttccgcgacgccgttcgccgcaactggttcaagctctggtggttcccggcgaccgggccctgtgagctgacgaccgccggcgtgcagctggcccgtgagcgcgatgccgagcgtgcccgggagcaggatcaggagcaggccgcatga

SEQ ID NO: 529230 - DNA, 921 bp, Stenotrophomonas maltophilia
atggcactagtcgtttgccgagagtgtggtggaaaagtcagcgacgctgcgcccgcttgccctcattgcgggttcccgcaggcttcacttgattcaccttcgatccccagctaccaatcaccagcagaagtgaagggaaaatcggtccgcaacggctgtttagcggctgtacttgtagttgtgggccttgtgattgtgctgctgatcctatctaacctgccaagagtccacggaaataagacaagcacgggtggaggttcagcgagccgcgcactgaagagcgagcaggagaacttgctccgagacgtgaaagacccatcgatacccctggccactagggcggtgcgcgctgaatacttgatcgaaaagtaccctgccaccgcagaggcaacggaggctaagacgctccttgagcagatacggtctcagcaggaaacggcgaaccaagaagcagccaagcttgcagctgaaagcattggaaagcagtggtcgtactcgaccttcaaggacgatatgactagcaagactggatactctgcatcggttaccagcacgaacagctttgagtttgagttcccctaccaagggaagcagcatgcacggctgacgttgaggaaacatcctcgctggggaaacgacatcctgttctcggtagagaagggccagatcctgtgccattcctatggcgattgctccgttcgcgtgagattcgacgacggccctgccatgacgctgaccggaactgatcctgcagacaacagctcagagaccgtcttcatcccgggcttccaaaggttctcatcgcagctggccaaggcaaaaacggtaaggatcgaggtgaacgtcttccaccagggcgcacttacggcgaccttcgacgtgtcgggatttgacccaaagcggctcagttccacccaatag

SEQ ID NO: 529231 - DNA, 423 bp, Stenotrophomonas maltophilia
atgaagatcaagatcaccgtcggcggcaacgaccgtatcgccatcatcctgcccagcgacagcgccggcctggccgctgaactgatggcgcgcgcgaccatcttcgaacgcgacggccactacagcacgagcggttggaagcgcgccgaggaaggcgttcgcattgagtacaccgaaggcggcgagctggagccgacccacccgctggttgagaaggcgcagaaggaagcctccgagaagagcagccagtggtacgcggagtacacgaagaaccagaagctggccaaggaactggatgagctcaaggcccagctggcgggcatccagtcggtgaccagctgcacggtcacgccggccgaaccggaagccgcgcctaccagcgaagtaatcaccaccgacaacggcgaagacctcccgttctga

SEQ ID NO: 529232 - DNA, 441 bp, Stenotrophomonas maltophilia
gtggctaagccggccatcacccatgagcgggccgatcagctgatcgaacgcctgcggacggtccaggtggacccgccatatcagtgctggcttggcggcaacgacaccgatcagggaatgtcctactgcggcgactgcgcccagaaagaagtggatgcgggaagggctgagttcgttgacggcggctggccgcaggaaagcgacggcccggccttctgtgaaacctgtcaaacggtgctgcagcacgacctcaccgactacggcatcgctcaacagctggaaggctttcagcagtccaccctgcgtcaacccgtgactgctgaaggcgcgtacgaaatcgcccaggtactcaccaaccacagagagcacccggaagtgctggcacttgttccgaaggtcgagcggctgctgatcgacagcaaggcggtgggcaatggctga

SEQ ID NO: 529233 - DNA, 153 bp, Stenotrophomonas maltophilia
atggctgaccagctgctcaacaccgccctgacctgggccatcgccgcagggatgttcctcgtcggcgccgcgctggtggtgctggcctaccgcgccgggcagtgcctgcgcgctgcatgccgctggtgctggcggaggtgcgttcatggctga

SEQ ID NO: 529234 - DNA, 1389 bp, Stenotrophomonas maltophilia
gtgctttctgcgctcatctcaacactcggggaatccccgttcgtaatttcaatgaaaggcggatggggaacggggaaatcgacgtttctggagagattgtcgttccatttggagcgaaagctgaagatccctgtggtccggatggatgcttggcagtccgactacatagacgacccgcttctggcgatgactaccgcgctcggagaccgtcttagcatcgtggaaaagggtcgcacaaagagagctaccgcgaaagtcgtcaccgcacttgcggagtcggccggaaagatctcgcttcccgcgctgtcgattctggcgagcgccatcgttcccggaggcggcaaagtagtggatctcgcgtccgcaatgcccgagctggccgaaggactattaggatgggaccgagcaaggcggtcggccgaagaccgatttaggctttcattggctgaagcgagggatgcgctgaaaaacgcactcgaatcagaaactgaatcaccattggtcataatcgtcgacgagctggaccgctgccgacccgactttgccattaagttcctagaaagggttaagcacttcttcaatgtcgacggagtctgcttcttaattgcaacggataacgacaatttacccgaggccgtgaatgccgtgtacggacaaggcgtcgacagcgaaaaatacctccggaagttcttcgacttcgaattcaatttaccgaaaccgagcatgaaggattatgccgaccatcttttccaagtcttcccaggagctaacgacgcctctcctctacttgagttcaagaagaggctacttaataacctacatgtaggctcatatagagagcttttgcaaaatcaaccatcgacgctagaccaagcagagtacaatattttctttggtgaaatctcacggtcctttggatttcagctacgagatgcgctacaggcccatactctcttgatggcattcgtacgcactttccctacacgaaagacaaaatttccattcatagattgctacatttgctgccttcggttcaaagatccaaaacagtatcggtcattggtgaacggcgatcatcccagcgcggctagagcattgctttcggatttgaagaagagcattacaagtattcatgcgatcgcaaagtttctcagcatgcacggcgacattgattcatttaactgggaaaatgaactttcaaacgattcacataaatcgctcaccctcccacttgagaggctagcgtacatatcgctgcttgcgcgaacaactttgcatttgaaggatcgctcacgcaccttcacttttgacgtaaacgagtacatcaattcagtacttggattcacagcgagttttgccgaacttccggatggcggcactgaccgctag

SEQ ID NO: 529235 - DNA, 282 bp, Stenotrophomonas maltophilia
atgaatggaaccacgcttttggcccttcagctcatcaagagtgaagacgttgacgttgacggtgagattttccatgtgcgcctgttcgtgcaggatggaggcggtgccatcaaggcgcacgctgaaagcaagcagagcgatcgcaagtgggctgtgaacagcgataccgagaccgccagggacgccaagcatagcaacgtcgatatttgcgaagaagtttggactcaggtaatcgacgatgtgcggaacaagctggacttgccgctggagctgcggggctga

SEQ ID NO: 529236 - DNA, 177 bp, Stenotrophomonas maltophilia
gtgaccggcctcagcgagccacgcaaagtgatcgaaaagggcgaagaccactacgagttcgaggtgtacctagtcggcggtcagacgctaaccgtgggcgggtcaggcatcaacatggcaaaggtgtccaccgccttgatccgggccatcaaggctcacatggactccgcgaagtag

SEQ ID NO: 529237 - DNA, 486 bp, Stenotrophomonas maltophilia
atgagcactgacaagcgaccgatcgaagagcgcatcgctgctctgatggggaagtctgcctaccgcgaccttcgcgacgggttcttgatcggggacctgcctcggttcaccgatcaggaccttgcagctgccatcggggccgccgcacgttcggcaggacgggtgggggtgatggcgttggagacctactacagctcgacgctgttgcaccaggcggccttgctgagggaatgggaagatgcccaaaggaaggagggcgacacccgtgagcaaatcgtcctgaccagaattggaggcgccctggccattcagcagatgtcgggaggaaaggtcactggctccgcctacagcgagtacgcgtacctcatcttctcccgccgcgagaagctcgaggccagggtcagggcagctggtgcgtggttggaggagcagcgattcacagccctgcgggaggtcaaagcccagcttttccatgaagcggcttga

SEQ ID NO: 529238 - DNA, 960 bp, Stenotrophomonas maltophilia
atgaaacgattcaagagtcgggatgaggtcactgccgtgcctgggttcaaggaggaacagccgatctccttggagacctaccgtggattggtggggtggtatgccctcgagaagaaggaaatgcactgctgctcgctcaggagcacgggcacgttgtgcaatacccctcaccaaaagggatgggtagcgaaggtcgccggaggcgctctaaccatcatcggcggcgactgcgcgaagcagaagtacgacgccgacagcatcatcatgcgggacatcagtgcagcccagaaaggcattgatgaagagcttgccatggagagactggcagagctcttggccggaagggatgttgcgaaggctcgggtggtggccgtgcttgaagctttggacgagcgacgccgcgcgctgcaaggcttcatggaatccgtggggcggaagaaccagtccaggctcgaggagctcgctaggacttcgggcgaggtgttggtcgagggtaggacgcctgcggagctagacgatgagggcgaggtcattaaggacgccaggatcgtcccgattgctctgccaccgatcgcatctatcgcggtgtgcaagccgttctacctcgtgccgatagcggaagagctgcgagcgcttcgcaagctttgcaatgatgcggacagcctgattgcagacggtccgaagaaggggcacagggccttggccgcgggtctgtcgcgggctgatagctcaataggtaaggcggaggtggcgatcagggcgatagatgccttcctcagcagcgacttgactgccgccggcttcctgacaagtgactggaaggatcgttgccttgctgcaaaggttgcggttgatcgcacgggctcgacgggagatcccaaggcctggatccagcgaattgaggcgggtctccgtcgcaagtacaacgtcaccaagatcgtaatcagggtatccagatga

SEQ ID NO: 529239 - DNA, 198 bp, Stenotrophomonas maltophilia
atggcgctgcagccagcccagggtgtgcgggcagcgggcgtggatcagccgcccgatcgcggccaggtcggcaccgaggtcgcgttccaggatgggttcgtggtgcgcgatccggttgcgcaggtggcggatgcgtccaatgtctgcgtggatggctttcctgatgacactgggatgggccgaaggcgcatgacgtag

SEQ ID NO: 529240 - DNA, 972 bp, Stenotrophomonas maltophilia
atgcacctggacgccctcgccgccgcccgccgccacgaacaccgcttcgacgacggcaacccgctggccgaacgcaatacccgccgcgccatgtggctcaccgtcggcatgatgctggtggagatcgttggcggctggtggttcaactccatggccgtgctcgccgatggctggcacatgagttcgcacgcgctggcgctgggcctggcggtgttcgcgtaccgctgcgcgcgccgctacgcgcacgatccgcgcttcgcctttggcacctggaagatcgagatcctggccggctacacgagcgccatcgccctgctcggcgtcgccgcgctgatggccgtgcagtcactgcagcggctgtgggtaccggcgccgatccactacaacgaagccatcgccatcgctgcggtaggcctgggcgtgaacctgctctgcgcatggtggctgcacgacagcccgggccacgcgcatcaccaccacgggcatgaccatggccatcatcacgcgcatgaccacgaacaccacgatcacggccgtgcgcacggtcacgacctcaatctgcgctcggcctacgtgcacgtgctggccgacgccgccacctcggtgctggccatcgtcgccctgctcggcggcaagctgctgggcctgacctggctggacccggtgatggggctggtcggcgccgcgctggtcacggtgtgggcagtgggcctgctgcgcgacagcggccgcatcctgctcgacgcgcagatggacgcaccggtggtggccgaagtacgcgaagtgatcgaacagggcccgtggccggcgcgcctggccgacctgcacgtctggcaggtcggccgcggcaagtacgcggtcagtgccagcgtggtcaccagcgacgcaggtctggatgccgataccgtgcgcaacgcgctggcgatccatgaggagctggtgcatgtaacggtggagatccaccgcagctga

SEQ ID NO: 529241 - DNA, 975 bp, Stenotrophomonas maltophilia
atgggtcttctcttaatattgccgtttctcatcagcggctacacgttgtgcatcaagaatgaactcatacgttacgggctgtcccagtacgatggacagcttctttattttagagtcgcgtattatggagtcttgtgcttcggcctcgctctggtggctgtatcaatctttacatttctgctgtcgcgaagctggccggcaggttgcatgtatggcgctccctctctgtgctggaacgctttttcgactgactatttgtcgttagcggagaggcttgtagctgtcgcatacgagcctggcaaggcgagcgctaaagcatatgctttctttagtctcgtgggtttggtcaccatgttggttccttacccgttgtcctggatcacaaattactcgtaccgagtgggtgaggaagcactccttggcgagaaaattgaccgtccgcaaacgcttgaagcatccctactaaggcattcgctcgcacactcgccgctttctcaggtcttgatcgattcctgggggaacaacacgccgatcatggtgttgatggagtctcggcaagtgtacgtcggggttgtattgaccataggcacgccaactgaagcttcgagtgctcaagaagattttgagcttatcctgtatacaggtggttatatcgataaggatacacttgaaatagtattggatccaagatactcaaaagatgacgtcttgagcatatatcttcgtcagaaggacattgtctctgccgcgagaatgcctgatgatgttgggaagactagggtcgttccatttcctcaccggtttgggctggtgcccgttgttgcacaggaatcgctggctacagatgcacgcgtttgtagccccccaactcactcttggaaatccaagggttacattgcatcagcgctagggggcttttccttggccgtgctccttcctaaattggctggcgctgtcggtagggtgttcaggtga

SEQ ID NO: 529242 - DNA, 174 bp, Stenotrophomonas maltophilia
atggagggtggggagttgctccagcatgagcgaattgttcactctgccaaggaattagggactatccccgcttcgacagttgtggtggaagacacttatgtggatgttgcgcttctggaagtggaagaggtggatgccccgccgacgcctgaagacgaggagggcaagcaatga

SEQ ID NO: 529243 - DNA, 438 bp, Stenotrophomonas maltophilia
atgaagaaccagaagggcttcaccctgatcgaactgatgattgtcgttgcgatcatcgcgattctggctgccattgccatcccgcagtacaacgactataccgctcgcgcccagatgaccgaagcctacaccctggctgccggcctgaagaccccgatcgcggaagcgttcgcccaagataatggcgatacttcttgtgcagttccggatggttctgtcaagaagggtaagtatgtcgccgatgtctcggccgacggtgatgcaacctcatgcgttatcactgcgacgatggctactactggcgtgaatgacaaagttaacggcaagaaggtcaatctcgcattcgcctcgaaaactggcgcttggacttgcaccaccgacgctccgtcggaagttcagccgaaggcttgcaccaccgccgctaaatctggcggctaa

SEQ ID NO: 529244 - DNA, 315 bp, Stenotrophomonas maltophilia
atgacccaggaacatatcagccacccggaagggttgccgaactgcgccgccggccaccgcgcgcgccacatccacgacaagcgctgcgcctccgccggcggcggccacctggtcgagtgcgcatgcagggcaaccagcaagagccaggagcccgagaaggctctcgccgagtggcgccgcatcaaccgcccgccgcgcgtcgcgcgcacatcggccgcgccggccgtcgctgacaacgtggtgcagttcaacctgggcttggccgagcagtcgacgcagaggcagcgcgcgggaggcgaccatgggcgccgctga

SEQ ID NO: 529245 - DNA, 228 bp, Stenotrophomonas maltophilia
atggcagaagaaatccgctggtacgagaattggaacttcaaggtcagagcgcgtgatgtaaccgttcgagttgcgttggatggccccggaaaaggctcgcttactggcttccaagtgatctacggaccgagtcagattggcctggacattcccgtgacttcccgcgaagacgcgcgaaacaaagttgaagcgctgctttgcgagctgatggggagagactggtgttga

SEQ ID NO: 529246 - DNA, 249 bp, Stenotrophomonas maltophilia
atggctgaccatccgagcctcaacgaccgcgccgtggacgctctcgccgccgtgtctgccatggatcgcgacatagggaccgacgatcccgagcgccacatcgtgtggcagctgaagaatcaggcctgcgccgtgctgagcgatgcgttccagcgtgcacacaacctcgcctgcctggcagaaaccgtccgccgcgacatgaaggctgcggtggccgatgcccgcaagaaggacaacacccatggctga

SEQ ID NO: 529247 - DNA, 885 bp, Stenotrophomonas maltophilia
atgagcaacgacaacaagaccctggcggacgtgcggcccggtgggagggtgaggctgggggatgcgcagaccatcgagaagcaggcgagggatctgctggcgaaggagtgggagatgttgagcttcgacgctccagtagaagagctgcgggagggctgtgaactgcctcccgtgatcgcggccagtgttcgcgccatcgttgccgcgctctctgcccatccattcccggatggccagcgggacgacagcgatctgctggcagggctacgggacgttgaggaacacctgtattacgcaggctccaacccgagccataccgagaccgtgcgcgcggcaatcaacgccctctccgcccagccctccccgggtggtcaggatgcgctggcagttattgaagaacttgcggaactcaaccgtgcatgcgcggcgttggaccccgactacaagggaccgacagaagccgccgtgcaaaccgccctagccgccctcgcctcccgccagccggtgggggagccggtgactgtgcctggagcgcctacgagctgcaggcactgcgacagcaccgatctgaagtggttcgctcatgtccgcacgctcaacgacgtgcagcagggccgactcaacactcacgacgtgggctgtgtattcgtgctgggctgcgaggaatgctcggaaaccctgcgtgtggtcaaggcggatgacattgccgcgctgctgaacgcagctccgcccgtgcacgcccaggacctcgggcagatctggcagcaggcgttctatgacacagtgcactcctacaggcgcaacaagtcgcgcatgtgggttttgcagatgatgaaggagcgggttcaggcccttctcgacagccaggcggtgggcaatggctga

SEQ ID NO: 529248 - DNA, 198 bp, Stenotrophomonas maltophilia
atgaacgacaaatggaatccgcggctgtggctgcggaactggatcaatcgcccaacgaccgaagaggccgcacataacgctcagttgtctgcactgattgctaatgctcgggctgaacaatcagctctctcaacacgtccctcagcgattgacgtgatcgaggcctgcgctcttgagcagcagccgcttgccttgtaa

SEQ ID NO: 529249 - DNA, 267 bp, Stenotrophomonas maltophilia
atgaacgagaacggaaactttagagaggaaatcttggagctgagccggatcgccggggagcaaaacaagatgcttggggagctcaaggatcagatcgcagcggcacacgtgttgttgatcggcgtcatgcgagcttttgccgacactccaggtttcaaggaaaaaattgaaggcgtcatcgcagaaatcgaagcaggctccatgccagatggagccaagaaggagatctctagaatcagccgccttgcactgtacaaacacggttaa

SEQ ID NO: 529250 - DNA, 429 bp, Stenotrophomonas maltophilia
atgctggacccactacgcccatacgccgacctgctcaagctgctggcggtactggcgctggctggcggcctgttcgtgaccggctgccagcgcggtgaagatcgccagtccgccaaggaccaggccaccatcgccatcgccgagaaggcgcgcgctgcagcagaagctgacgcggccgagaatctgcgcgcggccaccgccgccggccagctgctgcaggaggtgaaccggcagacccgggcgtcgatcgatgacgcggcccggcagagagcggcggccaatgaggccgcactccgggcggaggctgcagcagctgagagtaagcgccgggcaacagcggccgagcgggcgctgcaggatgcgaagaaccagccgggatgccggcaacagctggagcagaagctatgcgacgccattccattgctgtga

SEQ ID NO: 529251 - DNA, 405 bp, Stenotrophomonas maltophilia
atggcaaagcagaagaacaccccggcgccagccaccggcagcgcgcccgatgtggtggaagcgcctgccgtcgtggcggacacagctactggtcaaggcgaacagccgaacgcagaaggccccgaggctaacgcggcagctgctggcggcgaactggcggcggaagagggcggcggtagccaggtgaccgataccgcgggcacggacaatgaagtgccgccaccggatgaagaactggttccgtcgaacggcggaaccgtgccggcgctggtgctcagcgacaaccacctgggcaaggttggcgaggtgatccaggtcaatgcagctcatgctgaggtgttgcgccttggtggactaatcgacccccatcccaacgccatcaagtcggccacgccggaggaatga

SEQ ID NO: 529252 - DNA, 5322 bp, Stenotrophomonas maltophilia
atgaatcgtatctatcgccgtctatggagtcgcgtccgtcagtgctgggtggtggccagcgagctggcgccatcccgcggaaaagcgtcttccaccgttcgtgcagggggtcttgtgcttctttcgttgctggtggtgccgactgctggcgcgcgcgaggatgacgaagatgacacagcctggtgggcacgacagacaatgagtgccttcgtcgcaacggctggcgacagtgggcgcgcattcgagacccgggcagtcaatcgtggcgatgtgtacagcaacacgtcgcgggccaactggagtgtcatcgacggcaaggagtccatggcacttgggtcggaagcacgtgccagcggtgaacatagtctcgcggcaggcatcagcagccgtgccgcgggtgcgagaagcgtgacgcttgggagcctctcggaggcatggggagataacagcattgcgctcggccactatgccgtcaccaagaacggtgggtatggaactgctgtaggcacctacagtgaggccaacgggattggagcaacggcgcttgggcagaatgccaaggcccgaaccgaaaactccattgccgtgggaagtgggtccatgacggacgccggggctggcgtctcaaagattgccatcggcggcaatgcgtacgcaggaactgcagggttcactggcgcgatcgcaatcggtggtgcatccaactccggctacgatggcgtggcgctcggctatggtgcgaaggccgagaaatccggcagccttgcattgggctcccattcggtggccaatgaatccaataccgtctcggtgggcaatggcagcaccaagcggcgtatcgtgaatgtggccgatgcgcgcctgtctgcaaccagtacagacgcagtaaccggaaagcagctgtatgccaccaactccaacgtgaccaaggcccagaccgcagccgacggagcgaaaacgacggccacggcggcacaatccaccgccaacacggccaacagcaatgccaactcggcgctggcgaaggccaatgcggtcagtggcctggtgagccaagtatcggctgctggcaacgtaaggctgggtggtgagaacaccggtacggtgctggatgtgcgcaacaagtccaatgccaaccgccgcatcaccggtctggctgacgcatcgctcacgacaaccagcaccgaggctgtgacgggcaaacagctcactgctaccaacaccaatgtgaccagtgccaaaactgcggccgatgcagcgaagacaactgccacggcagcgcagtccatggccactacggccaataccaatgccaacacagcgttggccaaggccaatgcggtcagcagcctggtcagccaagtctcggccagtggcaacgtgcgccttggcggcgagaacaccggcaccgtgctggatgtccgcaacaagtccaatgctgttcgcactatcactggcctgaaggatggggcgctgagcacgaccagcaccgaggcggtgacgggcaagcagctcaatgcaaccaacgccaatgtcagcaaggcgcaggcagcagccgacgcgacggctacacggctgaacgccagcgcagtggcccttggcgcgggagctgtcgcggagcaggccagctacggcatcagtacggcgctgggcaacaacgccaaagcctacaacggcaagagcgtcgccatgggcgcagacgctcgcgcgacggtggatgacgcgggtaacaagatcagtggcaacgcgggtgtgtccatcggtgctggaacccgcagtggcaacggtgcggtggcgcttggattggatgccgtcgcaacgggtgatcgaggcgttgccgtcggccatgaggcgtctggtaaaggcacgcacgccaccgctctgggcttccagagcaacgcgtcggccaaccaggccacggcggtcgggcgcggggcggttgccagcagcctgtatgcctcggcactgggtaatcaggcgagtgctaaggcacagagcgcgctggcgctaggtgatcgcgccaatgcggcacatgcaggcgcggttgcgctgggtaatggctcagcaacgactgggaccaatcaggtctcggtgggcaatgactcgttgaagcgcaaagtggtcaacgtggcggatgccgccttgagtacgtccagcagtgaagcggtgaccggcaagcagctgcatgccaccaacaccagcgtggctgctgtgaaggcgaccgcggacggtgcgcaggcgcgcgtggcggtactggatggcctggtggggcaggtgtcggcgagtggcaacgtgcgcttgggtgcagacaacaccggcaccgtcgtcgacgtggccaacaagagtggcgccaagcgcaaactgcagaatctggccaatggcgtgctcagtgcgtccagcacggatgcagtgaccgggcagcagctcaatgccaccaacagcgaagtggccagtgtgcgcacggcggcaaccgcagcgaagacggcggccgatgccgcccgtggtgtagccgatggcgctgtgcagaaggctgatgtcttgggcggactggtgggccaggtgtctgccagcggcaatgttcgcctgggtgcagagaacactgggaccatcgtggatgtcgcaaacaagaccggagccaagcgacgcatctacaacatcgccaacggcacgctgagtgcaggcagcacagacgcggtgaccgggcagcagctgtttgcgaccaatgccacggtggagacgcagcgacaggctttggctgggcatgcgcagcagctgacggatcaggacgggcgtatcgccgacaaccggatcgagctggatgcgctgcgtacggatttcgacaacttcgatccggatctggatggcgtggtcaagttcagtgctgaccgccggttggtggacatggagggtgcccgcgtatcgggtgtggcagcgggtgatatcagttctgcgaccagcacggatgcggtgaatggcgggcagttgtttgctacgaaccagaagatctcggccctggaaggggtcggaaggttcattgctgtaggtgctggtggcgatcaggagcaggcgtcggcgggaagattctctgtagccatcggagattctgcatcggcgtccatctctggtgaaggaggagtcgcggttggcggctatgccgttgcgggtggtaccaattctgtcgcaatagggcgagctgcgtcggttcgtgacggtgcaaccgcggccttcgcactgggagtcaggtcattggtcgaggctgaaggggggcttgcagttggtgcagaaagccgcgtgcagtctggcgcgcttgacagcgtggctattggtagccgctccttggcgtcggaagagtttaccgtttcattcggtcatgacgatcttcagcgtcggcttgtcaatgtcggtagaggcatccgcgattccgacgccgtgaccataagccagcttgccgaatccgtatcaggcttgggtggtggagcaggtctggatgggaatggatacttcatctccccgacctatagcgtacagggcagtacacagaacaatgtcggagacgctttggctgcacttgatggggcggtggtccggtcagacagtcgcgtggatggcctcgaaggtcagctgcgtgcgacgttccaacaatcatcctcgaccggggtggatggagttggtcagctgaatctggccggtgcgcaaggcatggttctttcgaatctggccgatggacgcattgctgcaggcagccgtgatgcggtgactggcaatcagctgcatgccacggagcagaagatcgagcgcaacagacgcgaccttgatgcaatgcagcgcgattggatctcggatcagaagaatcttctgactgagattagcgatggaaacctcattgatttcggcggcgcacgcctgaccggtgtcgccgatgcgcgcctctccgcggatagttcggatgtggtgcgtgggagccagctttacggcacgaacctgcgacttaactccattgaagaaatgggcagcaatttcgcatttggctggatgcctgaggaagggcagtatccagctgaagcaggtccagctgggttggcgattggcatgaacgcaaaggcgtcattgcattcagaaggcggcgtggcagtaggtgcatgggcaacggcccaagggaagaattcaatctcgatcggtcgagcagcgtttgttgctgagaacgccgaggcgggatttgcgctgggtgttgggacgtccgtcaacgctgttcgaggaatggcgttgggtgcggaaagccgagtgttggctgaagcacgaaatggtgttgccatcggctatggatcggtagcatccgagcctgacacagtgtcgtttggaaatgacaacgtgcgacgtagattgacgggtatttcccgcggcatcggcaccaacgacgcagccaccgtcggccagctccgcggcgccctgtccacccttggcggcaacatcgacgccgagggcaatgtcaccacccccggcttcaccgttcaggggcagcaccagagcaccgtcaacgacgcactcaccaccttggactccgccgtagtcagcacaggctcccgcatggaccgcgttgaaacccagctccgctcggtcttccaggaagcgccgtccacccgtagcgacggcaccgcccagctcaccctggccggcgccaacggcatggtcatctccaacgtggccaacggcctgatcgccgccggcagccgcgaggccgtcaacggtggccagctgcacgccgtgcagcagcagctcaatggccgcatggatggtctggagcagcgcgtggatggccagccgcagtcgcgtgcgctggctaccgcttcggccgcgccgaccgaacaggtcacgccaacgccggaagccagcgattcgccgcaggtagcttcggcaggcgagggcacgtcgcccacgccgcagccgaagtcgaagaaggacgacacgccgtcgcccacgccgcaggtcgataccgctgaactggagaagatgctggcccgcgccaacgaatacaccgatggcgcgatcagcaacttcgagcgtcgcctggacaagatggacaagcgcttcaaccgcatggccgcgatgagcagtgcgcagacggccatggccatgaacaccgccggcctggccacctacaaccgcctcggcgcgggcgtgggctatgccgaaggcgaatcggccatggcgctgggctaccagcgtgtgctcaacgaaaagggctcagccaccttcagcctcaatggtgcgttcaccaacagcggtgaacgcagcatgggcgtgggtgtgggcatcggctggtaa

SEQ ID NO: 529253 - DNA, 957 bp, Stenotrophomonas maltophilia
atgcggttcacctcgtcggcggtggccggcttgctgccatcggcgaacgcggcgatttccttgcgcatttccgccatcgccggaccggtcttgtcgatctgcaccggcgcgctggccatccacggacgctggcccaccgagttgaccgcgctgctgcgtgcaccgtacgaccagtgcttgtcttcacgcaggttcatgttcaggcgcgaggtgaagtcaccgccgatgacgccgttggcgatgtcgaagcgggtcgagctggcagcgctcgaaggcgccaccacctggccggcgaacaggttggcctgcaccgcgcccggctggtcgatcaggaacacgcgcgggcccttcggcagcgccacgtcggtggccgccttcacctgcggggcgtcgccactggccttccagtcgcccagctgcttgtccagcagcggcacgatctcggccagggtggtgtcaccgaccacgatcagggtgccgttctgcgggcgcagccagtcgtggtggaagtcgaccaggtcttcgcgggtcaggccattgatcgccgcttcgtcaccgctgccggtgaacggaatggcatacgggtggcccttgccgtacagcagcggcggcagcacgcgcatcgccaccgcacccgggttgaccttctcctgctggatgccggcgatccagctcgccttgacccggtcgatctcgccctgctcgaagcgcggctcacgcagcaggtcgcggtacagcgccagcgacggtgccagattttccttcagcgccgacaggtccacgctcatcgaatccaggccggccgaggcatccaggctggcacccagtgcgtcggcggcatcggcgaaggccagcgagccgagcttgccggcgccttcggtcatcaggctcatggtgaagttggcggtgcccggcttgcggccctggtcggcgctgaagccgcccgggaactggtag

SEQ ID NO: 529254 - DNA, 651 bp, Stenotrophomonas maltophilia
gtgccgttcttcagcgtggcgcgctgcagcgccgggaacttcaactgcgggaactcgcgggtctgcggcacgccggccttgcggtcgacctgctcgggcagggtgctgtacttggggtccaccgccggcacgttgaacggcttcggcgcctggctcgggtcttccttcagcgccacgcgctcacccggtgcgatcaccagggtgtggctgcccgtgtccagccactgcgcgcccagccggctcagatcagcagcactggccttctcgatgttagccagcgaggtgcggaagcagcccgggtcgccggtgaacaccgcgcactcggccagtgcatcggccttgccgccgaagccaccaatgcgctcgatgccgcggatgaaaccggcgcgggcactggtcttggcgcgctccagctcggccgcggtcggaccctgcttgatcaggcggtccagttcctcgtcgatgatcttctcgaccttggccgggtcctggccctgcttgaccgtcgccatgatcacgaagttcgaacccagctgcgacgtcgacaggcccgacgcgatgctgtccaccagcttgtcctggtgctgcaggcgctggctcaggcgcgaggacttggcaccgcccaggacctgcgcgaacagttgcagctga

SEQ ID NO: 529255 - DNA, 324 bp, Stenotrophomonas maltophilia
atgcgcgcctgcggcaccttgtccgtcatcgtctcgcgcgtgtcggcgctgcgcttggccacgttcacggccggctgcgccatggtcgggccggccgggatggcgccgaagtacttgccgaccttttccttggcggtggccaggtcgatgtcgccggccagcaccagcaccgcgttgttcgggccgtaccaggtgcggaaccaggtcttcacgtcatccagcgacgccgcgttcagatcgttcatcgaaccgatcacgccgtggtggtacgggtggccaaccgggtacagcgccttgttgagctggtcccaggcctggccgtag

SEQ ID NO: 529256 - DNA, 264 bp, Stenotrophomonas maltophilia
atgaccgagtcgtgcctgctgggtggttcgctgcgcaactactgctcggatcccgagaaccgcgaaaaccacatgggcgccaccacctaccacgacgtccagttccgctacaacacgccgtggaagggcaccatcatggtcggcctgaacaacgtgtgggacaagaacccgccggtctcgtactcgacctcgtacaacatgttcgacccgcagtacgacctgccgggccgctacatgtacatgcagtacaagcagaagttctga

SEQ ID NO: 529257 - DNA, 2304 bp, Stenotrophomonas maltophilia; identical to SEQ ID NO: 521881

SEQ ID NO: 529258 - DNA, 246 bp, Stenotrophomonas maltophilia
atgacgcgcgaactcacgcggccaatgaccgccaaggaagaggcgcagttcaatgcggacatggagaagtttgatagggaattcaaagctgccatgcagcaggcagcgccgaaacgagggtcggcagggaatcattacgtacagggccaaaagctgcctaagcgactgaatttcaaggttgattgctcgtctctcgggcaggctctccccatctatggggtctgttcaagcaccttggctgtgtag

SEQ ID NO: 529259 - DNA, 675 bp, Stenotrophomonas maltophilia
atggagcgaagatttgggttgacgatcgtcgcaggcatagggggcgcggcattcgtggccggggcatgtgtaggctggtttgcgttgggcgcaccgagaggagtggatcttgttgccgacaatggcagtaccgccgattgggttgcggcgattggcgccttagtcaccggcttggccgctgtttactttgcagggcaagctcacctgcaccgagttggagaggttaatctcgctgctgctcgttcccaaactgcgaagaaggccaatttgactctggctgccgcgttggcggtgcctccaatgacgatcaagaatagttttgaggaattcttcagaaggtgtgaagattctcggcctgtctacttcgatgttcgagctctgttcgagagggtcaaggttcgagtgggaaggttggaggtttcgcaagaaacattgagctatctctctgttgcggcggtcgcgacacttgctaacgtgaataacggccttgtctcgctttccaggtcgattgacatcgccatggagttcattggccctgaggccgttgaggggggcgctcttgttgatccgcgaattatcgaagagcttcgtaccttcgaggaagttattgacgatatttactcgaattccgataagttcatggcgctactcatagcagagcgggagatttcgtag

SEQ ID NO: 529260 - DNA, 696 bp, Stenotrophomonas maltophilia
atgccatcgatcgggtgcgcccggagggttgagtggcctgctgccgctgggcggccacagcactgtgcctcacggcagtggtcgcggcacagctttggtggtcggcgccgcccgtgcctgagcagctcgcgttccaaagcatcaacgacgatcgattctcacaactgcgccgccaagcgatgcagttcgtggagtctcggccacgacagggcttccagtttgttgagcggcatcgagatgccgagttccagattgattgccgaggcataccagtgctgtggctggagaggcgctcgcaacatctgctgttgcgtgtctcactggacgcgaagcagcgggcgcccgccgttgtgcggttgcgggcgctcctccaatggcagttggagccgttgggttacctggagcaggtactcgctggcgtgcctgagcctgttctgttggatcgggtgctgcagattcttgctggtgatgtgcctgagggggcgcgatgtggcgtgccgtagtcgagcatggctcgactctacagagccgctggctgcgaggggttcgggcgccggctctgccgctggtcaccagcgcgacgggcattggcaccgtgatcatgcgactcacctcccggcatcgatccagcccgcgaggcgcgcacgcgcgagatcttccggcgtgtcgatatccaggcccagctccggcgcctga

SEQ ID NO: 529261 - DNA, 402 bp, Stenotrophomonas maltophilia
atgatcaccacccaccaggcccgccagctgattgccgctgccgaacgccatgccttccagctgggcgttccggtcaacatcgcggtgctcgatgccggcgcccacctcaaggatttcacccgccaggacggcgccgtcctgggctccatcgatattgccatcagcaaggcccgcacctcggtgctgttccagatccccagcgaatcggtgtgggactacgccaagcccggcgcccctgcccccggactcgaaaacagcaatggcggcctggcggtcttccccggtggcctgccgctgttcgacgccgacggtgcgctgctgggtgccgtgggcgtgtccgggggcgcccccagccaggaccatgagattgcccaggccggcctggccgcgcttccgttctga

SEQ ID NO: 529262 - DNA, 828 bp, Stenotrophomonas maltophilia
atgcacgctgagaagacctcccggaccatcctcatcactggtgctgccggtggcttcggcaaaggcgctgccattggtatggcgcgcaatggccatacgatcatcgcaaccgtgcatgtgtcatcgcaggtcaccccgctgcgggaggaagtggcccggcttgggctggccgatcgcatccgcgtggaacgcctggatcttaaggatgcctatgacatcaagcaggcactgagctgggatttcgacatcctgtggaacaacgccggcatgggcgaagcgggcccggtctgggaaatcccgctcgacctggtgcgcaacaacttcgaagtcaacgtgttcctgccgctgcagctgacccagggcgtgctgcgcaagtggatttccgagggcagggccgacggcaggaagatcgtgttcacctcatcgatggggggcctgttcacgcctgccaactgggggacctacgtgtcgaccaagcatgcgctcgagtccattgccgaggccctgcagcaggagctggccggctatggggtgaaggtgcagaccatcaatccgggggcctactacaccggctacaacgaaaccatggccgacaatcccttccgttggctggatgaaacgattcacttcacccggcgcgccgatctgcgccagggcttcgacgacttctttgccacccccgaaggaaagatggacgctcaggagatgatcgatcgcatggtcgccatcgttccggccgatgaagggaagttccgcaacgtggtgccgaaagccatcgaagacatgctcaagacgcaccagctcgcggcctgggacaacaccctctga

SEQ ID NO: 529263 - DNA, 507 bp, Stenotrophomonas maltophilia
atgaagaacatcctgcttcgcccgttgcgggcccgattcgctgccccgctgctggcgctggccgcggcgatggcactgccaccgccagcatcggcacaacagccatcggtggaggtcgaggccatccgcaaggccttcgacgcatgggcacaggggaccggtggcccctatgacctgttggccgacgacgcggtctggaccattaccggcaactcgctggcctcgcgtacctatcccagccgagaggcattcatgacggaggtcatccgccccttcaacgcacgcatgagcacggggctgaagccaaccatccacaggctctaccaggatggcgacaccgtgatcgtgttcttcgacgccagcggcaccgcgcgtgatggccagccctacaacaatacctacgcctggttcctgcagatgaaagcaggccgcatcatccgcgcccatgccttctatgacgccattgcgttcaacgcgctgtggacgcgtgtacagcccggggcgtga

SEQ ID NO: 529264 - DNA, 840 bp, Stenotrophomonas maltophilia
atgagaacctggctgattaccggtgcatcccggggcttcggcgcgaggattgcagggttggcgctggagcgcggcgagaacgtggtggccaccgcgcgcacgccggagtcgatcgttgaacagttcggccggcgcagcaacctgctggcggtggcgctggatgtcaccgatccccagcaggccgaggcggccgtcgccgccgctgtttcgcgcttcggacagatcgatgtactgctgaacaatgcaggctacggcctcgtcggcgccgttgaggaggtcagcggtgaagaggttgagcggctgtaccggaccaatgtcttcgggctgctcaacgtgacccgcgcggtgctgccggtcatgcgtgcagcccgatcgggacggatcatcaacatctcttcgatcggtggctaccgggcagcagccggtttcggcgtgtactgctcgacgaaattcgctgtggaagggctctcggaggcgatgcatgccgagctcgcaccgctgggcatccatgtcacggtggtcgagccaggctacttccgtaccgactttctcgacgcgagttcacttgccgtcagtccaacatcgattgccgactacaatgcgaccgcaggccctgtccgcagccgggccgcgggcctgaatcatgcccagcccggcgatccggagcgcctggcgcaggtgctggttgatctcgccaatgccgccgatccgccggttcgcctgccccttggcagtgacacggttgccgcgatccaggccaagcatgcggccgacggcgcgatcctgcagcaatggcactcggtttcggtgtcaaccgactttccgcatgcggatcggtga

SEQ ID NO: 529265 - DNA, 903 bp, Stenotrophomonas maltophilia
atgccgacgatgggtgaaaccaccaacctccgggttcccgctccgctcgccctggccgggctgataggcagtgcacctccggtcggcacgacggaactgaaggacgcgaccagcctgacccgcccctggcagcatggggcgctgcatgatccgctggggcccatggaagggcacgtcatcatcacgtattacggcgaaccgcaggacatcctctggcagaccggcggtgagcggcttcaatcgaccacccgaagcggctcgatcaccatcattccgcagggtcacgacggtgtgtgggacattgccgggccgatcggcgtctcgcatgtattcctgtccgaccagcgcctgcgcagcagcgcggagcgtctcggctgccaggttgggcttgagctgttgccccgggtcggcttcgacgacccggtggcgtcgcgggtcatggagatgctgggtcgtgagtcccatgtggccgccccctcgtcccggctgttcgtcgagcaggccactgatctcctggtgacgcagcttctgcgtgcacacgtggatggcctggctttcgaagggcatcaggtgcggcgtggcctggcgcaatggcaggtcaggaaggtgaccgggtacatgcgcgatcggctcggcgcccccatcgggctggatgaccttgccgccgttgccgggttgagccgcttccacttctgcactgcattccggcaggcaaccggcaccacaccgcacgaatggctggtacgactccgtatcgagaaagcacgccagttgctggcagaccctaccttttccatcaccgatatcggactggcggtaggctacgagacgccttcatccttttccgccgccttccgcagagtggttggagcaacacccactgcattccgccgcgccttgtag

SEQ ID NO: 529266 - DNA, 423 bp, Stenotrophomonas maltophilia
atgtccacttacgccgcaatgactcgtgcctcgtcctccaaccgcctgcagggcgcgatcgagctgctcggccgcctcctgctggtcgccctgttcctgatgtcgggtctgggcaagctcagcgcctatgaagccaccgccgggtacatggcctcggttggtgtccccgccctcatgctgccgctggtaatcctggtggagatcgctggagcgctggcgatcgtcgccggctggcaggcccggatcgttgccatcgtgctggccggcttcagccttgctaccgccgtcctgttccacaacaacttcgctgaccagacgcagatgatcatgttcctcaagaatgtatccatcaccggcgcattcctgatgctggccgccaatggtgcggggcggttcagcctggatgctcgcagggcccgataa

SEQ ID NO: 529267 - DNA, 1266 bp, Stenotrophomonas maltophilia
atgttctttgagaagccgcctcgtgcttcaacggccactggccactcatcgcccgggtggtgccagcggggcctgaggtcgctgctggcgtcagtactgcccggctgcgccagcgcaacccgcagcggcgcactgccgcaggcctacgctgatgcagcgacgccggccggcatcgagaacgcgcgctactggcttgacaccgatatcgagccattcgtgcgcagtgcgctcaacgacctgcatcgcgcaggcgtacgcgtcggcgatgacaccagtcacctcgatccggtccaggtgctcgcaatttcgggaggtggcgagaacggcgcatttgccgccggcctgctcagcggatggaccgcgcatggcgaccgtccgcagttccgggtggtgaccggcatcagtgcgggcgctctcatcgcgcctttcgcatttctcggcccgagccatgacggcgcgctgcgcgaggccacactggcattcggccggcaggggatcttccgttcgcgcgggatcttcggcctcgccagcgatggcttcgccgacaaccgccctgccctgcgcttcgtggcccgctacgtgacgccgcagatgctgcaggccatcgccacggagtaccggaaaggccgggcgctgatgatcggcaccaccgagctggactccgggcgcgcggccacctggaacatgggagccatcgccgccagtggctcgccgcaggcgctgcgcttgttccgccaggtcatggtggcttcggccagcatccccggggcggtctcgccggtaatgatcgatgtccacgctgccgggcaccgcttccaggaaatgcacgtcgacggcggtgtcagcacccaggtcttcgcctacccgacggccatgcaggccgtaatgcagcgcctcggccaaggcccctatcgcggccgcgtgcaactctatgtggtgctgaacgggcgggtgacacccgattggacggcaacgccacggcagtctctggccatcggcgggcgggccctgcgcatcctgctgcaacggcaggcgatcaatgatctggagcgcatctaccggaccgcgcatcaggacggtgccgactacaacctggcctacatcggtccggagttccactatcccaggcacaagcgcttcgatgaaggctacatgcacgacctgttcgaccatggctaccgctcggcaacgcagggtgacccgtggcagaagtgccccgagggatggacggttcaacctcacactgtctcgcaggcgctgttgtaa

SEQ ID NO: 529268 - DNA, 918 bp, Stenotrophomonas maltophilia
gtgaatcaacagcagcaaatccaaacgagcacacttgtcgcgaatgatgagctggttccctcccgctacgcggtgcaggtcgggaacatcgaagccatcgtgattagtgacggagtcctctcccctccatccgagtccatgtcgaccaacgcgtcaccggaagacagaaacgcgtggctggacggcatgtttcttgatcatgacgtgtttgattgggcactgaacaccctggtgatccgcagtggaagtcagaccatcctggtcgataccggaatcgggctgcaggtgccggacttcacccgtgccggtcgattcggccagcggctgcaggccgccgggatcgacctgggtgcagtcaccgacgtcgtactgacgcacatgcatttcgaccatgttggcggcctgctcatcgatggggtgaaggaacggctgcgccccgacctgaagatccatgcctcctcggcggaggctgcgttctggaaagatcccgatttctcacgtacgggcatgcccccggaactggcacagatcgcgcgggatgcctcgcggcagttcctggatgtgtacggcggaatgctgcagctgttcgaccaagaagcgaccattgcaccgggtgtaaccgcgacacggaccggcggccacacgcctgggcacagcgtggtgcgcttgcagtccaacggcgagcgcctcatgtttgccggcgatgccatcttcccggtgtccttcgatcatccggaatggcacaacggctttgaacacgaccccgaagaggcaacgcgcgtcaggctcaagctgctgagggaactggtcgacaccaagggatggctcaccgccacgcacatgcccttcccttcggtcgggcgagtggctgcagcgggcgacctgttccgctgggtgccggcatggtgggattactag

SEQ ID NO: 529269 - DNA, 498 bp, Stenotrophomonas maltophilia
atgactgacttgattccgcccccgaccagcatgctcgaccgctacaagggtgatgaacaatccccgctttacaccgggcgcgtccgggtatcagggggggaggcacagcacggtcgggcgtccggcgaagtgcgctcttccgacggcgcactgcagctggacctccggctgccgcccgaactcggcggcccgggcggcggaaccaacccggagcagctgctggcggcgggctacgccggctgcttccacggcgccatggtcctgctggccaagcgagcgggcatgcaactgcgcgatccggtcgttgaggcggcggtgacctttgcacgcgacccggtggatggcttctacatgctgaccgcagaaatcaccgtctacctgcagggcatggatccgatcctggccggtgagctggtgcgtaacaccgagcgcgtctgtccctacgccaagatgttccacggcggcatcgtgcacgtggtccgtgtgcaggtcgactga

SEQ ID NO: 529270 - DNA, 768 bp, Stenotrophomonas maltophilia
atgaagatcgtggtcattggaggcacaggaagaattggtcgcatggtggtggaacggcttgccgagcagggccaccaggttgttgccgcggccccatcgacgggagtggacgtgctcaccggcaagggcctggctgctgccatgtcccgggctgatgtcgtcgtcgacctgagcaattcgccctcgttcgaggaccaggaggtgctttcattcttccagacggccggccacaacctgctggcattggcgagagagcagcgcgtccggcaccacgtggtgctttccgtggtcggcacggacaggttgagttcgagcggttacttcaggggcaagattgcccaggagcgtctggtgagggagtccggcgttccctacacgatcatccactcgacccagttcttcgagttcatccccagcatcgtgcaatctgccggcgacgagcagggcatccggctaccgatggcattggttcagcccatcgcgagcgaggatgttgccgaggccgtggcacgcatcgcgctgcaggcgcctgcctttggcctggtcgagattgccggtcctgaccgcacgccgctgttgaaactggtacagcgcttcctgagggccacgggtgacacgcgccacgtggccgaggacagccaggcccgctactttggcgctcggctggccgaggacacgctcgtgccagtgggacgtgcctggttggggaagcgcgctttcgaatcctggctggcaacgcgaggacaggtgcatgcatcatcggcctga

SEQ ID NO: 529271 - DNA, 1035 bp, Stenotrophomonas maltophilia
atgaccgcacccatgccgcaaccttcgaaccgtgacgggcgggattcgctcggcacctcattctccaccagctatgcaggcgtactcgccttcatcgcagttgccgaagaggggagctttggtagagcgggcgatcggctgggcatcggccggtctgcggtgagccgcgcggtgcagaagcttgagtcgcaactgggggttcgcctgttcctgcgcactacccgcgagaccacactgacgcgcgaaggcgagctgttcttcgaaggctgcagccctggggtcgcgagcattgttcgcgcgttggatggcatgcgcgaccttcacgacggtcctccgcgcggtcacctgcgggtcagcgcatcgcatgggtttggccggaggattgtcgcgccactgctgtccgcattccgtaccgagtatccggacgtttcgctggagctggtactggaagacggtattcccaacctggtcggagaccgggtcgatgttgcattccgcgatggctcgctggaggacagtcacgtcgttgccaagcaccttgtcccgatgcagcggattgtctgtgcttcgcggcagtaccagcatgccaatggcattccgctgaccgtagaagaactggccgaccatgcatgcatcgggatgcgcacggccgatgcccgtctgcaacgatgggagttccgtgccgctggacggtcgttgatgaccattcctcagaccacgctggtcttcgatgaccccgagctgatattccgggcggtgctggaagggcacggcatcgcccagctgccgagctaccaggtgggcgatgcgctgcgcgacgggaccctggtcacctgcctggatggcttcgcgcccctggaccaggggcactatctctgctacctgagcaggcaccagctgccgaagcgtattcgcgccttcgtggacttcagcacgcggtacgtcagggagctcgacctggacgtcatctcgcactggcaggcggcccaatcagcccatgcctccggcgcatcattggccacggcgatgtcgtga

SEQ ID NO: 529272 - DNA, 354 bp, Stenotrophomonas maltophilia
atgccgggcggcagcctgccggtaggcaccggcaaggacgcagcctgttgcccaacgcccaacaatcacgtgtcacagccctggtcggccgtccgtcttaccggcatgggcaacccatcctcacgacaatccccatcccagcctgccagcgagcgcgtgtggcagcacttcctggatctggtcggcaccctcccacccgatgccagagcgttgctgctgaacgacgctctcggcctgcagatcgaggacatcgcaccgctgcttcatctcagccacgcggaatgccgacaccgcctggagttcgcacgaacctgtctgaatgcgcaccctgaacccacggagcccgaccgctga

SEQ ID NO: 529273 - DNA, 480 bp, Stenotrophomonas maltophilia
atgacccagcgactcgactatgcaaagcaggctcccgaccttttcaagaagctgggtgcgctgtcccaggccgccggcgaggcttcgatcgagccgacgatccacgatctggtgaacatcagggcctcccagctcaatggctgcgccttctgtctggacatgcatgtgaaggaggcaacgctgcgcggcgaacggcctctgcggctccatcaccttgcggcctggcgggagtcgaacctgttcgatgcgagggagcaggcctgcctggaatggaccgaggccctgacccggctgccgatggagggcgtgtccgacagcctctatcagcgcacgcgggagcagctttcggaaaaggaaatcgtggacctcacctatctggtgatggccatcaatgcctggaaccgggcgaacgtcgcgttccggacgacgcttggggcgttcgacaaagcattcggcctggacaaggccggcctgtcctga

SEQ ID NO: 529274 - DNA, 405 bp, Stenotrophomonas maltophilia
atgcgaaccgttcttgtatccgtcctgcttgcactcctgcccttggcaggtgcagccgccggcccggccgccgcgcccggcccgatcgtccgcgaggtgctgacccagccgctgcctgactacccaggcaaggaggcgctgctgttgaccgtggagttcccgcccggtggcgtggacccggtgcatcgccatgatgcccatgcggtcgtgtatgtgctggagggcagcatcgtcatgggggtcgctggcggccccgaggtcacactgggaccgggagagaccttccacgaagggccggacgatctgcataccgtgggccgcaatgccagtacgaccaagcgcgccaggttcatcgtgttcatgctcaaggacatcggcaagcccgccgtgctgccaccgcactga

SEQ ID NO: 529275 - DNA, 888 bp, Stenotrophomonas maltophilia
atggaagacccaaccgctctgttcatgcacctgcgcccccgcctgctcggcatcgcttaccgcatgctgggttcggcggcagaggccgaagatgtcgtccaagaggtctggttgcgctggcatggcgctgatcgagggcagatcgcgtgccccgaagcatggctggtcaccactacagtacgacgcgccgtggatgagttgcgcctggtccgccacgcgcgcgagcattacgttggcatgtggttgccagagcctatcctcaccgagggtcctgctacgcccgaagccgtgctggagatcgccagcgatctttccgtcgcgttcctcagtgtgctggaacggctggcgccggacgcccgcgcggcattcctgctgcacgacatcttcgaccagaactacgcccaggtcgccgtgacgctggagaagtccgaggcggcgtgccggcagatcatccatcgtgcccggcagcagctgcgcttggagcgcaggcgctaccgagttcccgaggacgtccatcggcggttgatgcagcagttcgccgaggctgcgatctccggggatctcgaacagatgaaggcgctgatggatgactcggcgattctgcttggggacggtggaggcgtcgttccgtccttcccccgccctctcgtgggtggcgaccggatcgcacggctgttctacgccccgcaccttcgggacgcccatcggatgcgcatcgaaccgcgttttttcaatggccgcctgggcctgctccgctacttcgatggcctgctggagtcagccatggcctttgacaccgacggcagccggatcgtggaagtcctggtgcaacgcaaccccgccaagctcgcccgcatcatggacaacgccattgctcgcatccgctag

SEQ ID NO: 529276 - DNA, 963 bp, Stenotrophomonas maltophilia
atggcagttgcaacggctatggagcgcgattcaaccaggtggcggacctgccatgtgcttgcgcttcccatgctctacgcgggggcggtggtggggctgtacgttggcaccgaacagcagtggatccgcatgccctgggacgtggtggccacgattgcgctgacacttgcgattgttcttggtttcaggctccaccgcgcgcatgcacgttcaacggaagcgcgtcgccacgtagagtccattctcgtagccagccgcagctggctcctgctggcccggaacagatcacaccccatggatccaggcgatacgctggggcagcgccaccttgcctggctggctgcgttgcggtatgaacgccggaagcgggactgcatgggcgggcgcacattgccggcgctgcccgaaggacccggcaggctcttcctgcagagggagtggcggcgtctcgaacagaagctcgctgcctacgtcggcccgagggagcgcgagaggattcttgcttcgtccttgccttcgcgggaagtgttgacgctgcagtgcgagtcgttgggtgctctcctgggccaggatgccatctccccctccgcgttcctgcagctgcatcggcttctgcatgagcttcagcgcctgcaggtggaggaggaacgcgtgcggccacgcatgcatcctgcagtgtccagggcggaggcaccactgcttctggcgctgatcctgctgatgccgtttggcctgatcgatgccatggggccactggtgctgttcgacgaccaccccatccgcgcgatcgcctgctgggcaatcgtgcctatctccacaggcgtggtctggctctatgtggcgcttgccgctgcaaccaagggtgaactggaactcgttggccaaggaccggcagggaagtccggcgactcatctctcgtgcgcatcgagcaggaactggctgatggggacaggcatgcatga

SEQ ID NO: 529277 - DNA, 921 bp, Stenotrophomonas maltophilia
atgtccagcctgcaagaagcaactgtcgtgaccagctgtcctgtcgaggaactggttccctcgcgctatgcactgaaagtcggagagatcgatgtccttgtgatcagcgacggtgtcctgcctctgcccacgcagatgctcggccacaacgtatcagcaccggaacgctcggagtggctcgatgagatgtacctgccccatgatgtgttcgagtgggcactcaatgtcatggtcgttcgcagcggcggcaggaccatcctcatcgacgcaggcctgggcatggatcccgagctgcagcttccgcgtgcaggccagctgatcaggcgccttgatgccgcaggaatcgatcttgggtcggtgaccgatgtgatcatcacgcacatgcacatggatcatatcggtggactgctggtggagggcgtcaaggagcgccttcgccccgatctcaggatccatgtggctgcggcggaggtagccttctggaaagcacccgatttctccaggaccagcatgccgaacggcttcccggacgcgctgcgagccaccgccacgcacttctggaacgaatacaggcagtacatccgcacgtttgatgaaacggtcgacgtggcgccgggcgtggttgcacatcgaaccggcgggcacacccccggacattgcgtggtccggctgtcttcaaaaggcgaagcgttgacgttcgcaggcgatgcggtgttcgccgtggggttcgagaagccgaactggttcaacggtttcgagcacgacccggaggagtcggcgcgggtgcgggtgaaactgctgactgacctggccgataccggcgagctgctggtcgcaacgcatctaccgttcccttccgttggccgggtatcggccgcgggcgataccttcgattgggtgccggtgttctggagcttctag

SEQ ID NO: 529278 - DNA, 1773 bp, Stenotrophomonas maltophilia
atgaccatcaaatctcaaatcgtgctgttgctggcgctgctgctttgcggatgcaccacgttggctgcgtcgggcgagcccggcccaagggcgggcagctgtagcgggcaggcttcgtgccagccgttgccccgcttgcgggcacctgcgggagtttcgcgcgcggtgccttccccttccacatcccgccaggcacgccagtggcttgactgcgcgacctcgtcgtacgcggcaatggcggctgatgaaagtcctccgtcgcacatcgttgatggctgggcggagtgcagcaaccggttcctgtcacatgcgctgaccagacgttcgtcctggcaggcgggtcgacaccggatcctcggtatcgatctcgatgtggagtttcgcggcctgtccagcaacctgcagcgcccccttcgcatcgtgcgggcttcgaaggtggcgatcggcaacaacgcaggaaggcgaggaaaagtcgagggatttggtgttccactcgtcgtctggtcgcaccgttgtgctggccgccccgaatgcagcctgtttccgcccgaaggcattgcccgggcggcgaccggatggatcgagaccaatcagcacgggaaccccatattgatcattgccggaccggccaccccttccccgcgcggtgtttccgggaagcctgccatcgacagcgctgcgccctatgcctggctggcgaagacgtcatccctgggccgcctgggggtgtggggaatgcttggcggaaaggcactggggcgccgcgccgggctctatctcctggaggactacgatccaggcaagcgccccgtcgtgatgatccacgggctcggcagcaatcccttgatctgggcgaggctgtccagtgcgatctgggccgatccggagcttagccgcagataccaggtctggcacatggtctaccagaccaatgccccgcaactgaccgcccgctatcgcgcgcagaactatctggactcagtgctcgacgtgctcgatccggaaggtgatgaccccgcgcgcagaggaatggtactcatcggccacagcatggggggcgtggtcgcgcgcctgttgtgtgcggacgccacgccagcgctgtgggactcagcgttcaccgtcgcgccggaagcgctgaagggtacggaaagcgatctcaaggtgattcgcgatacgttccggttccagcacttcccaggggttaccagggcgatattcctggccagtccgcaccacggcagccctgcagcggatggctggatcggaaagctcgttgcacacctcgtccgcggacggccggcagagctggatgcactgagaaggatcgcagctgatcaacccgaggcgatccgcagcgaactgcgggacagcatcttcaaattccggatcaacagcattgccacgctgagggtagcccaccccgttcgcgtagccagccaatcgttgatgccggtgccatccatcgcattcaacacgatcgcggggcgcaggcacggctctgatccgcccggcgacggtgtcgttccactgcaaagcgcgcttctggacggggctgagaccaccaccatcctggacgccaaccactacgtgtacgacaacccggcagcgatcgcccaggtcctggcaatcctgcggcaggacgctgcaccgcagacgaagttggatggcgaaggcagtttccgcgggatcccgtcagcgcttgccgaacgcacgcatgaatgtggaaacggcctgggccgcccactggtcgatctgcgcatccgacggtgttga

SEQ ID NO: 529279 - DNA, 663 bp, Stenotrophomonas maltophilia
atggaacgcatcccctctgcgccccgtggcgccactgatgtcaccgcacttgccaccaggacgttgccggcgaaggcgcaggtcgtgctgcaggcagcgcgtggcgtattcctggcgaatggattcagtgccgcaaccaccgacatgatccagagggaagcgggtgtctccaaggcaacggtctatgcgcacttccccaacaaggaggctttgttctgtgccgtgatagaggccgagtgcgccgcgttcacccagaccatcagggagatccagttcgatcgtggccgcctgcgggaaattctctcggacatggcccgcgcctatctggcaatcgtgctttcgccggccggcctggcgatgttccgcgctgtggtgggagaagcgcaccgctttccccatctggcccgcacgctctacctcgctggccccaagaccgtgaccgatctggtggcagcccagctgagccaggccgccggtgaaggagagcttgagttgggtgacatcgggtctcatgcagccgccagccatttcgtgaacctcgttcgcggggagggacaactcgagtgcttgctgcaccccgactcaacaccgtcggatgcgcagatcgaccagtgggcggcccaggccgtttccacattcatgcgtgcgttcggcaagcgctga

SEQ ID NO: 529280 - DNA, 1515 bp, Stenotrophomonas maltophilia
atggcataccgaaccgcaacttcaaaacgtctgggccgattgcctgccctgctcctgttggcgtcggccagcggctgtacgctgggtcccgacttcgtcaggccggacgatggccttgccaccgtccagctcagcgcccgcggcgactacgacaccgatgggcgcacgacgtccgagtcaacgccggtgcgatggtgggacctgttcaatgacccggtcctcaccagcctgcaggccgacgcgcaagccaccaacctggacctgcttctcgccgccgagcgcatccaggaaagccgcgcgcaactggggatcgcatcctccgatcttctccccagcgtcggggcgtcggcggcctacgcgcgggaggcgaacagcgcgaacggcaagttcgccgcactgggggcgcccaccagtgcatctgacttctggcaaacgggcctggacgccagttgggagatcgatctctggggacgcgcccgccgcgcccgtgaaggggcggaggccaccctggaagcgtccatctatgggcgggaggtcgcaagggcggcgctggccgcagaagtggcccggaactacctgatgctcaggggaacccagtcgcagctcgatgtcacacggcagaaccttgaggtcgccgacagatctctgtcgatcgccgaaaaccgacaacgcaatggggtcgggactgcgttcgagaccgcctccgcccgcgcccagcttgctaccaccagatcgctggtgcctgagctgacccagcgtcgcaacgcgctggtcaatgcgctggcgctgctgctcggccaggagcctcgtgcactggatgccaggctcatgatggcaatgccgttgccggtgctcccctcgaacatcccggtgggcgttccgtcggaactcgcccgccgtcgcccggatattcgacgggccgaggcgcaactgcacgctgcaacggcggccattggcgtggcaaaggccgatttctacccgcgtatcgggcttcgcggcaggatcggcgtggaagcgttcgaaggccgtgatctcggcagttgggattcgcggacgttctcggttggccccaccgtctatctgcccattttccagggcgggcgcctcaagcagcggctggcgctcaatgaatcccggcagcgcagtgcggccatttcgtaccggcagacggtcctcagtgcatggcacgaagtggacgacgcgctggatggctggagtgcgcagcgcgcccaccacgaggatgcggaggtagcctatgaagagaacctgctggcattgcacgcggcagagcgtggctacagggaaggcgccaccgactatctcagtgtgctgacagcccagcggggactgctggcgagccaatcggcgctcaacaccagtgcaacgaactctgctctcgcggtggtccgcctgttcaagtcactcggcggcggatgggacagtacggcgtttgcccgagcagatgaagcaggcggacgcccggcacgcggccacgaaggcgggagcgggccatga

SEQ ID NO: 529281 - DNA, 1035 bp, Stenotrophomonas maltophilia
atgacaatgcctaccaaaaccaaacttgtcgccgtatcgctcgcagcggccgccattctcatcgccattgcctacctcaatcgtgacgaggccagtgcatccacccaaagtaccgacgatgcttacgtccaggcggacttcaccgtcgtgtcgccacaggtctccggcatcatcaacaacgtgctggtcgatgagaaccagaaggtccgcgcaggggagttgctggcgaccatcgatgacagggacttccaggttgcggtcagcgcggcggcagcagaagtgaaggcggcggaggcaaccgtggccggcctgtccgagagaatccagcaacaggactccttgatacgccagtcaaaagccgcgatcgcgtcggattcggccgaggtcgtgctcgcgcaggccaaccagcgccgctatcgcaatcttgctgccgatggctccgggtcgatacaggcacggcagcaggcagaggcttcgctggccgtgcgcatggccgggcgcgagaggaaccgcgcgggacttgatgccgcccttcaacagaccgagatcctgaagtccgaccttcagaagtccgaggccgctctggcaaaggcaaaggcagccctggatgctgcaaatctggcactttcctataccaggatcagatctccaatcgatggcgtggtcggccagcgatccgtacgactcggggcacacgtgagcgtgggaaagccgttgcttgccgttgtccctctcgatgaggtctacattgcggccaacttccgcgaaacgcagcttgcccgggttcgtgttgggcagaacgttgcaatcaccatcgatgccctgccaggggtcaggctcaatggcagtgtggagagcctgggaccagccagcggcgtgagctactccccggttgccccgcacaatgcaacgggcaacttcaccaagatcgtccagcgcctgccggtccgcatccgcatagagcccggccagaaggaggcgggcggcctgcgtgtcgggatgtcggtcacccctcggatcgcgatcagtgagtag

SEQ ID NO: 529282 - DNA, 1203 bp, Stenotrophomonas maltophilia
atgagcaccatcgctttcatcaacatcggcatgcacggatacatcaacccgacgcttccgctggtgtccgagctggtgcgccgtggccacagggtgacctatcacacctcgcctgcgtttgccgacaggatcgaggcgaccggcgcacaagtcctgctctatgtgggaagcgaccttgccgtgcccgatccgcccatcccgctggcgatgatgaaagggctgggctgtacggccgttgcactgcttcctggcgtcctcgccgacctccgtgccgtgtcaccggatctggtggtgcacggggccgcgtgcccttggggctgtgtggcggctcggcaacttggtgtgccagcagcggccacattcaccacattcgccttcaatgcccacactgccagcccaaccggtctctcatggcagctgatgaaggctgcggttcactatccgcgcgtggcgatgcagtacctgcaggcgcgctggaagcttcagcgtagctatcacgccgacatgctgcccgtgctggacatgatgaacgtgcgcggagagctgaaccttgttttcaccacgccagatttccagccgggcggtgcgcagttcaatgactcctaccggttcgtcggtgcctgcaccggctcccggcccgtggacgtggggttcgatgcgctcgtccacgaaccgccgttgatctatgtgtccctcggaaccgtgttcgatgctggcacttcgcttctgcacacgctcgcggaggccttgtcaccactggcaggcaccgtagtcctggcagcaggacagaccgatcctggcgctctcgggccggtggcacagaacgtgatcgtccgcagatcggtgccccagctccaggtactgaagcaggccgcactctttgtcacccatggcggcatgaacagcgtcaatgaggccatggccgcgggcgttcctgtgctggtgatcccacaaggcgccgatcagcccatggtcgcgcggcgcgtctgcgacctcggcgcaggattggcgttgcgcaaggaagaggcagatgccgcgaccgtgcagcgacttgcacgggaactgcttggcgattcccgcttcaaggcggctgcgggcgcgcaacgcacctcccatctgctggcgggaggcgcggcgcgggccgcagatgagatcgaaaccctgctctcccgacgcactcctcggccggcagaggagtggtag

SEQ ID NO: 529283 - DNA, 513 bp, Stenotrophomonas maltophilia
atgcaatgggacgttgctctgctgctggcacttgccgggatctccgcgagtacaggacgggtgctgcccttgctggcacgccgaaacgcactaacgcttagactcctggtggccttgatgctgaccggcgcgctggtggaagcggcggtttttgccctttggccattgatggcctgggtggtagcggacctggcccagccgttcattgcaccaggggttcccgcactgccctccagcattggattcacatggaccccctcgctcatcctgcccctgctactggccgccatactggccttccctcttcttggccacctcctgcacgcgctggtgctgattgtcgccggcgccaggatgatcacgcccttggcgtcggcgtcggggcttggctggtgggacgccgcactatgcatggccatggcagtcatatggctggagctgattgttgagcttctgcgtcgcggaattgcgcgcgccgcggcgggcacccgaagcttgggagcaaccgcatga

SEQ ID NO: 529284 - DNA, 945 bp, Stenotrophomonas maltophilia
atgagtgagtacctgcttctgtctgcgctgctgctgctcggccccctcctgctggccgaaggcctgctcgcccgctatgagcttcttgccttctccgtcggcttgaaggcgcctgcgctgtgcctgccggccggcatgccctacgccaggggagccgctgccgatgcccctcctgcggcgtacctggtctatctcgacggcattggaaagcgccgcttcacggacacgcgtgatggcggaaagctggtaagcgcaatcctccggattgcgccggaactgagggttctcagccagatccagccctattcccccttggcactaccgctcacagggcgccctgtctgggattggctgcgccgtcgtgtgggcatcaccctcttcctgcacaacgtaatgcagacttttgttgcagccgaccgccgctatcggccgctgtacaaccaggcggtcggcctgcagattgccgcacacctgaagctcgccggttacggcccgggaagcggggtgcccattgttctgcttggttacagcggtggtgcacaggccgccacaggcgcgctcgaagtgctgtcgcagcaacttcgggcgccattggaagtgatcacgctcggaggctttcacagcggcgcgaacgatctgtccccggccaatcatctgtactgcctgaccagtgctcaggattggatcgagaaactgggaacccgaatctttccccaccgctggccactgttgtggcggagcccatggaatcgcgccatctgctcaggaaaggtcaccgtacactcattggagccagcaacgcatgtgggcccgcagagttacatcagcccgaccgcctatctgggcgacggacggagccacctctgccggacaaccgatgcggtgatcgacatcgtccggcgcatctgcgccagagcggcaacggcacccacgaggcctgggtag

SEQ ID NO: 529285 - DNA, 390 bp, Stenotrophomonas maltophilia
gtgtccattgaagcacaccgtccgccgcttccaccgttcacccgtgaatcggccatcgagaaagtgcgccttgccgaggatggctggaactcccgcgatgccgacaaagtctcgctggcctattcgctggacaccgagtggcgcaaccgtgccgagttcacccatggccgcgaggaagcccggcgctacgcctatgagtggcatgacgactccggcaactggttccgctcctatggaaacgagaactgggaattcggcgccgatggcctgatgcagcgccgcttttcgtgcatcaacgacatgccgatcaaggaaagtgatcgcaggttccactggccgctggggcgtcgccccgatgatcacccggggctgtctgacctggggatgtga

SEQ ID NO: 529286 - DNA, 1332 bp, Stenotrophomonas maltophilia; identical to SEQ ID NO: 515206

SEQ ID NO: 529287 - DNA, 672 bp, Stenotrophomonas maltophilia
atgtccaatgttgatcaagtctcgtactacaaggttttcaactatcgagacggcactaacaactatccgctcgggatgttcattgataacaacaacgagaacaactgcacgtcttccgtctggtgcgatccaagccatcccagccagatccagcataggtgggggcaactagcatcgggggccgccatcgagatctacccctacgatgactcgggctcctacaacccagcacgaagccagtacgggggcgtcagaattgaagtgaacgatttcaatagatcggcgaactccggccgctatagcccagcagttggcgacatacgcctccctaagcaaggagacgcgggcactggaaaactcaacggctttgtcaaacgagcaggcaagccggtcaacgtgggtgatgcgacgctggacttgttccagaacggctcaactctctcgacaagcaccggcgtacctgtctctggcttctcaagcgtctccgtcaactccgatggctactacaatcttggggtagtgccgagcggcagctaccacctcttcataaccgacaacgccacggggaagaaggtcgagttcctgcagattcttatttccaactcacacgagcgactggacttcgatctaacgtcaccatgcttcgggctcaccggctgcgttcctctataa

SEQ ID NO: 529288 - DNA, 291 bp, Stenotrophomonas maltophilia
gtggaagaattgccgaagcggaataagaagccccgccgcaaagacggcttcccttggaagagcaccattgccgtcgtggttatcgtcggcattgtcctggccgtgtttgaaatgggacgagtcgaacgcgagtaccgcgcccaagccaaccggcaggcccttgaagcaatgcacgctgtgcttcagcgggacgaattcgtggcccgcccggctgcggacacgatgccgggcagcgatacagagcataccgatcatgaagcggaagcagacttcgctgccgaagagaaatga

SEQ ID NO: 529289 - DNA, 174 bp, Stenotrophomonas maltophilia
atgggcgaggaaaagaaatactctcagcacgaaaaagagtttgctcgtgagatctacgcgagaggcgtggcagcgcggattggggctggcgaggcgcagttgaatgcggactacgccgtatatcaagcacttgaagctgctgaggcgttcttcagaatagtggacgaaaactag

SEQ ID NO: 529290 - DNA, 807 bp, Stenotrophomonas maltophilia
atgggtaataggatattccttagtcataattattatgacaagccggtggtcgagccgattgcaatgaaattggctgaaatatttgggcggaatgaagtcttttatgactcttggtcgattagtcctggtgaaggaattattgatcaaatgagtagagggctcgaagctccagagtttgtttttttctttgtatctgaaagaagtcttgcaagtggcatggtgaagctggagtggcaaaacgctttgtattcggcggcgaaaggtaatacacgagttgtgccgattagagtcgatggtagcgatatgcccgctgtgctaaggcaaatattgttcattgatatgttcacgataggggtcgatgcggcaatttcccagatcgttggggttattcagggtggtgtgtcatttgctcctgaacatcgtgaattctcgaatcttagtaattcgagaatcttgttagcggatggcataattgagatcactattgaagcatcccatttaatggagccaaatccaaattttgctttcccagtggtcaatgagcaacatcaagttgggtggtggatcaagggtcatcctgccatccatagtgagtttagaaagaaggcgtttgagatgagtgggggaggggtggctagtgcagtaataatgcgcccggttgtcggaagcctcgcccctaggcatccacttacttttcagtttcggcaattgaccgagagtgggttgaacatcattggagtactgcatgatcaaggagggaatatctggaagccggtccctcctaagtcgaatttagttaattcataa

SEQ ID NO: 529291 - DNA, 786 bp, Stenotrophomonas maltophilia
atgatcctcagcctgcttacgcaattatccaatcaatcaaaaccaccgagctccgtctgcataatcgacaactcccctccggacatcgccctgcagcgagcgccagaatggagcacctatccgtttgaggtcgacctgattcatcggccggagaacatagggtatgcggccgcctgcaatctgggcgcgcggggcgctgattgggattggcttgcactgctcaatcccgatatagaaatcccgtcccgagacctctttgagcgcctcatcagcgaatgcggccaccagcccgaacttgggtgtgcgggcgtatctcagaagaatccagactccgactatgagctggtagccaggcgattcccgtcgattcgcgcgattgtcggcaagcgtgttccgatcctgggcaggctgctgttcaagagcgaggtcgccacgtacatggactcgtatccgtgcacgtactcacctggttcacagccgatcgaagtagattggctgcagtcatcgttcttgctcacctccagatccagctgggaatcatgcggcggcctggacgaacggtactttgtattcatggctgatgttgactatgggctacgctgcaagcaagccggcctgaagtcgattctgttcagaagcatggaagttctggcagacggcgttcgctcaagtggaggcggattgatggatgtattccgcagaaagacaatcagaattcatctgatcgatgcgttcgtgtactttgtcttcaggggcagatacaagggcggaagaacagcctcctga

SEQ ID NO: 529292 - DNA, 1122 bp, Stenotrophomonas maltophilia
atgacccctcccaagccccctctccgcatcgcctactgccttcgaaatgacgccttcaccaaaggcggcggtgattcgggcaaggtcgagaagtacagcaggtcccttgtcgcaatggggcacgacccactgatcttcacttccgcgcgggaactgagacaggagaagggcaggatagatctcatccacatcttcaacacgcaaactccatacgagaatcacccgtactacgcacacgcgcgcgaaagaggtattccggtcgttttctctccgatccaccaccagaaagccttcatggaacagtacttccgcgagctctccccggtgggacggatgaattatcagatctacatgtacctcagctctgtcgccaagcagatccttgtcaaaaggaaacttccgaccgcagcgtggttgcacagccctgatggaatcaatcgaaagatcctgcgacttgccaaggtgatccttcccctttccgagtccgagaacaagcatatgaccgaagatctcggcatgaccgttccggacagccgagtcaagatcattcccaacgcacttacgttcaacgaaagcaagccgatcccacgcgagattgatgttgtcgtggttggccgcatcgagcctcggaagaacatgctgaaaatcgctgaagcacttgcagtcagcaactacagcgcgacattcattggaatgatgaactccaaccatgcggagtacggcaggaaatttgaagaagtaattaccaggtctccaaacctgtcgtatgcgggcaaactaaagcaggaggatctcgcggcctactaccgcaggtccaaggtttgcctgtcaaactcctggtttgaagtagtctcccaggttgacctggaggccgtcagcctcggctgcaagccagtaatctcgaaagcgtctgcgatccaggactatttcgacggggatgtcatctcactactgcccgactgttcgagccaggaaatcctgtcagccgtcgattccgcgatggcgcatgactatcacccaagactgaaagcatcacatacacgtgactggcctgcggtcacggccgacctggttgaagtctaccaacgcgtgagagacgaacgagtgggtattgcatcgtga

SEQ ID NO: 529293 - DNA, 1266 bp, Stenotrophomonas maltophilia
atgaagaagcgattgcaacctatcgtcgggtttctccgcaagaacttcagtattcttctcatctcggccctgaaggcattcggggccctgataaatgttgcgatcacttacctcgtggtccatcactcgacggctacggacgcagggatctttctatttgcgctcagcgcaattttcatctgctcctatgtagcacgactcggctctgacaactacatagtcagcaagctgtcgggccaatggacccaggacacgcgcaaggacgctgccacactgtacacaggctccctcgccttcagcatcgcctgtactgccatcatgggcgccggtgcatggcttgccattccgggcgtcagtgcgggcaacgccgtgatgacgtctgcatgcgttctcttcttttccattggtcagataaattcccgagtattgcaggcccaaggaaagctcaagagctccgcgttcctcatgggtgtcgccgcgccattgttcttcgtggcaatttacggagttgcatgcttggcgggcaaagcagactttgacggaacgcagctcatcgcaatctacgccgtagcctgtcttgcgtcatccgcaataggattccgcaaagacctgatatcgcgcatcagctggcgcgacgccactcgggccagccacgatgtgctgcccttttttcaaaccggattcattgcgatctgcattctctggggcggccagttctgggctggagccatccttcccatggcacagctctctgacattgcagccagccagcgactgtcaatgcccataaacctgctcctggttgcggccagcattgcactctcgccaaggctttcgcagcaccactcaaacggggatcttcctgcgatcaggaatctcatgttcgacgcaggatgggccatggttatattcggggccccagtcttcattgcaagcattctgttcttggaccctctggcagccgcgttccatgtagagaacaagtggttgatagcgatcttctgccttgcccagctggcgaatgcggcaaccggaaactcgatccagctactgaacatgacagggaatcagtcaaaggcaaagcggtccgttatcttcgggggaattgtattccttggcgggatgggagccgcgtcactagcccccagccaactgagtatctccctcgcaatcgctgctgcgctggttgcccagaatatcgccgccgtctacttttcatacaaaatattcaacattattccgctgtatcgcaaggatcgcagatga

SEQ ID NO: 529294 - DNA, 1308 bp, Stenotrophomonas maltophilia
atggaaacgctactcctaatcgccaacctggtgattacttggagggtactggcgctcaatggcgccagtccaaactccattgcgtcaatttacgtatccggctgccttctgtcactttacatcctgaccggccttgaactgagcaaggagatgctcttcttcacagccatgccgatcaacgattatgaggagaccgcactcagcgtgtatgcggtgtatacgctgatcaacctcatctcatatgcggtttctccgcgaaaacgagccgcagccggacgcgctgaacggagcgctgcggcatcagtgaaattggcgagccttcggatgccggtgtccatagaggcagccctgctcgccatcttcaccctcctctcggtggtgaacatcgcacatttcatgtcgatggattacagcaccctgctgagcaatgacctgtaccttaccgtcaagacgcccgaggcaataggaatccgaaacgacttgatggctgtttaccacaaattgatcagattcatcggcgcatccgcagtgatcgtactctgcgaatcgctttatcagcgccgccatgccgtcagcttggtaacggcactctacctggcttactgcattctcatcatggcaaccggcgcctcgcgatggatatgcgtctacgcagcactggcagccgggttcgtgctgatcaggaagccgcctggctacagagcgattgcgaccgcattgattgccgttaccttcttctgctttgtgttcgtgctgctcggccggtccagcggcgcctatggcctttcgcatctaggcacctacatggacgcattctctttcgagatgatgccgacctacatttctggcgttgcggtcaacgtcttcgaaggcgcattcaatctggccaactcactccagctcgacgcaacatttgacccctggtacgtcaggcactcattcctgcccctgttctcattcatggacggattcaatgagaatgtgccgcaatttgcgtggaagttcgcccccaacgttccaatgtcggcgatcagcgagacctacctgtttggcccttcattcttcatggcctatatcgccatgtacgccaccagccttcgcctgtcggtgatggtctatcagcgcagcgaagttccattcattctaaaaatggccctcatggccccgatgtactatgtggtgctcgcccagcacacatacagcctccggacaatcataaagccctcactgctgatcattgtggtgttcataatcgtgcttgtttctttcaaacgaaagaatagccaagacgagcctaaccacccatga

SEQ ID NO: 529295 - DNA, 1116 bp, Stenotrophomonas maltophilia
atgaccgacaagaagaaaattgttctagcaggaaggtgcgaccatgacaattatggcgactccctcatgttttccttctacgtaaaggcactgcaatcgagctattcagtttatctgctgaatgcaagcagcgaatttctggctcggatcagggaagatgggctgcatgcggacaacatgccccttgaacagctgaagtcagacccttcagtgaagggtgtcatgtttgtgggcggaggttacttcggagagcctgaaatcggaaaggcgaagtggagtgcaagtttcaccagtggctattttcccaaggtagccgccatgctggagcaggcatccgtaccctacgtcattcaaggtgtcgaggccggcccgatttcaagccaggaagtccgagcccacatccgtacgatcatgggcaacgccggtcaggtcatcgtgagaaacaacgcttccctggaattctgccgggagatcggcgtcgacagtccaagatttcttcctgacgttgtgcttgcaggcgcgaaggatttccattcctcccagaatttcgatcaagcaaacacggtcgaaggggagttcgacgtcgcaattcatgcgacaggccgtttattctcggccaatctccttgcccggatgaacctgacagccctggttcgcgaaatccgcaagaagaaactttcacgagtcgccatattcttcgaccagatggagaaccagacgaagttcctgccggcagccactgcgctcgcaagaagactggctggaatgggcctgagcggagaggttttcaattacaacgggcatgcgcatctattgaacctgatcaagcgatcaaggctcgtcataaccaccaaactgcacgcaggaatgacagccgtaagcttcggcaacaaggtcatgagcatatcctcagccccaaagatcaagagattctaccaagaggcaggactctcggcatatcactgcggctacttcctgaccctgcccggcaagaaggcgcgcgtcctgtctgagataatccgccacgagcccctgtcggttccggcggcactcatcaacggctcgcgccagaatctcaccgaagtcgaagagatcgaatggaaacgctactcctaa

SEQ ID NO: 529296 - DNA, 2226 bp, Stenotrophomonas maltophilia
atgacaaagcaaatggatccccgcgcacccaaggaagagggcattgaccttagggaatggcttggggtgcttgttgacaggaagtggctgattgcgggtacgactgcggcctttgcgcttgctggtgttgcctatgcacttctggcaactcctgtgtatcaggcccaggcgatgatacaagtcgagtccaaggttcccagcattccgggcatctcggatctcgcttcgcttggtggtggtgggagcacggctgctaccacggaagttgctctacttacttcgcggtcggtggttggcgctgcggtcgatcagcttcagcttgacatcaaggtccagaaccggcgattcccgttggttggtggtttcttcgccaggcgtttcaatgcatccggagaggagggtgttgctcctccgaaatttggtgcaagcagctacggctggggcggggagcagttggatatcctgcgtcttcgcgttcccccacgcttggtcaacaccgagctgagtcttgaggcgaccgatgacaagggcggatatgcgctcttcgatgcggacggcgctgagcttcttcgtggcagcgtagccaagccagcagaaggtggtggcgtgtcgatggaagttgcatcgctacgcagcaatgtcgggacgcgctttgttgtgaccaagttgcgccgccttgatgcggtgaacgatctgcaggattcgttgcgcgcggcggagaagggcaaggagtccggaattctgcagttgcggtatgaggatagcgatcctgtccgcgctgaggccatcgtccagaaggttgcagaagcatatgctcgccagaacgtcgatcgaagctcggccgaggcggcatcccagcttgagttcgtccgcgaccagttgcctgcggtgcgccgcgaggtcgagcaggcccaggcggcgatgactgcttatcagtcccgggcaaactctgtcgatatcacgatgcagacgaaggggcttctcgagcaggaagttgctgttgaggcgagcatccagcagttgcgcttgaagcaggccgagatggatcggagctacacgcgggagcaccctgcctatcgtgcgttgctgagccagatcggtgatctcgaaggccggaaggcaggattccagcggcaggtgagtaatctcccggatacccagcaggagctgcttcgtttgactcgcgatctgcaggtaacgaatgaactctacacggcgttgttgaatcaggcgcagcagctggatgtggctcgcgctggcgctgtaggtaacgttcggattgtggatcccgctgttgttgatgtgttgaatcccgtcaagccgcgaaagggctttgtcgtgatccttgcgttgttcatgggtttgctgttgtcgtctgtgtacgcgttcctgcagtggctgctgaatccgggtatcgaagatccttcggtactggaggagctgggattgccgatctacgctgcgattcccctcagtgtttccagtagcatgccgcgcctgcggaagggcaagcatggaacgagggtcgtggctgatggccgccagcacttgctcgcgatctccgatcctgctgatcccgcagttgaggcgttccgtagtctgcgtaccagcctgcacttcgcaatgctcgaagcgaagaacaatgtgatggcgatctccggtccgcgcccgggtgttggcaagacattcgtatcaagcaacctggctgcggttattgcccaagctggtcagcgcgtcatcgtggtggacgctgacatgcgaaaaggtacccttcacaagctgctgggcgtcccgcatcgcgggggactttccgatgtcctcagtggcaaggtggatgctgcttcagtgattcattcggttgcggcgctggagaacatgcactacatggtgcgtggcgatgttccgccgaacccggcggagctcctgatgcatccccgcttcagtgagctgctcgaaatgctctctgccagctacgaccttgtaattgtcgacaccccgcccattcttgccgttaccgatgcggccctggttgcgactcatgctgggtcaagtcttctggttgctcgatttggactgaaccagccaaaggagattctgctgaccatgcagcgtttcgagcagaacggtgtgcatgtaaagggcgccgttttcaatgccgtggagaagcgggcgaccgggtactacagctatggatactacgagtaccagggcgattctgggtcctga

SEQ ID NO: 529297 - DNA, 2037 bp, Stenotrophomonas maltophilia
atggcagaagaaggggatatcagctttacggcatctcacaactccccctacagccgttacaacttcagcatgcagccatttccatggcttgaagggacgtttcgatacatcagcatcgccaatcgacgctatggcccggaatggctcagcggcgaccagaacttcaaggataagtccatcgacgtcaaagttcggctttggcaggaatcgaggcttcttccagaggttgcgtttggcatacgcgacatcggcggcacgggcttgttttccagcgagtacctggtggcaagcaagcgactcggaccaattgatgcttcgctgggactcgccacaggctacatcggcaaccgaggcgaccttgagaacccactcacgttcattgacgatcgcttccgtacgcgtccatccaataaccgcggacttaacgaaacaggccagtttggaattgagtccatgttccgcgggccggtcggcgtcttcggaggggtgagctaccagaccccgtgggattccctgatcctgaagctcgagtatgacggcaatgactacaagcacgagccgcagtcggccagtcgctcaaacgtgatcgagcagaagacccccctgaactttggtcttgtttatcggccaaacgcgaatgtagagcttacggctgcctgggaacggggagacgccgcaatgtttgcgctgacaattcgcggaaatccgggtctcgcacacgccgcacccaagcccctggaccctccaccggtaaagcgagtacagagcgccggcgccgccgtggaaacgctggcggaaagcagcacgccctccaacgcagataacgctgcgccgcacgactgggaaaaattgtcctcagacctgctcgacaatgcaggattcctcgtgcagcggatctcccggaaagataaggaactgcagatcaccgggtaccagttgaagtatcgcaggcctggcgacagccttgacagagccagccggatcctcaacaactcactggggagcgagtattcgtggtatacgctgcagacgaatcgactcggcatgcctgttgtcgacgcaagcttcagcagcgacgcattcctgcgctataccgagggaaaaattggcgatgaagagctgaagcgcaacgtcgaactgaacgcgccaggcatggaggccaacgatggcgacgagttgttcgcttcgcgcaatcgcccttatggcggtggtttcagcgttggctatcgtcagaacctgggcggccccgatggcttcattctttaccagattgccgcgaactattctggcagcgccttcatcaccccgaatctctggctcactggaacactcagccagaatctcgtcaacaactacgacaaattcaggtacgacgcacccagcaggctcccacgcgtcagaaccgaccttcgaaagtacatgaaggcatctgacgtgacgctgcccaaccttcagctcaccgcgtctcgccggctcggcagggatacctatggcctggcgtatgcgggctatctggaatggatgtacgcgggcgtcggtggcgagatactttatcgtccaattgatcaatcctgggccctgggcgggaacgtcaactgggtgcgccaacgcgactatgaccaggcattcggactgcgtgactaccaggtcaccactggacacgcgacgttctactacgcattcgacatgaaacagcgaatcgtaggatcgctctcggtgggccgctacctcgctggagataccggagccacggtaaacatcgcccgttcattcgagaacggcgtaaccatgggcgcttacgccaccaagaccaacgtctcatcggcagactttggcgagggcagcttcgacaagggaatttacatcagcatccccctggacaacatactgccgagatcgacgaactcccgcaccacgttcacctggaatccactgatccgcgacggtggcgccatgctggcgagaaagtacgcgttgtacagcattacatctgaacgagaccggacattcttctacgacaacatgcttgaagaatag

SEQ ID NO: 529298 - DNA, 765 bp, Stenotrophomonas maltophilia
atgctcactcgaatcgcgattgggatcatagcggctgccgctgttcctcttgcagatgcacaggcatcacaacctagtgtcggaatcgaactgcaaggggaaatccaaaaccccggttccctgcagctaccgactggaagccggctctcggacgcattgttggccgcaaaggcctcgcccaatgcctacctgattggcggcatgtttgcacgcgagaaggcaaggaccgaccagcttcgcctgaaagccggcattcttcatggcttgaaaaccctctcggccagctctgatcaggacatcaagagcgccgcactgagcgtccaggcacagctggaagacttgccagtcaccggccgggttaaggtcagcctcaacgcaagacttcagcagattcagccaaagaacgatccggagctcgcttccggagacaagctcgtccttgatcgaaggccaacaaccgtcagcgttttgggagctgtcattgggcaatgtgtactgagtcacagcgcactcaagtcagcgcgtagttacgctgccgaatgtccctcactggccgcagctgacaaggaatatctctacgtcattcaagcggatggatttgtgcagaaggttgccgtggctctctggaatcgcgatgacccgatcacactatcaccaggtggtgccattttcgtcccaattcgcgggaaagcgctacgcgacgtcgacagtggactcaatgatgagatcgctgaattcattgccacgcagcacgtcagcccctga

SEQ ID NO: 529299 - DNA, 453 bp, Stenotrophomonas maltophilia
gtgctcggctatgtcgatgacgggcagcaagtctggtacgccggaaatcacgccatcctccactcgaatgcagaaggtctgttcagcggcatctcgaaggacggcgaagcctacgaatcgcagatcgtcggcacgtccccatttcagaacctgaataccattacggccactacccaggttagcaggaagtacgactggcttcctgattacaagatgggagtggaggtaacggggacgctggctcgcgtcggtagggaaacagtagaaatcggcgggagatcaatggagctgatccgattcaaggagcagctgcatggcggcggcatgtccgggacgaatacgtactgggtggaccccggaaccggattcatctggaagagcaaacagtatctggctccggactacgcgattgaagtcgtacaactcaagccatacaagccagcaggacgctga

SEQ ID NO: 529300 - DNA, 1047 bp, Stenotrophomonas maltophilia
atgctggcaccagggcagcacctccgccaaagcgacgttgccagccatcaggtcagcccggatggccggctacagatgattgagatcacgcccaagctgattgccatgaatctggcgagcgagaatgactcgcgactgccggaacagctcctgagctaccagcctcagccgtatcaggtcggcgtcggcgatgtcctttacatcacggtctgggatcacccggagctcacggtgccagcagggtcgcagcagaatcccagcctggcaggccgcaccgtgcaaggcgatggatccctgttctacccctacattggtaaagtagaagcaagcggcaagaccccagcacagattcgcgaagaagtaagtagtcgtctggcaaggtatatcgagtctccccaggtcgatgtatcagtcctcacgttcgcaagccagcgcgcatgggtcacgggcgccgcccagcagtccgcgccaattccgatcagcacctctccactgaccctgtctgatgcgatcagccaggcaggcttcaacgcaagcgtcgccgatctgtccgcagtgcaacttagtcgcgacggctcgacctacgtcattgacgtggaaggactcgccgctaagactggcggtcgcccgctatacctcaaggatggcgacaccatctatgtgcccttcctcgatcggaaagaaattttcgtagtgggagaagtcgcacagccaggcgccttcagcttccggacgagcgacgtttcgctgaatcaagcgattgggcgcgctcgcggcctcagccagaccacctcgaatggtaacgctgtatacgtcatccgcggctcccgcgacatgcaggccgaaccttcgatgatctatcacttggaggccagatctccggtggcgtttgcggtgggcagccagttcaagctcctccccggcgacgtggtctttgtcggcgcggctggcgtcacgcgctggagtcgcttcgtgaaccagctgctgccgttcacagcgatcatcagcaatgccgccagcgcccgcaacgacctcgataccaactga

SEQ ID NO: 529301 - DNA, 699 bp, Stenotrophomonas maltophilia
atgggtgccaacgtcgctattctgtccgaccccaccccattgccatccgaccgtcgccacatgttgactctctgggagagcctgtccgccctcggcgacagccgcgccctgctcccgcttgcggtgatcctggcgctgttcctgcccgccacgtttcgccctctgctgtggcgctgggcagcggccatcgccgttgtcgccagcgtcacactggccagcaagatcgccttcatgggttggggcctgggcgtgaagtcgctggatttcaccggcatttccggtcatgccgcgatgtccagcacgctttatccagtgctcttctggctgctcgccagtggccgcagtcggcagcaatggacctgggcaatcgccggcgccgtgctcgccatggcgattgcgtggtcaagggtaccgctgcgcgcgcattccctttccgagatcatgatcgggctcggaatcggcttcggcgcatcgctctgggtgttgcgcggcatgcgtttgactggaatgaacctggccgtgcgcgcccatgcggtactgctggccattgcggcagctgttgccgccccggcactgctggcagacctgcacacccatgacgtcgtcaaggccgctgcaaaggcgctatccggccgcgagcgggcgctcgaacgtgacgacctccgcagttcgacctcgccagttggtaaccgccattga

SEQ ID NO: 529302 - DNA, 177 bp, Stenotrophomonas maltophilia
atgcaagctcgtcgttttcggtatgcgtacaggaaagtgcgggaatggcatgtgggctcggtacgcgccggttggttggcgctgcgctacggcctgaccggtgacaccgggcgcttcaattcacacgggggctggcgggtcagtcgtctgcgagtggatcgcgacgcggattcctga

SEQ ID NO: 529303 - DNA, 216 bp, Stenotrophomonas maltophilia
atgaacgctctctccctgaatgccgccgtcgccaatgacgatgtggccacgcatgacctgttcagcgccgcgcgccagttgcagcgtatccacacgatgccgatggctgcgctgtcgcagttggtggtcaggctggaacacggctgccacaacgttgaagacctgtccgtcgggcagctgctggccatagtgcgcgacgcggaggtggctgcatga

SEQ ID NO: 529304 - DNA, 480 bp, Stenotrophomonas maltophilia
atggcaaccaagaaagctgcgaagaagaagcccgccgccaagaaagcggtgaagaaggtcgcgaagaaggccgctgccaagaaggcagtgaagaaggctgcgaagaaggtcgccaagaagaccactgcgaagaaggcagtgaagaaggcggcgaagaaggtagccaagaagtccactgccaagaaggccgtcaagaagaccgcgaagaaggccgtcaagaaggtagccaagaaggccaccaagaagactgcgaagaaggcaacggcccgcaagccggccaagaaggtcgcgaagaaggcaactgccaagaaggccgtcaagaagaccgccaagaaggcagtaaagaagaccgcgaagaaggcgaccaagaaggctgccccgaagaaggcagcgaagaaggttgccaagcgcaagccggccgcccgcaagaagaaggctgctccggtcgctctgccggcaaccccggcgccgctgatctaa

SEQ ID NO: 529305 - DNA, 3762 bp, Stenotrophomonas maltophilia
atggcttcgcgcaaattccgcttcatggccgcaggtggcgccgcactggcgctgggtgggggctacttcatctataccctgatggcggcccagggccagggcacgctggcacaggcgccgctgaacattcaggtgcagacggcaccggccttcctgatggcgctggatgattccggttcgatgctttgggaaacgctgaacaatactcgtgatggtgtctatcgctgggatggcagcagcttctacaagcagggcgttgccaacggctacggtgattccgtgcagcgctatctgtacgtattcccgagttatgggcgtgatagccaggtggccataccgccgctggacaattttggattcgcacgttccccggacgtcaacccgtcgtattacgatccccgcgaaacctaccccggttggaagacgggcctgtcgggcgaggcggcctccaactacatggcgatcaagcctgccagtgcgcctctcgacccgcggccgaccggcgcgccctacaagatcggcggtgcgctggacctcaccgtggaatcactgttgaccagtatcgctgtcggaggcggggactccgccaactggcgcttccgttttcgtttcgggatgacgctgccggtaggcgcccgtatcgaacgtaaccggtgcagcttgagcggtggcgctacacaaagagatggatcatttgacagggtcacccgcgcgaccaccatcaacagcacgtcctgcgacgctgccgtggccttctatccggcaacgttcttcctggcggacccagccacgctgccggcagagtatggctacactgcggctcctgtcgcggtgaccaatcccgctggcgggcgtccaggcaccctgtacaagtatgaaatcaagctggagaatttcaacaaggaccaggcgaagtacaacgctgccatccagagtttcgcgaactggttcagtctgtatcggacccgtcgcgaagccttgatcggtgcggccaccaatgcgctgcatggcactacgaacctgcgcgtgggctggttccgcatcaatgatcggccggatgatctgaagaaggtcaagatgtacaacatgaccgacgagaccgagaagtcgaagttgctgtacgacatcatgggcagaatgcgagccagtggctccacgccaaaccgttctgccgcagcatatcttggccagcagttccagcgcacggatgaaggggcgcctgtgctgctggcctgccagaagaatgcgggtatgctgttcactgacggttacatcaatgaagatggaaacacgacattgatgaaggatctggtggcgccttactacaagggcccgctggtcgaagaccttgataacggctctgtgccggttcctgcagagtgcagcagttccagtccggacccgtcattggactgcaacagaaaactgcacatgaatttctacggtgtgacgctgggtactcagggcaaagagttcggcgtcaagtaccttccggatccgaagcgcccctgggtgctcagtcccgatccgtacgtggtcaagcccaatttcccgaccacgacgcaggatctcaagccggaagcggtcgacgagctgtggaacgcggtatatgacacccgcggcgagatggtcaacgccacgcgcccgggcgaaatcaccgctgccatgcgccggatcatcagcaatgttgcccaaggggccacgccgtccggctcgcgttcgttgacgggggctcgtatcggcgtgggctcgctgtcggtggagccgttctacgaggcgaccaacaacggcaccgactggtacggcaggttgcatgcctactcgctgaaagtggacgactcaacgcgcaggattgtctcggaggaggcatgggaagcgtcggcgaagatgccagcggccgcatcgcgccgcatccgcttctggcgcaacggtgaactggttgatttcaccggcagtaatgtcagcctggccaacctgtgcgacaagtcgggtgtgatgtatccgggcatgctgatctgcagtgcttcggaactggaagggctcgccacggattcggcgaccgccgtggcgtatctgcgtggagacacaaccaacgaaaagcgcagcggtggcaagctgcgcgaccgtaccacagtgcttggggacatcatcacctctacgccggccctgagctcgccgctcgatgactacggcttccgccgtctgccgggcgcgatgggcaccagttatgccgactatatggtcaccaagcgcaatgaccgacgctacatggtctacgcggctgccaacgacgggatgctgcacgcctttgatggcggcatgggcgcggatggcgagatggacagcgatggtggcaaggagctgtttgcctatattccatccacatcgttgggtcatatgggcaatctgttgctgcccaacgatcccaccaaccagaacatccagcgcttccagcatcgctactacgtcgatggcccagtgacaatcagcgatacctatggcagtagcggttgggctacctcgctggtgggtacggccggcgcaggtggccgcagcgtgttcgcgctggatgtgtctgatccggccagcttcggcggcaccggctcgctgctatgggaaatcagtgatctcaacgccgcactggatgacgaagtgcgagcgaatatcggccatgtgctgggcaagccggtgatcgtgccgatgaagaatgccgatggctcggtgggcttccgggcgatctttggcaatggctatgaaagcgagagtggcaaagccgtgttgttcgtggtcgacatggcagcaggcagcacgccgaccatccgcatgatcgaggcggtcgagtcgggtacagatctgcccgccggtagcaatgggctgggcaacatcgtcgtggtcgatcgttggggcggggctggacagagcgaacgggtccgcgatggtcttgccgataccgtctatggtgctgacaagcgaggagcggtctggaagttcgacctgcgcgccgacgcggcaccgacagttccgctgttcaccaccgatactcatgtcgatcgcagcgacaagcggacctatcgccaaccgatcaccggcggcatgaccgtgaccgcgggcccgtccggtggcgtgatgctgatcttcgggaccggcagcttctcgtactacggcgatgagaacgatgctgcggtgcaggcgctctatggcatcaatgacgtcgaaaccgggcagcccagtgccacgttgacctcggccaatctgcgtccgttcgcggcacagtttgagaatgacgttcgtaccctgctgccgggtactatcccgacgctgagccgtggctggaccgtaacgctgtccgacaaggagcgtgcagtcggcaatccgcgcatcgtttccggggtggtcttcatgccaacctatatcccgtccgaggccaggggctgctcggtggatggtgcgaactgggtgtttggcctgcaggccggcagtggcgaagcggcaatgtcgcaggtgcgcttcggtgcaccggatggcacgtcgccgggggcaggtacggctggtgtacccctggaaacgggcggtaacgctccggtcagggatgtcacgacctctgttgtccctcgccttgcgccgccggatccgggtgagccagggaccccgcctccgacgccgcctggcgaggcctgcctgatgcagatttcggtggcaggtgcgaaaccgatgtacttgccttacccgtgtggtcgccagtcgtggaggcagatccagtga

SEQ ID NO: 529306 - DNA, 537 bp, Stenotrophomonas maltophilia
atgcgccacctccccttccccagccctaccgcaccgcgaggcatgcatctggtcgaactgttggcggtcgtggcagtgatggccgtgctactggcggccggctggccctccctgcagtccctgctgttgcggcagcgtgcggacgccacccgcttcaacttgcagtccggactcgctactgcgcgctaccaggcgatcatgcggcgtaccttgatcggcatctgcgcaagtaccgatggccaccactgcggcgacgactggagccagggctggatcatctacagggcaatcggcgggcgacaaccaccctcttctgccgacgccattctgatgcaccagacaggctttccgaacatcaagatccggggagccaccagcagtggccgaccacaactttacttccaaccggatggccgcagccctggcgccaacctgacgcttcgcatctgcgcggacggccgtgagcactcccggataatcgtcagcaacagcggtcgcgtccgatcaacacggaccaggacagatcgaccctgctga

SEQ ID NO: 529307 - DNA, 624 bp, Stenotrophomonas maltophilia
atgcagttgactctgtccggcactggcgtgttcgccatcgatatccccgcgcctgcagcgcctggtgctggctcttggaccatcaccacggtctctggcacggcgaggctgttcggtctgaatctattgagcgctgccaagggcgtccgcatccacaagctggctgcgagtgggtcggcatcgttcgggtggggaaacacgtctgccaccttcggcgatcggctgcgcgctggcttcagcctgctctcgccgcacgtcattgcggtcatgcttggggtgaacgacagcaagtccgggcgtacggttgagcagtacaccagcaacatggctgccctgatcgccaacttgcgggcgggcgctcctgccgcagacatcatgctggtttcgcagccggagatcagcaacccaggaactgtcgcgctcgccggttacaggcaggcgttgaagaggctggcctaccagaaccgctgcgcctatctggacctgcaaccggcgtttggccctatccaggtcgactacggcccgggagggatcgtccctttgcttgtggacgatgggatccatccgaataacggtggttcggctgttgtgcagaccgctttcaacaacgcttttggagcctga

SEQ ID NO: 529308 - DNA, 642 bp, Stenotrophomonas maltophilia
atgtcagtagcaattctctcgtccatcatcccatccaactctcttgcgccgctgtggtctgagcgttttcccgcgagcattcgccccgacttggttgtgcagtcggacagttttgacggagatggtgcgatcaatggaagggtcattccctggcggaaagggggacaggcgcagctgggatgggcatcgcctgcggcgatgttcaagaccgccggcggtgtcgcgtactacgacagcacaaccgctgcagatcaggtgtttggatacgtggaacactcgggcaatggagaagccatggccagcgtcgagtggggcggcggtgctcgcgttgcagggctgacgttccggatgggcacgatcagcaactattgggacttcgtcctccgcagcacgggtgcggtagtccgcaagacggtggcgggtgcgacggcaaaccagggaacggcgcttagctttgtccctgtcgtgggcggaaagtaccgcatgcacgttcgcttcaatgcggccaccattgtcgcaacgatcgttgggccagggcttgagccggcgaccatcaccattgaatccaacgacatgcagggcaacgcgcgaagtggtctcacggtcggcatcctccacaagattctggacttctctttctag

SEQ ID NO: 529309 - DNA, 894 bp, Stenotrophomonas maltophilia
ttgccagaatcaatagggttgcagggaagcagcgcagtgagaaagactccaatctccgagatgcttacgcatgctactgtaaggattgaatgtttcgggcccaatggcgaagtaagtactggaactggtttcttttttgaggcggactgtaaaagcgatgggggttatatccctgtcgttgtaactaataagcacgtggttggcggtgctgtactagttaagatgaggctgagtagtcttgattcctccgggcttcctgatccagcacgtcccttgaacttcgaggttagggattttcggagccttttggtgtcgcatccttctccggatgttgatctgtgcgccattattattggcgattttttgaatatggttttggctgaggggcgcaaggcgtgctttgctgcgcttccggtagatttggttgccactcaagatgaattggctagtttgcttccaattgaagatgtgactatggttggatatcccaatggtatttgggatgaatttaataatttgccaataattaggcgcggtattacggcgacaagtccggccaagaagtacaatggcaaagaagagtttatgatagacgccgcctgcttcccgggatctagcgggtctccagtctttcttttcaatcagtctggatgggcggatcgcgcaggcgatttcaatgttggaaatccaaggttgaagctcattggcatcctctatgcaggaccccagcacatggctactggcgacattgtggtggtggatgttcctgtcgctgagcgctatatgtcgatagctagcatccctaacaatctcggtatttgtattaattcatctaggttgttggagctggatgctgaagttgctaggcatgcaggttcatttaacattggctaa

SEQ ID NO: 529310 - DNA, 1098 bp, Stenotrophomonas maltophilia
atggatatacgtgacgctgcaaggatcttccacgactggtgtgtcggcgaaggtgttctggtggatgcatcaggccaccatggaagcagtccggaggagctgaagctggtcgcaccttcatatgacgcagggaagcttatcttgcgtgcgaagcgaattatcggcatcgggttcaatgaaagcacgggcgagcttatcgcctacacgaagctcaccgccccagcaaagaaggcgcttccgtctgttccatccgcgctcggtgattacaaaataagctaccggcagggcaatataaactctgtaggggagttgcctcctacgccttttggtggtcctccctatcgggtccatcagaccaagtcaggtgaaggctattacacctgtggtagttcaatttccgtaggtaacactgtcgactccggcactctcggggcgttggtaaaggatgccggcggggtgctctatgggctgtctaataatcatgtgtccggaagctgcagctgcgctgacgttgggctcccaatcgtcgcgccaggtatcctcgatgttgcctcaggaagtttgcctccatttacggtaggtctacatcacaggtcactgccgatgctgctaggagcgccgtcgacggtgtctattaaggagaacaccgatgcagcaattttttccataaccgctgactcttcgttgacatctatgcaaggtgatgcctacgacactcctgcaaaggtgggtgaccttgtgccaggcatgacggttgagaaggttgggagaactactgggcataccaaaggctatgttgtgagccagatgtatggtcctatcgatgttgcatactctgctaagcagtacggattcaccggcgccatgttctttgaaggcgtgatgatcatcaacgggacagcggagcttttctccgacagtggtgactccggctcgttgatcacaagtatggtaggaggcgagcgcgtcgcagttggcatcgtgtttgccggcgctgcggatagccgggctccaggaggcaaggtcacgctagctttacctttacggcctatactggacgcattgggagttaccctggtatccggtcacaatgtatga

SEQ ID NO: 529311 - DNA, 222 bp, Stenotrophomonas maltophilia
atgactcgcaccgtccacactgcggcgaaggccctgctcactaagctctccttgccggtgggcgcggtgaacactgtggctggtgtggagaagggcaaaccggtgattcgcgttttggtaaccagtcagcgcctcactgatcggtcgagtctgccgaagtcattctggggctttccggtccttgtcgaagagcggccgaaatttagagccttggcggggtaa

SEQ ID NO: 529312 - DNA, 177 bp, Stenotrophomonas maltophilia; identical to SEQ ID NO: 516926

SEQ ID NO: 529313 - DNA, 309 bp, Stenotrophomonas maltophilia
atgacccaacgcactgctgtaaagactctctcgtccctcacgctgatcattgtgggtgtcgcggcagcaggttcggcttctgctgctgcatcgaacggagatttcgccaatgacattgcggcgtcgacgtccatccaggcggatatgcagtctctgagcatcagtgagttcagagacgaaaaatccgcgcttctcgcagatgggcaccatcactccgattcattcggatcccatcaccatcatgacacggcgagcaagcagatggcatttgcttcgcgcattgccgcggattcccgattcgacgtctga

SEQ ID NO: 529314 - DNA, 855 bp, Stenotrophomonas maltophilia
atgacggcgtgcaggctgcttctctggtgcctgttgctgcccacgagtgcgtgggcagcacctgcaatagacacccagctgcgggatctcgatcaagcgctgctggcttcaggtgcatcggaccgggtcgcgaggctggcgagcgcatacgcttcatgggagtcttcggcgtcgccaggtgacggctgcaatacgctgagcgatctggaccttgaggctgcgtttcgggccagcgtccacgtctcaaggtacgtcggggacgaggagtggcttggcaaagtccgatgcattcatgcagaactggtgcggagaggtactgccagagagacaacgcacaggaaaatgcacgcggtcctcgtgcaggttcgacattttgccgaggccaatgagctgcgtgagatggcgtcgttgcgtgtaaatgagcttcccgagatagagcggaacgtgcctgaccagcagggaattctccaccctcttgcgagtgggaagctggaatggcggcgatgggagtacagggagggactggaagtgatcgcctatgtcagtccggcatgcgctccctcgcgacgcgcgatgcatgtgatcatgaatgaaccagaatggacatggattcgatccagcgtgcgctttgtcgtgcgtcgatctcctgcatggccgcagccgggtgtcagtgagtggaacaaaagcaatccctctcatcccatgctgctccaagcgggacccgcgggctggaaagcgttggatgtccatgaaactccggtattccatgttttcaggaatgggctgctcctgcgcaccctggcgggatgggcagacgccagtgctcacctgatgagcctgaaggagagtttctga

SEQ ID NO: 529315 - DNA, 501 bp, Stenotrophomonas maltophilia
atgaaacccatgatgctggtggttctgctctcggctgtctctctgtccgtatcaatgcctgcctctgcaggtgacaacgtggcgaatgtctccggggcggagaatgtctcgctcatgcacgcccctgtgaactcgcgggggcggcttgatcttcacctgatcgagctctctcccgaatccccactgatgttgctttcaccccttgcgcgcaagcaatttgtcgattcgctggtgtttggcgaccggggactggccagcttcagctacgagcccatcgtctctgaactgagtgcaggtgaagcctatcgactcctgtcactcttcggggcacagcgcgcaattgtgtacatcccagggttgcggaaggcgtcggaagcggatcattgggttgcaccggcggccaatcctaacccggtatttgacgattacccgggctacgcctgttcggggcgtgcgacctgctcagagtccatgcacagcatctgcatgtcgagctgctga

SEQ ID NO: 529316 - DNA, 4713 bp, Stenotrophomonas maltophilia
atgttggaacgactgaagaccctctcgcgtgccgtgctggcgatggttgccctcggctgcttcgcctctgcagtggcacaggcgcaggaaagcaagattacctggcgcatttcgcagcccggcggcgatgcgacgcaatacaagacccaacaggcggcggtggctgccatcaagaacctgcccgcacccagcccgttcccaccggagttccagttcggctggcaatctgtcgacaagatcaagtcgaaagtcgtggacttgaacggaaacacgtcgatcacctactggatggggaagacgcagccctccgacccggactggtcctacatcgggcgtgacatattcccgacggaagaggcgatggtggccgattttcttgcggaccaacaagccagcaatcccgtgtgccccggggcggcggtcactccgtctggcgattggtttgcggcttcgcccgatcaggaaggtgtcatcgagtcacgctactacgatctgacttcaatggctggcaacaatacggctgaatcgccgtgcaccccgtataccgggacggttgcggtcgcgcgtacccggcgcttgaactgcccggttccgctcacgcagtggtccaacaagcacagcgcctgcgtcagcgaagagttcgttgcgaccatcacctcgaagtcgcagaagtgcgacaaggatggcggcaacggcagctgcccgatgtcccgtaacgatacagctacgaacatgagtccgcttcccgacaaggacccggcctccaacggcggtacctgcgacggcaatgtcggcaatccgtgtgacgtcaaaacgggcgagaagtacgagatcgcgccggacttcgatctgggctggatcgcgctgacgcgcttctatcactccggcatctccacctcatccggtggcttcggctatggctggacccactcgctggacgcccacctggcactggatggcgttgacagtgtgggcatcattgaaagtaccggtttccaaagggcattcaagaaaatcggccaggcctatgaggcggacgacgacagtggcgatcgtctggtccagaacggcaactggaccctgtactcggcggattccatctcgatcttcggcccggacgggcgtctggtcgccaagcgcttcccggatggcacgtcgctgacctatatctacgatgacagcgatcgccttgcggccgtcacccacagcagtggccgcacgctggagttcgtttaccagtccaacgactacgaggcgctgatcagttcggtgctagtcgaaggcattccgctggccacctatacctacacgcctcagaaccaggtcgccacggtgacctatgcgggtggcggggtgcgcacgtatcactacgagaaccaggacttcccccagcacctgaccggcatcaccgccgaggacggtcggcgctacagcacctttacctatgattccatcggccgtgttatctccagtcagcacgctggcggtgccgatggcgtgacgctcgcctacagccccaacggcggtgcagtcgtgactgacgcgcttgggcggcagaccgactacaccctgacacccggcggcgacaccgcgccgtcgcgcaaggtaaccggcctgagtgattcgcagggaaccgtcagccggacctactacgaccagagtgtcgacttccgccgccgtctggatacctacaccgatcaccgcggcatccagaccaagcacacctatgcgcagggcaccgacccggtgagcggtcgtgccgtcagcatccataccgtgaccgaagcggtcggcctgcccgaacagcgggcggtgaccaccgcgcgcgacgtcgaaaccaatgcggtactgaccacccgcatcggcaatcgtgaaacccgaacgtccttcaatacccggcgccagccgacaaccaacacggtgaccgacatcgcttccggtcaggcgcgcatcaccagctacacgtattgcgaagctgcggacgtggctgcggcagggagctgccctgtggaagggctgctgaagagcgtggatggtccgcgcacggatgtggtcgatgccgttacctacgcctactacccggcggatgatgcgggatgcgcggccaatggcgcctgcagctatcgcaagggcgacctgcgcagcgtgaccaatgcgctgggccagacggtcgagaccttggcctacgacgcgttcgggcggccgttgtcggtcaaggacgccaacggcgtggtcaccgattacacgtaccatgctcgcggctggccgacctcgatcaccgtacgcggcgcgaccactgccgaggatcgggtcacccagctgagctattggccgacgggccaggtgcagaagatctccgagccggatggcagcagcgtttcctacgtctacgatgctgcgctgcgcttgaccgacatcgaggacaacgcaggcaacacgatccactacacgctggacaatgccggcaaccgcctcaaggaagacacgctggatgctggcggcaccctgcgtcgtaccctggcaaggacgttcaacacgctcggccagctgaccgcgctgaaggatgcaggtaatcacgccaccggctttgcctatgatgccaatggcaacccgcagacggtgaccgacgccctgcagcgggtgaccagccagcagttcgatccgctgaaccgtctggcgcagaccctgcggaacgtcggcggcgtggcggcggagatgcgcagccagtacaacgcgctggaccaggtcacccagatcaccgacccgaagggactgcacaccacctacgcctacaacgggttcggtgacctgaccggccaggtcagcccggacagtggcgccagcagcttcaccgtggatgcggtcggcaatcgcaagacggccaccgatgcgcgtggcgtcaccgccacctatcactacgatgcactcaaccgcctgatcggcgtcgcctatccggaccccaatctggatgtgggctacagctatgacgtggcgccggctgcctgcgccgcagacgagcgctttgccaagtggcgcctggggcaggtgctgcatgccaatggcagcacccagtactgccatgaccgcttcggccaggtcacccgtaaagtgcagacgatcaatggtgtcgccagcacgctgcgctacgtctacagcaagtcgggtcgcctgactgcgttgacctaccccgacggcagcgtggccgactacgtgcgcgatatccagggccgcatcagccagatcggcatgacccggcccggccaggcccgccagatcgtggtgaaccacgtaacctacgcggccttcggcccggcgaccggttggacctatggcaatggtcgccagctgcagcgtccgctggatctggactaccgcccccaggcggtgcatgacccggccgcaggcggcctgtcgctgggctatggctatgatccggtgggttcgatcaccgaactgaagaacggcacaggctcgacggtgctggccaagtacgcttacgacgcgctgggtcgcctgacccagacccaggacggtacgaccggcacaccgatcgaaacctatgcgtatgacgccaccggtaatcgcaccgcgctgaccacctcggcaggtaccgccagctacacctatcccgcaaccagccaccgcctggctgcggtggatggcgaggcgcgcacctatgacgcagcgggcaacaccaccagcatcggcagcaagacgttcaactataacgacgccaatcgcatgaacgcggtgaagcagggtaacgccacactggagagctacggctacaaccatcgtggcgagcgcgtgctgcgtaccccggccggtggcgcagcgcagatcaccctgtatgacgaggcagggcagtggctgggcaactactcggccacgggccaggcgcagcaacaggccatctggctggataattacctggtggcgctgatcaatgtgccgggtaccggcgtgccggagctggcctacgtccaaccagatcatctgggcacgccgcgcgtggtgattgatccggtgcggaatgtcgcgatctgggagtggagcaacaagagcgaggtgttcggcaaccagataccaagtgccgacccggatgccgatggtgtggtgttcgagctggctctgcgtttcccagggcagcaggcaacggatgcgagtgggctgttctacaactaccagcgcgagtatgacccggcagcagggcggtactcgcagagcgacccccttggattgaacgcggggatggcaacttacgcatacgtgtcgtcaggtccgcttggtgctgctgatccgtttggtctgtgcgaggatgatcacgtctatcgtattgatcgattcagtctctgctctccgcagtcagcattcagagctgcaaaggtggtaagtgccccaggtgcgccgccggccagagagggattcacccctgacgttgagcttgtcgggaacggcggacgaaaccacatttcgcaatgggtggactcaaagagcatgacaatcgtgaattcaacgcgtcccggccatcagttccatccaggcacggtatcgtggaaggtggcgcctgggccgctgggaatcgggtcgcagatcacaatcgtgggcgaaggatccgggcccaatccgatactcaacgatgcgcttggtttcctgatttttggtccggcggcgacattggccgcaacgctttgcatcgttgggccacgatga

SEQ ID NO: 529317 - DNA, 510 bp, Stenotrophomonas maltophilia
atgatctcctccacctaccaaggcttccgcaccgcgccgatcccgtccggctggggcgagacgggtgagcggtgggatctgtggtggaacggacggtcagtcgccaacttcacgcccgcgcccggccgtggtgcccgggtgcacttggatgcgcgaaagattttccagaccaagcaggtctttgccgccggcgtgcctcagggcaagcgctacgccgaacgctggtgcgccgccaggctgtatcccgatttgccccttcgtgaggccgtcgcccggctgaccgacagcaccccgatccagccgccgccgccactgccgggtctgccgccgacccgcgagcagcggcagcaggcccggcgcctggctgaggccggagcgaaggagatcgagcggatcaaggcagcgctggagccgcgcaagccgccggcagagaccaagccccgagcgagggacgtccgcagcaaggcgcgggtgagggcagggctggagcagctacggcgcggcgtgtag

SEQ ID NO: 529318 - DNA, 915 bp, Stenotrophomonas maltophilia
gtgaaactgccagttgagcagcgcccccagcagatggaattgctgcctgttaaggaagtggagatcgacggaatccagatgggcgtgctgagtgacggcactccctacctcacggcgcgaggactagcggttatgtgcggcatcgataactcagtcctgatccgaatggccaacaattgggcagaggagcggaacaagccgcgcggtagaaagatctctacgctcctggctaatcaaggctacacgggtgagtcgctctatctccgtactcaatccaagggcgttgagacccatgcttatccagactccgtctgcatggcgatcctcgagtactacgcatttgaggcggagcagaacgacagcggcgacgccatcagaaactaccgcctgctggctaggtcctcgattcgcacgttcatctacaatcggtgcggctacgacccaaccaatgccattcccgccccatggaagaactaccatgagcgaattctgctaaatgaccaagtcccactgggattcttctcggtattccgagagattgctgacgtggtcgtccacatgattcaagcagagtgcccaatcgacgagcacaccgtccccgacctgagcgtcggtattgcctggtcgaagcactgggtggcaattgatggcgacagcgccttcgggactaggcaaaagcacccgcacttcttccccgaatggttcccccaggcggctgttaatccggttgaagcctggatctaccctctcgatgcgcttggcgccttccgcatttggctctatgagaactatcttccgaagtcattcccaaagtacatccaaggcaaagtcaaaagtggaacattcttggcctctggcgcagagatcttgctcggtgcggtgaagcgagaggcgctccccgccccgcgcaactga

SEQ ID NO: 529319 - DNA, 324 bp, Stenotrophomonas maltophilia
atgcgatttggggagggcgcgttcgccattttgcaagcacaagccgacggcggagggagtggtcgaagctccttgcgtgaatatcaaatctcgttcctgggcattgcgggaatcttgatttcgccggatccggggccgctggcagttcaaccgggggcgcgtgagcagcgccgcgccggtatcaagcgttggtcagttcagttgcgcggggcggggagcgcctctcgcttcaccgcaccgagcaagatctctgcgccagaggccaagaatgttccacttttgactttgccttggatgtactttgggaatgacttcggaagatag

SEQ ID NO: 529320 - DNA, 495 bp, Stenotrophomonas maltophilia
atggccagcggccgccttgccgactaccttggaaaggggctggcttcggcccggcccgcaacgcttacgctccacccagaggcagtagggctctggtattcgacagataccggggtaataagtacatgggacggatcttcatggcatgacgtcacgtccggagcatctacacggttggccatcgtcaccaagactgcgagcgcaacgttggccctgactgatgctctgtccgggcgtgacgcgatggtggagatggacgttgcaacagcgaacacactcactgtgcctccgaacggcaccgtcgcatttgagatcggtaccgtgatcaacgtccaccagcgcggcgcaggtcaaaccacaatagtgcagggtgctggcgtaaccgtgcgtaccgatgagacgctgaagctgcgaaagcagtgggctactgcggtcttggtgaagcgtgggaccgatgagtgggtactggctggaagtctggaggcagcgccgtga

SEQ ID NO: 529321 - DNA, 579 bp, Stenotrophomonas maltophilia
atggcaaagcaacgcgtcccgctacaccagaacccgcgctccttcaccactgtggaggagggcgcgacaaagggtgctcaggtaggcgtcgacctgcttggccctgacgggagggtgttgtgtgtagaccaggtcatcaacccggccacgtccaccgatcccaacgccaatcgggtgaccgtctggaagctgatccgggaggtgcctgccaacctggtcaagatcgcggcgctggtcggcaagggattcgcggcccggcgcggcgacggtgagtggacgctgcggacgctccagcctggaggcgcagttgcagtcatgaacggcgacggagaagcggggaatcccgtgatcggcctcaccgacgacgcgcttgcatcgctcgccttggcagattcagcagttcagcaggtcaggcctggcgcgaacatcaccgtcgacacgaccgatccgcggcgtccgatcgtctccgcttccggcagcggcggtgtcctaccagtcgtcaccggcgaaatcgtggccggccagccggttttcctcatcgccgacgacggcaacctcatctacacggagatctcctga

SEQ ID NO: 529322 - DNA, 264 bp, Stenotrophomonas maltophilia
gtgcagctcaattcctttgctctaatcgccgccatgattcttgtcggctgcgcgcaccagcccgagcggccgaagctgcccgagaaggtccatgtgaccgtggagaagctggtaccggttgatgagcgcctgaccaagccgtgcccggacaagcgcgctgagtcgcgcacggtggaggcagtggtggccgcctacaacgccaacctgatcgtgctgcaggactgcgacacgcgcatgggcgagatccgcgcactggggcggtaa

SEQ ID NO: 529323 - DNA, 255 bp, Stenotrophomonas maltophilia
gtgaaaaagtacgcaaagacgttcatgttcgccaattgcgccaagtacggaatccccaatggcgttcacttcgctttcgaacacgataatcgcgtggaagtcctgctcttcccaaatcctcccaaatatgtggtcaaggaaattcctgtcgatgaatttcaggatctcctggctagcgcgacgatcgtagacgccgagtctcatatcgctgcactgttggaaaatgattctagcttcctgcgctcgcaggaatga

SEQ ID NO: 529324 - DNA, 198 bp, Stenotrophomonas maltophilia
atgagtagcattaaacgcgcactgattagcgatgagatcgacctggccaaggagatcttcaccaaggctgcggctgccgcaatttcggcagatcaattgccggatttcacgggcatcgccgagtactcaatgctcgccgctatcgccttctcgcaagtggagaacgggcttcccagccacgaaagcgcattcgattga

SEQ ID NO: 529325 - DNA, 459 bp, Stenotrophomonas maltophilia
atgttcaaggcttcaattcttaccccgacttctgctgcgaacgcccctgtcgggtctttcctactggccaatgggcagtggcacatgtgcgttgatcagggtcaaaagatggtccttacgctcaccggcgcaagcgagggccgcctccaaacggctgcaggcgattccctcatatacctgactccacgtctcaagcctgcgttcgaagtgagcattccggatctgtaccaatgcttccaggcgccggaggggaaatcattcggagccgtcctgaatttcacgaaattgggactgatgctaaagggctcagaattggacaagaacatgaatgtgaaggagtacttcttcacattggagggcgcctacctcccatcggcaaagggatcggaggttcccgtgtggggctggagcccattggtaactacgacggatgaaacttcgacgttctacctgttctga

SEQ ID NO: 529326 - DNA, 168 bp, Stenotrophomonas maltophilia
atgcagcaggctacacccccgaactgggctgtcaaccttgaggacgacccgcggttcaacgccttggctgatcggatggctgcccggctccttgagttgcgtgccattgccgcggctgcgaaggcgtcaaacgtgatcccgttcagaccgcggacgaaggcggcctag

SEQ ID NO: 529327 - DNA, 1620 bp, Stenotrophomonas maltophilia
atgactgaagacgaccagaaacaactcggcaagaccctgtgggccatcgccgaccagttgcgcggcagcatgaacgcggacgatttccgcgactacatgctgtccttcctgttcctgcgctacctgtcggataactacgaggcggcagcgaagaaagagctgggatcggactatcccgatccggaggcgattggcaatggcggcaagacgccgctgtcggtgtggtacgccgccaatcccgacgacgtagagcaattcgagcgccagatgcggcgcaaggtgcattacgtcatcaaacccaagtatttgtggggccatgtcgtccatttggcgaaaacccagaacgacaaactgctgaatacgctgcaaaagggcttcaagtacatcgaggaggagtcgttcgagagcaagttccagggtttgttctcggagatcaatcttgcctcggacaagctggggcgcaattacgacgaccgcaatgccaagctgtgcgcggtgatcagcgagattgcacgtggtatggcgctgttttccaccggcaccgataccttgggtgatgcctatgaatacctgatcggccagttcgctgccggttccggcaagaaagctggcgagttctacacgccgcagcagatctccaacatcctttcggccatcgtcacgctggacagtcaggaaccgaagaccggcccccgtcgcaagctggacagcgtgttcgatttcgcttgcggctccggctcgctgctgctcaacatccgccaccgcatgaaggagggcggcggcagcatcggcaagatctacggacaggagtacaacgtcaccacctacaacctggcgcgcatgaacatgctgctgcatggggtgaaagacaccgaattcgagatctaccacggcgacacgctgaagaacgactgggactggctgcgcgaaaccaacccggcgaagaagccccggttcgacgccgtagtcgccaatccgcctttcagctaccgctgggagccgggcgaggcgatggcgcaggacccgcgtttcaagaaccacggcgtggcgcccaagagtgcagccgacttcgccttcctgctgcacggcctgcattacctgaaagacgacggcgtgatggcgatcatcctgccgcacggtgtactgttccgcggcggcaaggaggcggacatccgccgcaagctgctggatgacggccatatcgatacggttattggtctgccggccaacctgttctattccaccggcattccggtgtgcattctggtgctgaagaagtgcaagaagccggacgacgtgttgttcatcaacgctgccgatcacttcgccaaaggcaagcgacagaatcaactgaccaacgaacacattcagcggatcgtcggcacgtaccagaaccggagcgagcaggaacgctattcccggcgtgtgtcgatgaaagagatcgctgacaacgactacaacctcaatatttcgcgttacgtcagcaccgccgaagccgacaaggagatcgatctcaaagccgtgcatgccgatttgaaggcgatcgcatcgaagatcgagaaggcgaagaagcgccacgatgcctttcttgccgagttggggttgaaaccgttgccgtga

SEQ ID NO: 529328 - DNA, 1011 bp, Stenotrophomonas maltophilia
atgagcgagctgatcctctacacgagcgaagacggcaagagccgcatccagctccgggccgaaggccggaccgtctggttaacgcaggcggggatggcggagttgttcgacgtcacgactgataacatcagcctgcatctgaaaaacatcttttcagacaaggagttggaacctgaacgaactaccgaggaatcctcggtggttcagcgagagggtgggcgcgaggtgcgccgaccggtcacgctctacaacctcgacgccatcctggccgtgggctaccgggtgcgctccccgcgcggcgtgcagttccgccgctgggccagcaccgcgctcaaggagtatctgctcaagggcttcgtcatggacgacgagcgcctgaagaacccggatggccggccggaccacttcgacgagatgctggcgcgcatccgcgacatccgtgcctcggaaaagcgcttctaccagaaggtgcgcgacctgttcgctctgagcgtggactacgacaagaccgactgcgccacgcaggccttcttcgctaccgtgcagaacctgctgctttacgccgtgaccgggcagaccgccgctgagctcatcatggcccgcgccaaccccgacgatccacatttcggcctgcgcgcatggagcggtggacgggtgcgcaagcaggacatcctgatcgccaagaactacctgagcgaagacgagattgacaccctcaatcggctggtggtgatcttcctggaaactgctgaattgcggaccaagaaccgccaggagattcccatgcgtttctggatggagaacgtgggccagatcatcagttccaatggcttccccttgctggccaatgccggctccatcagccacgcgcagatggagacggcaaccaacgcgcgctacctcgccttcgacgaacagcgcaaacagcaggaagcgcaggccgccgatgccgccgacgaggccgaattggccgccatcgaaaacaagatcaaacgacgcttgaaaccatga

SEQ ID NO: 529329 - DNA, 1095 bp, Stenotrophomonas maltophilia
gtgacgctgaacgaaattgccagcactttgcgcgatggagatgcgcggatcactcttgtctatgctttcaacgccacgggcaagacacagctttgcgtcgcctacaaaaacgcgacaaaacaggagggcggtgcacattccggtgtttactacaacgcgtacagcgaagacctctttgtctgggataacgacgaagagaacgaaggggataatatccggttaaccgtgctgcccagtagtttaagccagtttcatacgctgctgacggaagacaatattcgagacaagcttaaggcgtataagccgaaattcggctttactctaaacctgcacgaagatgatccggaaaaggggattgagtcaatcacattcttcatcccgagccagaatccggatgtacctcagcagcccatcaagatttctcgtggtgaagaacgcatctttgtttggtgttttttccttgccttgtttgaggtcgaagggtgggctgacaagcagacaagccattttttcatcgatgatcctgtttcaagtctggatgaccacaacatcttcattacggcggcgacgcttttcgatctcatcgaaagtaattttgagaagcggaagattattgtcactactcatcatctcgggctgttttccatcctgagcgattggctgaccaaaggcgaaaagaaagataagttcaaaaagaataacaatcctatctacaagctcaacatcctgagttcaaagtcaggtgatcttgagttggagaattgccggaaagatgtgttcctgtaccatctgcgcgttctccaagtgctttctgttgcccgcagggccaacgacgttcgcgcatttcactttgcgttacttcgtcaggtcttggaaaacgtggcgtcgttccttggtgttgggcaatttggatatgtgctgaatcagattgggatcggcgagcccaatcgagtcgcagacatcatcaatgcgctatcgcataagaaggtttattactatgagtcggatgccgttgttccggacaatttggacattttcaatgaagtaatggatgggcttcttacgaaatacaacttcgtgttgcatgaggggtga

SEQ ID NO: 529330 - DNA, 1227 bp, Stenotrophomonas maltophilia
atggcgaagcagggggcgaagatggcggtgccgaggttgcggtttccagagttcgttggcaaaccattccgcgaagttcagctcaaggatgtgacgtctgagagcatcactcgcaatgtcgatgggatttcgacgaaatcggtaatgggagtaacgaaggcggaaggcatcgtcccgatggaggaacggctgatcgcgtcggatatcgcacgatacaaggtcgttcagaaggattggtttgcctacaatcccatgcggctcaatatcggctcgatcgcgcgatggcaaggcgacagcgacattctcgttagcccggactacgttgttttccagtgctcgaaaggatttggttcggagatcgcccccgcgtatctggatcacttcaggcaatcaggcgcatgggagaagttcgtaaccgagggcggcgacggcagtgttcgcgtacgcatctactacaaggatctcgctcgcctccaggtaacactaccttcgctcgctgagcaagaaaaggttgccgactgcctgacgtcgctggacgaggtcattgctgtgcaggggcagaaagtggaggcattgaaggcccataaacgcggcctagtgcagcaactcttcccccgcgaaggcgaaactcagccgcgcctccgcttccccgagttccgcgatgcgccggagtgggggataaagaagctttcggctttgatcgatcttgtgtcaggtatgcacttgtcgccggaggaatacggctcgtcgggagatgttccctacttcactggcccatctgatttcaccaacgagatgaagtgcgtgatgaagtggactgcggtttcgtcaagcatggcgacgaagtacgacacgttaatcacagttaaagggagtggtgtgggcgagtgttggtatctggagatgccgtcggttgcgatagggcggcagttgatggccgttcacgccaaggcgtcatcaagccagttcattcatcaattcctattgagcaagcgaaagcgctttgaggatttggcttctgggaacttgatccctggcctcgcgcggggcgacattctggacatggttgcgccgttcccggagaaggacgagcaacaatgtatcgccgactgcctctcctcccttgatacccaaatcatcgccgaatccacccagcttgccgccctcaagacccataagcaaggcctgatgcagcggctgtttcctttaggggaggatgagttgtga

SEQ ID NO: 529331 - DNA, 2985 bp, Stenotrophomonas maltophilia
atgcacgtcagggaaagcaccatcgagcaggaactgatcgccaagctcggcgatctcaagtacaccttgcgccctgacattcgcgaccgcgcggcgctcgaaaccaacttccgaaggcatttcgagaccctgaaccgggtcaacctgacagatgcggaattccaccggttgctggaggaaatcatcactcccgatgtcttcactgccgcgcacacgctgcgccaccgcagcgccttcacccgcgatgacggtacgccgctgaactacaccttggtcaacatcggcgactggtgcaagaacacgtttgaagttgccagccagttccgcatcaacaacgaatacagctatcgccagtacgacgtgctgctgctgatcaacggcgtgccggccgtgcagatcgagctgaagacgctgggcatcaacccgcgccgggccatcgagcagattgtcgaatataagaacgacaccggcaatggctacgcgcgcactctgctgtgcttcatccagctgttcatcgtgagcaatcgcgacgcgacctactattttgcaaacaacaacgcgcgccacttcgccttcaatgcggatgagcgtttcctgcccatctaccagtacgccgcgccggacaacagcaagatcagtggcctcgatgcctttgccgatgcgttcctgcccaagtgcacgctggggcagatgatcagccgctacatggtgctggtggccagcgagcagaagctcctgatgatgcggccataccagatctacgcggtaaagaacatcgtcgagtgcatcgacaagaaccttggcaacggctatatctggcacaccaccggcagcggcaagaccctgaccagcttcaaggcatcgaccctgctcaaggccaacccggccatcgagaaatgcctgttcgtggtggaccgcaaggacctggatcgccagacccgtgaggagttcaatcgcttccaggaaggctgcgtcgaggaaaacaccaataccgaatcgctggtgcgccgcctggtgtccgacgatgctgccgacaaggtaatcgtcaccaccatccagaaactgggccgcgcgctggatccaacgcgcgcagactaccggcagcggctggaaccgctgtgcgaccggcgcatcgtgttcattttcgacgaatgccatcgctcccagttcggtgagaatcaccaggccatcaaggagttcttccccaaggcccagctgttcggcttcaccggcacgccgatcttcgaggacaacgccagttacaagcgcatcgaaggcgacgagcagacgctgaagaccaccgaggatctgttccaacagtccttgcatgaatacaccatcacgcatgccatcgaggacaggaacgttctgcgcttccatgtcgagtactacaagcccgatgggaagaatgcgcccaagcccggtgaaacgctggccaaacgcgccgtagtcgatgccatcctaggcaagcacgatgccgccaccggcgggcggcgcttcaacgccatcctcgccaccgcctcgatcaacgacgccatcgagtacttcgggctattcaaggccgcgcaggtcgagaagcagcagaccgatcccgactacgtgccgctcaacatcgccgccgtgttctcaccgcccagcgacgtcagcgccgatgtgcgccagttgcaggaagacctgccgcaggaactggaagacaacaagaaggatccggacgccaagaaagccgcgctcaaggccatcatcgccgactacaacgcgcgcttcggcaccaaccaccgcatcgaggagttcgacgcctactaccaggacgtgcagcagcgcatcaaggatcagcagttccccaatgccgacctgccggacaagggccgcgagaagctggacatcgtgatcgtggtggacatgctgctcaccggtttcgacagcaagtacctcaacaccttgtatgtggacaagaacctcaagtaccacggcctgatccaggcgttcagccgtaccaatcgcgtgctcaacgacaccaagccctacggcaacatcctcgactttcgcggccagcagaaggaagtggatgccgccatcgcactgttctccggcgccaaggcggacaaggcacgtgaaatctggctggtggacaccgcgccggtggtgatcgataagctgaaggaagcgcgcgccagcctcgacagcttcctcgtctcgcaagggctgggtggcaaacccgaggatatcgccaacctcaagggcacggcggccaaggtggccttcgtcaggcacttcaaggaagtgcagaagctgcaaactcagctcgaccaatacaccgacctgagcgccgagcagcaggcacagatcgaggccatcctgcccaaggacgaactgcgcagcttccgtggccagtacctgcaaaaagccgaggaactgcgcgctgaccagaaaaagcccggcgggctggatgaaaccacgcgcaacgaggtcgagcagctcgatttcgaattcgtgctgttcgcctccagcaccatcgattacgactacatcatgaagctgatcgccgactactcgggcaagacgccgggcaaggccagcatgagccgcgagcagttgatcggcctgattgcctccgatgccaagttcatggacgagcgcgaggacatcagtgagtacgtgcgcgggctgagagctggcgaaggcctgagcgaggatgccatccgcgccggttacgagaagttcaaggccgacaaggccgcgcaggaaatggccgcgctatccgggaggcacggcctgccggttgccgacttgcaggcgttcgtcgatgcgattcttgcccgccgcatcttcgatggtgaacaactcactgaattgctggctccgctggacctgggctggaaggcgcgcacgcaggcggaactggcgctgatgcgcgatctgctgccgctgctgcacaagcgcgcaggcgggtgcgagatcgctgggctgaaggcgtacgaggaatga

SEQ ID NO: 529332 - DNA, 1350 bp, Stenotrophomonas maltophilia
atgagcatgaagcgaatgttggtcgttggcgcagttttgagcttgatggggggggaagcttgggcagtgggtccaagattctccaatcatccaagcacgacagttctcagcgtttctaagtcacgtccagctcccggggatagagtaaatttggttgctactgtttctgcgccagctcttggggcttttttcggcgttccgatcggtggagatgacattggtggaacggtagatttcaaggcgaatggagtttctattggatcggcacgaattgggcgcgcaaatgcacccgtcgttggcagggtgtccgatctcgataagggctgctttacggcgacgcgcgatatcacacgttgcacgcttgtcttctactacgcaaatcaggtacggctctccgtgccatatcaaattccagtcaatgctgggaatgtgcggttgagcgcggcattcagtggtgacggaaatttcgcccagggttccacttccgctgatatcgtggcgccgtctccgccggtggtctatgctttgcagcgttccgtgaatcctgctcggcttgacgcgctttcccccgaaggcggctacctgtcctacaagttccagacgccgacttcgctttcgaagttgggcgacacttcacagttccagatccagatggcagattttgatgcggatgggatcgacgatctcttcttcatcaatcgttcgaataccggatcaggaagaaccgaggtgcacgttctcaaggggcctgagtatcagacctatcttgtgcatgccgccaccgcgctgcacgaaactggcaatggagcggactggaagttccttgttggtgactacgaccgtgatgggcttctggatatctatgcggtgaagaagagtggctctgctggaaaggttgagctgcacgtactggatggaaaaactggctactcaacttttttggcgcagcacgagactgcgctggacgctgccggcaccagcaaaagcgtagactttgcgctgggtgactatgatcgagatggaaagccggacctatatttcatcaacaagacaggggcaagcggaaagaccgaagtccacgttctgagcgcatcttcagcatttaaagccttcagtgcccatattgtgaccgctctggggttgactggtgcgggaaatgaatgggcgttcggggtggcggaatacaataatgacggtgcgccagatgttttcgcgttccgtcagaattctgcaaaagcagaggtgcatgtgcttgatggggcgtccagcttccagagttcactgcagcaggtatcaacccccgttgacgccggtccgggcagcggagttgaactgatggtgggtaactga

SEQ ID NO: 529333 - DNA, 654 bp, Stenotrophomonas maltophilia
atggctgaggcacaacgcgatcgcgtgatgcacccggagatcggaatggatctcgcagagcgcgtcgtcctggacctgctgggaagcggctggtcgcgccagtcgctgcggaagtatgaggtggccgggccgaccccgtgcggcaccgccttctacctgctgcgggaaggcggcatcgccgttgcctacttccccatcgccgaattcacggacgcgaacggccgcgggcttttcttcgccatccgcgacttcttcccgccggtccacaagtctgcacacggcgacgtcgagagcctgaagccattcgaggtgggcgaccaagttctctcgatggaccgcgatttgaatggctcgtggcactacgacgatgaagtgcgggccagcgagtggcaccttctgatccccgttttcactgtcgtctccgtgcggctgcatcccggacaccacacgcagttcggcggcagggactactaccaggtgaagatcaaagaccgcgcgggcggtggtggcggctaccacgaccttgtgcccatcgccggcagaccgtggcagatgcgtggcgagggagagtgcctgatccgcgtaaagcccgcgaccttggccgtcgctgtccctaccccggcactgccggaccaactggacctgttcgcatga

SEQ ID NO: 529334 - DNA, 552 bp, Stenotrophomonas maltophilia
atgaacgccatcaccatccgtaccacgggtaacgcggagatctccatctccaacgaaaccatccagcctagccgcctgagcgatctcgccgccagcgaattcatccagcgccaagaggcaacgggacataccaagctctttgccaacggtgatagcgccgacggcagcgacccgcgcaccgaccacgtcgcggtgatcgaccacgccaccggcctcatgtgggcgatcaagtccatcggagacagcgacggcgacccgatgagccaggccgactgcgagaaggcttgcagcgagctgcgactgctgggctacgacgactggggaatgccgacccgcgcagaacttgccgccctggtcgatgacacccgccatgagccggccatcgatacctcgctgttccccggcgtgctgccccgctggcactggaccagcaccccggccgcctggtcctcggcgtccgcgtggttcgtcagtttcggcgacggcggcgtccactacggccaccgctactacgacgggttcgcgttggccgtgcgtcgtgccggtcagtga

SEQ ID NO: 529335 - DNA, 240 bp, Stenotrophomonas maltophilia
atgaaccgttctgttgtcatctacgagccgcaacgctgcggcaaaaccaccaacgcgcaggagctgcgcgagcacttcggcatgaaggacgtattggacgattgggatggccacaccgcgtatccgctccacgacacgctcgtcctaaccaacaatgcagatgcgatcgcgcacgtcacgtcgcgcgttcttcatcacggatgcgcaatgcgcgaactgctggcggcggcgcgcgcatga

SEQ ID NO: 529336 - DNA, 996 bp, Stenotrophomonas maltophilia
atggcgaacatctacatgagtaccgattcgggatcgcctcagctttctggtcaagctggaagcctggtcgccttgctcgatgctgtcctcgtcgacggctatggcaccggagtcgatcgcaaagaaggggctggttggaccagagaattcacttctaccaacaagcggggataccgtaataacccggttagtggaacaggattctatcttcagatcgacgactcagcatctgctggcactcctggctactgcttcgctagggggtttggttcgatgacggcatttgatgttggtttgaatcccgctccagttttggcggtggggcagagtgggcttgttttggcaaaatcgtctcagctaaacggtggtgcgcgcaggtggttgatcatagctgatgacaggattgtctatatttttatcaatccgtggccgtctggaaactactatcatccctatttctttggggattttatttcctataagccgggggatgtgaataactggtgcattggcacgcatcagctcccatcattctcggaaagcactgaatttgatcagcgcatttttacgacttcgaactcatatggaaacgtggatgcaagtcgtccctcactgtatttgccatccaccgtagaaagtccgagtcgggcggttacggcctacttggtgggtggctttcgtgatggatcaaaccaagcttggggcggggcgggaaatttatcttcggtgtatcctgatccggtcagtcaagggctattgttcagtaatgtccagatttttgaatctggtatcagaccgcgaggccagcttcctggtatcattgcgcccctgcataatcgtcctcttcctgaattggttaggcagccggctgggcatggcttgggtgacgctgtttcgctgctggcagtcaatttcactggtcgaatttcgacctcggcaagcgcaacgcaagaggggcaggtaatcttcctcgaagggggtgactggtggcagtga

SEQ ID NO: 529337 - DNA, 714 bp, Stenotrophomonas maltophilia
atggaagcccgtcttgccaatggatcagcccttgagaagacaagggtctatcgggaactggcggcccgccacggacgcacgtccaaggcatgggaataccgcatgcagaacatctcccatgttctagatcaggcgggcaagccttggctacccgggcttcttccagcatcgaacgtgggtgcaagggttgagccgaaacttgccaagctcctcgggctatctggtgagacgctcacgtcggtctctggtcccacaaggggactgttggagcaggaggtcaaagcggcggaggcatctggcagtttctcaccagcaaacgaggcggacgagaggcaacgtgtgctggcagctatcgttcggcggcgcgggcagcccgccttccgtaaggctctgctggacgcgtacggcggtcgctgtgctatgacgggatgcaatgtggtcgatgcgcttgaggccgcccatattcacccctactcaggactgaagagtaacgatgtcaggaacggtcttttactccgtgcggatgtgcacactctattcgatctatatctggtaaccatcaacccagactctctgcggatcgccgtggcacctgctttgcagaactccgcatacgtcgagctggagggcaaagaactaacgcccgccagctcaaatgatgtacttgccagcccggaatcattaacttggcatcgttcccgttgctcctggtaa

SEQ ID NO: 529338 - DNA, 1608 bp, Stenotrophomonas maltophilia
atgagtgctaagcagcccgttagtctaaaacagataagaaattcaatgctctgggctgcttggggcgacgcagtgggttttcccgcggagcttgtttcagaccgggaatattcgaagagagttggcgcaaagggatggggagggactccggcctggaagaaagtggtcgggggcaggtttggtgtacaggttcagctgccagccggtgcgtattctgatgatacgcagctccgcttagccacctgtcgtgcaatatttacaggtgggcgcttcgatgttgagcttttctcgaagatcgagctgccaatatggttgtcttacgcgctcggtgccgggcgcggaagtaaggcggctgcaagttcgcttacttcaaacaatgtcgcatggtttagcaatttctatagtgcgaaaggaattgattatatgtacggcggcggaaatggcgccgctatgagaattcagccccatgtgtggtcatgtgctgatttgtcgtcacctattgcgtacatggtcgacgtagttagaaactcggtatgtactcatgggcatgttaggggaatcattggggcagcgatacacgctcggtttcttgcctatgctctaatgacgcgcaaaattccaccgctcaatctatggagtgagcttgcacatgacgccgcggaatctgcagttggagctatcgatcaagacgagcaattgagccaaatttggctgcccacttgggaggcaaagtcaggagtagctttctgcgaggcagttgaagaggttctacgcgaatgggaacagctagtgttacttgcgggtgatattcgtgccgagacagaagactatagagctgcatatagacgtctcgtcgatagctgcggagggttggattcttcgtctagaggttcaggcattctatcggctctattgtctgcggcgggttcgctttggctcgatcaagccggagagcgtggtgctctagttgaaatgggtaccctgctaggaagtgacactgataccattgcatcgatggcaggggctttgataggggcctgtagttcgatcgagcccccagaggttattcaagacagggattatttgattcaatgcgctgatcggctttggcgattgtcacaaagtttggctgttgatgattttatttatcctgacttactctattggcagcccccaaagaatgctcttgatgtgatgagcatcaagacaaaaatgatagttgttccgggcctggggcgggtctcgcctaaggatgggaaatgggttttgcggaagggtggtgtcgcttttcagtggtttgagatttggttcggacagacgattttatgtaagtaccgggttggagcggaggatcctgctcagcgctcacacgagagtgttttgattgaaaatgccttgcctgatctttttgttgacaaggtcgacgtgggttcagttgaggcgcagatcgataataatatagatgcgctggtttcgagtgtgctagattctaatttcaatcccggtattttgggtgggattttgtcagaaatgatcaggagtgggcggcccgtcgaggatattgtctgtttttccgcgctggtgactcgatccttccggtcgcgttga

SEQ ID NO: 529339 - DNA, 651 bp, Stenotrophomonas maltophilia
atgaccatcgaggatttctgcgagactcgaggagtgtctaggattctccatttcacgacgaataggggctgcattggagttcttcattccagggctctgcgctcgcgacaaaggctgactgaagacgagcagctgaagttcgtctttcagccaaacgcggcttcaagaacaaaggatgctgcttggctggactatgtaaacctctcgattgaaagaataaataatacgttcttcgggatctgctctgagcgatggcacaatggtcgcgataattggtggtgcgtacttcagttctcgccagaaattcttactcatccaggtgtttttttctcaaccaccaataatatttacacttcggtcgttcgtggggagggggttgcaggaattgccgcgctctatggcgacaaggtgcagcgctggtatggtaacgtggtggcccggcctggagatcttccggatgcatatacaacctgtgtccaagcggaagttctgtatcctggcgaggtgagtacgagctggcttgaggcaattcatgtcaggacgtcagaggagtctgacgaggttgcggcgcagattagggcaacaggtcatcgggacgtgccggtctacgtgaacggagagattttcggagagaatgtcgatgagtgctaa

SEQ ID NO: 529340 - DNA, 1407 bp, Stenotrophomonas maltophilia
atgaaggctctaaaggatgttgtgcctactccggaacagttagctctattttcaagagttagaccgggtgtggaactgattcgtggtgctgctggaagtggcaaaacgaccacggcactgcttaaattgaaggcagctgtcggattctatgtaaacagagtaaaacggagtcctgctaagcgacaagttaaagtgcttgtgcttacatttaatagaactctgcgcggctacatcgcggagcttgctcgttctcaatttgtggaagggaatgaaataagtcttgaaatttcaacattctcttcatgggctaaagccatggttggagcaggcgatgtgcttggtgcagctcagtctcagggtattcttcaagcgttcgcggccggtggaactattgatccggaattcgcagcggaagaggcaatgtatgttctgggtcgatttatgccagatcaggtcgacgaatatctgtcgactaaaagggttggtagagggctcgttccaaggatggagcgaactcagagaagcgtgttgctcaaaagtgttgtagaaccgtatgtccaacataagaagaaccatggtcttcttgattggaatgatctggccgtactggcggctgaacaatctgaagaaatttatgatgttgttgtaattgatgaggcgcaggatttttcagccaatgaaatgagagcggttgtcgccaaacttagaggcgaccacaccatatgcattgtcttggacgctgcccagaggatctacgcaagaagcgggttcggctggtctgaggtgggactgcacgttaagtcagagaatagctttaggctcgatgttaattacagaaatacgaagcaaatcgctgctttcgccacaggaatcttggatggcatagatcccggcgatgatggggcacttcctgactttaccaaggccaaggttgacggcgatcttcccgttatcctcaaaggaacgtttgggcgtcagatggattgggtgatgcagtttatatccgaaaaggtagacttaagcgaggagtctgtagcattcctccatcctgctggtggtggatggtttaggcatatccgggagactctcgataatgcgggcataggctatgcagagatcagtaggaaggcggactggccagatggagcagaaagcatagccttaagtacaatgcattccgctaaagggctggagtttgattacgtgatcatgctgggcataagtagtgaaaatatgccgctggatgatgaaagtacggatgatgaggcccaccaccgtgctcgccgactgttggcaatggctgtaggaagggcgcgtcggcaggttgtgattggctacaaaccagagcaggcctcagagatatctgctttcttcaaggacgagctctgtcgagtgattaatctatga

SEQ ID NO: 529341 - DNA, 192 bp, Stenotrophomonas maltophilia
atgaacaggggacaaaaaatggaagttgcaggggctttcagagcggtcaagcaggatgctgtgtccgagcccaaggtgctggctgccagtgctgaggccattgcggccgccttgtacagtaagaagtctagctccttcactgcagcacgtgtggccgacttgtttggctcggtgaaagcgaaacgccgctaa

SEQ ID NO: 529342 - DNA, 447 bp, Stenotrophomonas maltophilia
atggccgtaaccctatcgaatgcgctcctggctcagttggccgagtacggaattgacccagtgtcttttgccaaccagttcgagagctggaagcacggctggcccaagcacgagttcgagcataagctctttggaaaagacggtgcctactgctcgcctgaggtaaacggcgagcggtacgggctccgtcacgtgcacattgtccctctagccgatacggtcgcgcgcaagcgttggtttaacgtcttccggcgtaaagggaggaaggtgagtgaccggcacttggtttacgtcagcgacaagcgtggtaaccacgggctgatacttatactcgacgagcctaatgcccataagatcgcgcaaatgcgcgacccgacgtcgaggaaggcgatggagggtatggccgtcgtggccgagaacttcctgtttgatggaagtttggattag

SEQ ID NO: 529343 - DNA, 1260 bp, Stenotrophomonas maltophilia
atgaactgttcgggcgtggctcttgctgcggatagcgctgttaccgttgggtcgcagaaaatttacaactcggcgatgaagctctttgctttgtcgaagatcgcaccagtcgcagtaatgatctttggcaatgccgcgctgtcaaatgtaccgtgggaaatcgtgatcaaggagtatcgccgatccttggcggcgacgaccttcgcgactcttgatgagtacgctaagaattttgtgaagttcattgaggacagcgaagttctctttaataaggctggcgatgaaatgtggctccgtagtaggtgctacgagctcgcagagcatttggcgtcgcagtgcatgaaggaggtcaacacggcgctccaaggctcgagccatgctgggctttcgcagagcgagatcgaagatatcttcgtcgcgttcctgaaatccactgagaagaatctcaaagagtggaattcgctgaatccttcgaaggaggtccagcgccgcctcgcgccagtggtggatgaggctgttgagttgctgggtccccacgtatttggtgaggtgttccccaaagttcgtgtacttctgaggcgaattctgaaagatgcattgaagcgtgacatgtttccgcctgagtcgtcaggggttgtgctcgcgggctacggagagtcggaaatctaccccactgttctaacactggagttcgacggcgctgtcaggggctatgtcagatacaaggtgaaggacgataggtgtcagagcatttcccctggcactgtccccgcttcgatcattcccttcgcgcaaggggagatggtggccacgttcatggaaggaatgaacccgtcaattcgagacttcgtagagaccagcctacatcgtcttttcgacgcgttgcccgctgcccttatgcaaggtcttaacgtggagggtgcgaacgttgagcggtccttggcggagcttggcaaggaactgcgccaaggcttcatgaagggcatggacgatcatcggagggatgagcacgtcaatccggtcatggggatggtaatggctcttcccaaagacgagcttgcggcaatggcggaatcactcgttaatttgactgcttttaagcgccgcgtgactggagatctggaaactgtaggcgggcccattgatgtctgcgtgatctcaaaaggagatggcttggtttgggttaagcgcaagcactatttccctcccgaactcaatgtgatgttccacaaaaactacctcagagaattgggtgaataa

SEQ ID NO: 529344 - DNA, 333 bp, Stenotrophomonas maltophilia
atggccgccaagggcgagcgcatggccaacattgtggccgccaccggcctgcgctatgaaaccgtgcgggcctgccggcaagccttggggtttggcggccggaactacggggccatcaaaagcggtcccttcaactacctgcgcacgccagcagacgatttcctggccttgccgcgccaggggggcgaacgggtccacctggtggcccatgtgggatttccgcccagtcagctggtcgggccacgtgagcttccaccgcgtatgccctccctgcccgccgtgctggccgcctgtggcggctcgctgccatctggcgtggagctggagccgtga

SEQ ID NO: 529345 - DNA, 972 bp, Stenotrophomonas maltophilia
atgactacgcacccaatgagcaggattgacttggttgaattggaatccaacgtgcgcgctgatctggccgatggctgggatccccttagcgttgataacgacccttgccacagcaaagacgaccgcacgggtgaagttctcagttggggcagaaacggcctccagcaagcgctttttcccgagttctacgggaccgacgaggacgatccactgatcgcagaagcagaactgactgtatgcaagttgctgatggagcacggggtccacccggacgactgtaaacgtgtgccctcctggcaaggatttccaaccccgttgacccaagcaatcaaaaggaaaaacttgcctgtggtccagcttttccttgaccacggcgcagatcccaacctgaccgattttgagacatcccgtgtttccagccccttgctcctggctgctcgccagggcaatcaagcgatttgctctgcgttgctgaaacacggggctgacccgaacagcctttatcacaatgagacttatgggccgttcccagcgctggaccagcgcgaagaagtcggcttcacagggaacatcaacgactacacgggcgcacttaagggccgtttcctttcgcccttgcacctagccgccgttggtgggcattcggccgtttgccaggtgttgctggaacatggggccgacccactgaaaaccgctgaggtaagtatgagcagttatggctatgaccatgacgcctttgggggatggaaagaaaccccagcgcaggcggctgatcgtgccggccacccggaaacggccgggcttatccgctcgttcgtgaaagaaaaatctctggctgctcacttgacgaacgtcgaggcggagaacgcccgactgcggagtgagcgcgaccagctgaaaaacgccctggcgggggtgctgggcagcagcgaacccgcgccagcgacgcctgagcgcaagcaccgattgtaa

SEQ ID NO: 529346 - DNA, 345 bp, Stenotrophomonas maltophilia
atgaacgaccaacgcacctttctccaagccgtccacacgatccccattgaactgccgcccatgcggccggtgggtgcggatctggatggcttctttgatgaagacgctttgaccgaagccgatgccctggacagcgcggtggacgtggagttgtgccgcttgccggatggccgttacacgatgggtgttccggtccaacccgaagcgggagcggtgttgctttccctgggcgaagccctcgatctgctgcgggcttcgttgctggacggcgatggggtgacggtccacaccgacaccgtgccgggtgctgaaacggccgtgcggcaaccggagcaacgccaatga

SEQ ID NO: 529347 - DNA, 1236 bp, Stenotrophomonas maltophilia
atgagcaagcgaaacgaatatgaccgcgaagtcgccgagcgcgtgatcgccgccctggaagctggcaccgcgccctggcaacggatgtggaagcctggcactcccaacccatcgggcggtgtgccgttcaacccaaccacgggcaagccctaccggggcggtaacgcggtgaacctgcggatgcggcagatggaactgggcagcactgacagccgttggttgacctacaagcaagccactgcccttggtggccaagtgcggaagggcgagaaatccacggccattgaatactggaaaaagagcctgcgcaaaggccaggacgacgacgggaacgaggacgacactgcagcagccaaacgctcgttgaccgtgttccatgcccgcgtctttaacgcctcgcagatcgacgggttgccacccccgccgccccaacctgagatccccgaggcgttccgccacgcggccgtggaagacgctttggagcgcctgggcgtgcccgtgcagcacgggggcaatgaggcgttctattcgccgcagctggacgtgatccagatgccggagaaacagcagttccacaccccggatggctattacgccgtggccctgcatgaggcaggccatgccaccgggcacgcttcgcggctcaaccgcgacctgggcggtggcttcgggtcggagcgttacgcccgcgaagaactgcgcgctgagattttctcgatgatggccggtgaagccctacagctgggccatgacccagggcagcaccacgcttacgtggccagctggatcaaggcgttgaaagaagacccgcgcgagatttaccgagcggccggggatgcgcaaaagatgctggatttcctgggcatcgaaccgccggcaccgctccaggtggtcgaggcaagccacgaggcggaccaacaggccgcgttcgtgcgtgagttcgatttgctcctgcagcgcgactacttcattgggatcgaagcggccgggctggacgtgtccgatgtgctgcgttaccgcgacgccggcagcgcccaggacgcggtggacgaatacgggcgcgactacgggttgagcccacgcggtgcctgggacccaaagccctcgcccgagctggaacaggagttggccacgttgcgtgcccagcgcgaccagctgaagaacgctttgaggggcgtactctcagagggcgaaccccaggtggcgcacgcagcacgcggtggggtgacgccatga

SEQ ID NO: 529348 - DNA, 1395 bp, Stenotrophomonas maltophilia
atgaacgccttgaaagaagccatccagcgcaacgatggcgacacggtggccgcgttgctcgatgcccaaccggacctggtgcgtgacacgtatttcctgagcgaccagcccaccacgtgccccaagtgcggcgcacgcacccagttcaccgatggcccgcagcaagcccacatgtgtgggccctgcgattacgtctttttggccgaagaagaccccaacccggaacctcccatggatctcgaccgcgaacccatcgacctccacgctgccgcgctgcgcggcgacgtggtgaccatccgccaggcagcgcacgcaggcgacgatctggatgcgttgaacagccgtggcatgacggcggcgcacctggccttggccggtgcctacagctacaaccacgggaaagaccgttgggaagtcagcaaaccacacctggccgcgttccatgagctgctggcctgcggtgccagcgtggacgtgctcaacacccagggtttcagcgtgcggcaacaggccgacatcatgggcctgaccgacccggacgggcccaccacccccacgcagttgtttggtcccctggatcgctttgcggccgtgtgcgaagcggtggaacagggcaacgcccaagccctgcgcgacaacctggccagcgttccaccggaccttgggcagcgcttgcgcgatccggacgggttggggcccaacctgctccacgtggccgccaacaaaggcaacgccgaagtgctggggctgctgctgcgtgcgcctggcttgtcccgcagcgatgtgctcaacgcaccgcactttggcatgaccccgctttacatggccgcgtccaccggcaacgtcgacgcggtccatgcgttgttggacgccggggcacgcctggagacagacgcagtggccagcccgctgcacgtggccgccgaacaacgcagcccggccgtgctggcggcgctgctggaacgtggcttggcatcgcccagtgtgcgcgataccaaccaagccacaccgctccacgtcgctgcaaggaaagggaacaccgagcattgccggttgctggtagaagccggggctgacctggacgcccgcgacagcctggagcgcacaccgcgccaggtggccgctggcaacgcggcggtgctggcagcgatggacgacggcttggcggcacgcaacgcacgcctggttgacgaacagcgccaggagcaacaggcgcacgccgtgggttcccagccgctggctcacgccaccctggaagcacgcctggcggctctggaagcagaaaacgcgcagctgcgggccgagcgcacgacgttgaaagctgcgttggaaggcgtcctgggcgtggatgaaaaccctgttccgcgttcggctggacccaaccccaagcgttga

SEQ ID NO: 529349 - DNA, 1629 bp, Stenotrophomonas maltophilia
atgaaacaccctcgcttgaaccccacacccttggccgctgcggttcgccgtgcggccggttttaccctcgttgaaaccctgctgggccttggcgttgccacggccattggtgcagtggcattcgtggcttacaacgtcacgtcagtgaaagccgatgtgcgcagtgaaaccgaagccatggagcaaagcgcgcagcgcatcgagcgttccatcggcattgtcggcaactacgccagcgtgtcatcggggattgttcgccgcgatgacctgggcggcgatcgccacaagcgagcgggcggcagcgagctggtcaacgcctggggcgaaccgctggcgtttctcccggccacggtgggcaatggccctggcaacaatgccttcatcatccaacaacgcgtgccagaaagggcctgtgtgccgctggtcagtgcgatggccacccgtgcctttgacgtgcgcgtggacggcgtgagcgtgctggatggcgaaggcggcagcctggacgttgcggcagccggtgcggcatgcagcggcaacacgggcccccttcaattcgtgttctacagcggcatttccggcggcagctttgttgctgctccgccccttgttttgcccactgccccgcctgcggtgtcgcctccgacctcggcacccgtgggtgggccagtgggccccgtaggcccggtggggccagccgggccggttgggccggtggcaccggccccggttgctccagctcctgcaccgatcatcccgccaccttcaagtggcacgcccgtggctcctgtcaccccagggccggttgcaccaccgccggcaccggtcagccctcccacctcgcccgtggccgcttgtgtggctcctgcaagccgcacgacgaccgaaggccagacgcgcgccatctgcccagcagggcaatacgggcaagtcaccgaacaacgcgtgggaacctacagctacagctgcccggaagcctgggacaggcccgcagaggcgttttcgtgggcagggtggacggtcaccagcaacacgtgcgcgacgtgcccaggcgctcagccacagcaccaaacgcagtgggtggccacgggcgaagcctgccccgctgggcagtcaggttcccacacctgggaagccgaacagatccagacccgcaccggcacttacaactgcccggcgggcactgccacgcttccaggcattgactggtccccctggggcgggtggaccaacaccggcaaccgccgctctgagagcaacacctgcgcgccttcttttgaaatcaaagccacctgtagcttcacaggcgcacagaccaaccaaggccctgagaagtggaacggggggtgtatccaacccggccagttctacatgcgcacctcgccggtttcggcggtgttctggctgacttccagcgttgatctgtcgcaatacgccatccagtggtccggcgactgcgtgggcaatgcgacctcgtgcaccgctgagcaagtgcgcgtttccgtcaactcgccccatgacaagacggcaacggtgacggtgacccaccgcgccacgggtcagcagttctctagaaccgtgactgcgcaatggcgtgttcaaggcatcgacaagggcggtggcggcaattaa

SEQ ID NO: 529350 - DNA, 261 bp, Stenotrophomonas maltophilia
atgcccaaccctcttttccttcaccacacccaggacgccgtggatgacacccgcgtggtcatgcgggcggccattccccgtgagcgcgacggggtgaccttcgccaaacaggccttcttcctgttgccggtggagctgtccgagcgtgtcaaaggcagcgtgcacggcgctcctggccctgcgatggtggccctgattgattgggcgttgtcgcagctggaagccgaaggcaaaacgctggtggtcgaggaaaggcggtag

SEQ ID NO: 529351 - DNA, 411 bp, Stenotrophomonas maltophilia
atgaccccaccgcctgccaaaccgcttccgcccggggtcaccgtccgcaaggtcgggcccatcgacgtttgggaaaagcagacgccgcactactcgctttcccaggtgaaaaccgtggttgggcaatacggagcctcggttttcggaggaaaggccatccaaggctttactgcgatggggctacagatgcagcacgcggtggctgcgatcctccagttggaacctcggcacttcttcaagtcgatgacttccgaagacgacccaaatcacaaaacctggcaggacgtgtatcacggccccacgcccaacggtctggcttacatcaagttcatgattttttacccacccgcccaaagcagcaccgccctggccccaacgcccaagctcgttatctccttcaagagactgtga

SEQ ID NO: 529352 - DNA, 567 bp, Stenotrophomonas maltophilia
atgaccaaggaacacgaacacgactaccccacccttgaaccgggccagtgcccggcgtgtggtgcgatgggttccctggtcgcgttcagcggctcactgccgctggtcagcggccccctgaccaccgacgttcccgacctgaccggcgagcagtgcaagcgctgcgaagaaacgtttttggaaccggagagccaggcccggttcttggcggcggccgatgacctggtcatccgcggccgcaaggcggcgggtgaaaaactgcgccaggtccgcatcaaactgaaactgacccagcatcaggccggggaactggccggtggtggtcccaacggcttcaaccgttacgaaaagggccacgcccagcccgtggcggctgtgttcaacctgttcaacctgctggaccggcacccggatctgctggaagaagtgatggaagttcaaccgttggtgcccacccgtgtggcgtttgagaaaggcccggcgggaacgacggtgacgatcaacaaaaagggccccagtccgaagaccggggcccgacggggtgcggcggcatccgcagcccgttga

SEQ ID NO: 529353 - DNA, 387 bp, Stenotrophomonas maltophilia
atgaacgtgcgacccatcgccaaaccaccggggttggccattggctccctgtcggtgggtgtggcagagcaggacgggcatttttacgccgaggtgccacccttgggccggttgtccggctcaagcctggaagggctcgcagcggccgtcagcgacgccctgcaggcgttccaggagcggggcagggcactggaggccaacgagctggaacgggccctggaggtggcccacaagcaccgccgcgaaagcctggcaaggctggcccagcaagccaccctggaaacggccagggaacaccgggtggcggccctgcgttacgcggtgctggtgctgctgttcatgcccctgttgaaacaaagcgccccagcttggaggctggggcgctaa

SEQ ID NO: 529354 - DNA, 2211 bp, Stenotrophomonas maltophilia
atggcggcatccatgaccagcgacaaccaacctttggacgaccaggacgcgcctgcagaaaaggaacgtccttgggccagcgtcagcgaagaaatggaactgctgatggccgaaggcgatcccctggacgagggggaaatcttttacagcggttcgcttgggcaaatcacccgcaaggggttttggaagctggaccgcgagggcatgccgtattgcgtccaccccctgccgctgtggccgattgaaaccatcgatgcggaaggctcgccggacgcgactggcgaacccaccatcgccacttatgtccgtgttcgctttgcccgtatccagggcggtgtgggagaactcaaactgccgctgggggaactgggcggttttggccgccgtgaccatcccctgacccgagcgggctggaaatctccatccagccgccgggccggagccgttgaagaactgttgacccaagccatgaccgaccttggcgaccagggaaaactgccagtgcgcaaggggtatgaaaccacgggctgggtggaccatgaccaacacgtccgccctggctctgaactgtatgtgggccatgcattgggctccacaatcactgccggctcacgggatgtttgggcgaagaccatcacagagctgatggacgacagcggcatcctgtcgctgtgcgttgccgcagcgctgggctcgttgttccgtggcgtggtcccgctgccccacgacaccagccacatcctgagcctgaccggtgcccccagtcgcggcaaaaccacgatgctgaaagtggtttcctcgctggccggtgtgccggcgaagccaagctacctggacggtgccagcactgcgcggggcttggaaaaccgcttgggagcaagcaaccacggctggatgctgttggacgaaggcgatcagctcttgatgcgtgattctgacggtggggccatcacgttgatgttcatcaccaacggcggtggccgtgagaagtcctcgcagagtggccatgccgtccaaggcgctggatggaaaaccaccctgatcatgaccggcaacaaatcgttgttggacttggccgccagcgccaagaaaggcgaggccttggccacgcgcatttttgaactggacattctcgatgccgacctgacgacgttctctgaaatctcagcactaccgcaacggcttcatgccatcaccgaaaaccacggttgggcttaccccgcagcggtggaccacatcagcaagaaccgtggggagtggatccagcgtttctacgagaacgacgaagaactgcgttccaacccgcgtttgcgcccgattttcaatggggatgaacgcctgttggccttctttgaactggccctgctgggcgcagacttggccgaacacgcgatcagcaagaccgccagcgagcgttgccacgacgcggtggccatcgccctggcgcgttacgagcaagagccggagcagggcatttcccagtcgctccagcgtcagcacaagttgttgctggacctgcacgaatggttgtcgttcaacgccggccggttcgtgtggaaaggctacgcgtggaaagagccgatgcgcctgcgcagcacgtccggcgaagactacgagccggtgaccgagggcgaccggcagatcgagcaggcccgccacctctccagcagcgctttgggcggtggacgcggggcgctgggtcaggtcaagcaggttcgcgtcatgaaagacgaactggattttgaaggcgaactggtcctgggcgcggccgccctggacgagctggagcgtgtggccaagatcgaccgggccgagctgaccaccgccgccaaggcgtttggcttgctccagaccaacgaccagggccgcgatggttacaagctgtccggtgcgctcaaggcccagctgggaggcggctcgcgcgggatgaagttgctgttgcgcaagcccgacctggcagaacaggcccgattgttggccgctcgcccagtcactggggcttggaagccggccggctggaaagacgacagcggcatgagcgatttgtgggaaccccaggacacggccgccctggaacaggtggcccgcgaaaacgcagagcaggacgcagctgggtatgaaccgctccatgtgcctggctttgaagacgtggacgcggatccgcgttactcgaccgaaagcattgaagcgctctttggaggcaagccatga

SEQ ID NO: 529355 - DNA, 1020 bp, Stenotrophomonas maltophilia
atgaaactccccaccggctccgatgctcctgcccatccccgcgctgacgacgacatagccgctttgctggcggctgcggatgcgaggatccagcagcgcaaaaccggtggggagctgtcgcctccccctcccgtggtggtggatctggccgccgagcttcgccggccttggctgtgggtgcgcccttggcgctccaaggcggtgccaccgccggacctggagcgcgccgaaccgcttggcccgcttccaggctgctcacgcaaagcgtcagcctggtgttcccgacccggtgaccccacgggcccctggtgggccctgcgtttggacgctggcgacgacttggacagcgaaaccctcgcgcggtgctggcgggtgtggtggcgttcgcagctgccgttgtttaccgacctggacgacttgatggccgatgccggcgacagccccgccgcccaagcgtggctggggctgacctgggaagaagcggtgcgcctgggcggccgggtgtcgctgttcccagcccccggccaccgcgatgaaaaccacgttcgtacgatggccaaaggcttactgggcttgggttacgtcaacgcctggttgcgtgcccagggggcacccaagcggcaaccgaaggtgaccaccttggaggccaaccagcggcacgcctcgctggccgtggcgtccgcccggcaaaccttggactttgcccgcaaagacctggcccaggcccgcagcgagcggggcagggcgcgggtgcgcatggcccaggccaaggcaaacgacgtggtggggaccacacttgccgcgttggggttgcgccgcgccctggaggtggaagtccagcaaaaggccgtcacgctggccgaagcggcggtgatcgaagctaagcggcattgccgggaagcctacgaggcgttgaaggccgaacaggacaagctggccgccgccaacgctgccctggaaaaggccgtgcgggctcggttggaagaagcccaagccgccgcgccgccgcccgccgcttga

SEQ ID NO: 529356 - DNA, 1872 bp, Stenotrophomonas maltophilia
atgaccattaccaagaacggcgcccccgtggggacaaagacggtgaaagccttggcgtccaccgacagctggcagtcgcccagcgattacgtggaccccctgaccggtaaggtttggcacgcggaaacgctacaaggtctgtttgacttgcttgaagagaacaacgtgcagttgttcgatcacgatgcgatgcgtgcggctggcaaaaccacggctccgagcggtggcaaacgcggaaagggccctggtggtggagacgatgtccagtgggaccgtttgctgatccaactccagcattacccagaccccgagaaggcccgtcagatcatcattgaggcgctggccaaccctaatgtgtcgtataagaaaaacattgagggggatcgattccaagacaaagaaatgaaaggccgccgtgccgtgttggcccatgaggttcaccacgacgacgagcgcggcccccacttcatggcccaggttcacaccgtggcgctgaagcccgatggccacatcagccagaaatggagcttttcaaacagtaacgaggccacgcacatggccgcacagatcaacgaagcgctggccagccatggtttggccccgctgatctggcgcaaaagcgacgaaaccggggcatctgtggcagagcgcaaagcccagttggatgcccaggagtctgaggaataccgggaagccgctgaaaagggcgaattgcccccgttgctggaagacgccgaagcggacgctgcaaccgacgccatgccgatctcggcaaagaaagagagcttgcgccaagccgctcaatcagtcggtgcccaggctgccagtctttacgctcaagccgccgcgctccagaagcaaaacgcgatgtatcgcaccgccttgcgcgccctggagaacgaagaacagcacttggcacgcattggcacgctgacggccaagctggaagaagccacggcaaacgccgaacaggccgaagcccagcacgccgccacggtggccgagcaggcgacggtgatcgagcagacccaagtccgggccaccgaactggccgagcagctggaaaccacggcgggccagctgtcggaaaccaccgcagtgcttgaaaccacggaagccgatttggccgatgcccaagccagcctggcagcagccaccgccgccaagggcgagctggaaacgtcgttggccggtgtgcgcgatgaactggccaccgccacggcggaaatcgagcagctggaaaaccggttggagaacagccaaaccgcattggctcaagcgaaggaacagaacacgcagctggtgcgtgacttggacaccgagcgtttggagcgcaagaacgaagcccaggcggccgaagccgagctggccgaggtgcgcgacgaactggcatcggagcgcaaggcgcgggagaagctggaaagccagttggaaaccacccgttccggcctggccgacgaacgcaccgcgcacaacgccgtcaaggtggagttgcaggccgaaacccgccgcgccgaggccgaggccaagcgtgcgggcaccgccgaaaccgccgctgccaaggctcaaagcgaactggccgccctgcgggaacagttggccagcgtccaagcccaggccaaggcccaagccgccgacctggagcgggaacgcctggcacgtgagcaagcggagcagaccgcccgtgtggccctgtcggcccaggccacggccgaagcccagcgcgacgcccggcccacgcagtcggacctgcaggcggccctgtcggcacaggccaaggccgaggcccagcgcgacgccctggctgaccgcttggaacagctgaccaagccgcaggatccggcaccgggcagcaacggaccggcggcgtaa

SEQ ID NO: 529357 - DNA, 354 bp, Stenotrophomonas maltophilia
atgaacgacaaaaagccctcccccccgaagaagaccacccctgactgggcctcacagctcgcaggcgtggcccccgtggtcgaacaggtggccttcaagccgaccgctgccgccttccagcacacgctggccccggctggcccaggagcccccagggccgtggttaaggccaaggtgcgtgccggcgacgacaaccccaccaacgtgctggtgcgcgtgccggcggtcaccctggaacggctcaaggccctgaccgtgggatcccacacggtttccatcgtggccttggctgactgggccttggactacctggagcagaccggccaagccatcgaaacgaacgagcggacctga

SEQ ID NO: 529358 - DNA, 663 bp, Stenotrophomonas maltophilia
atgacccccgcaaagcacgaagcccaaatgggcaaatccatctctgtagccaacgccaagggcggcgtgggcaaaaccaccttggcgctgaccgtggccggtgcgttggccgccgctggccagcgggtccagctggtggaccttgatccccaaggctccagcctggtgtggtcaggtatccgagccgggacgggcagggcgcaggtgttcgatgtgaccgccacccctgccgccggatacgactggacggtgtatgaccacccacccggcttgccgcagaaggtgaacacccaggcgcacgtggtgctggtgcccacggtgctgtcgatgcaggactacaccgccacatcgcgtttcatccaggaactccagaagtcgggatctcgcttcctggtgttgcccaaccgcgttgagctggtggcctctgatcaatcttcgatgctggagcagttgtttgccggagaggtctacatgcccaagcgctcgggcctgcagcgggctttcaacaacggtgtgaccgtctacgacgaacgccctggcgttccgggtgccccgtccatccgcaaggacttcgacccggtgatgaatgcgctgatcggcctgctgaacaacccgggcctgcaacgcctctacgacgccaacggctaccccacctcccgctga

SEQ ID NO: 529359 - DNA, 138 bp, Stenotrophomonas maltophilia
atgaaccgcaaccgctcaactcgccgtcgtcgtcgtaacgccaacctgtctttcctggtgctgctgccgctcgctgcggtgggcggtcccatccttgccgcgttcgctttcctgttcgctggtgccactttcttttga

SEQ ID NO: 529360 - DNA, 315 bp, Stenotrophomonas maltophilia
atgaccgatgatcttggccctttggcccgcgccttggactggctggaagacctggacgaaagcccggacaccgccgcccgccgggtggcttggctcctgctgttgcccctgctgattgcactgccgttcctgcgaccgctgctcgatgtgctggacgaatggatggcatcccaaccgaagggcagggcaaggcgatggctccagctgcgccgcccatccgcccgtttcatgcgccggctggctgtcctgctctcgctgaccgccgccgtgtggtgcgtggtcgtgctgcgctggctgggcgtgatgacttactga

SEQ ID NO: 529361 - DNA, 342 bp, Stenotrophomonas maltophilia
atgctgcagcttgtggaaaccctcccgtttgatctggccagcgtgccttggcggtccatcgtggccgccggggacctggtgacctttcgccggctccgcgcccaaggggtgcccttggcacccttggccctggtcgatctgctggagcacctggcgttgtcctatggacggttgaccccctccctggaaacccggtgggtgccttgggtccgctacctggtggacgctggggccgtgctggaggatccgcgcctacggcgtgctgcccaggctttggcaaacccctgcctgtggtccgctttggaggccgccgggctctcccatccagacaatataatataa

SEQ ID NO: 529362 - DNA, 192 bp, Stenotrophomonas maltophilia
atgaacaccaccccttccattgctcccgctgctcccgtcttgcgttacgaaacggccctgagcgccgatgctcggcagcgccagctgaaagcccgcacccagctttgggcacccgatgcttgttaccgcgccgccgtccaagccatgcctgcccaggacgtggccgccgtcttggcgacctgggacaagtaa

SEQ ID NO: 529363 - DNA, 318 bp, Stenotrophomonas maltophilia
atggaaaataatattatatcatataatatgctcccatgttctcctgggcctcagacccttgcccagctgcgcgggcacagcaactacctggccgtgatggaggcgctggatcccgctgttcgcacctgctcgctggccgaggccatgcggggttcggcgttgatcggcaacattgcgggtgtcttggcgttgctcgatgccggcgtgccggccaccagcaacgacctggaggcggcgttgatcagcgtccagccgggaggcttggcggtggcccgtctcttgttcgatgccggcgcacgcctggcccacgtccactga

SEQ ID NO: 529364 - DNA, 330 bp, Stenotrophomonas maltophilia
atggcttacctacccaccccaccggccgagaaggagcgccttcgggcgctcttccggaaaatggctgaccagcagatcgaagaactgaagcggaacggccccccggacgtgcgccgttttctggagacctggaaccctgtggcttacgccatcgaggaagaagccaaacgcatcaaagcccgcgatcaggagacggccaacctggaggcccagtgccggaacggtgcacttctttcggcacaagagcgtggccggcgggaagcccgggaatacgccgaacgtgagcgcaagcgttggctggccgaacaggagcgccggcatggaaaataa

SEQ ID NO: 529365 - DNA, 3015 bp, Stenotrophomonas maltophilia
atgaacgataagccccgcaaagcgcgcgtggcgcgccccacgctgaaagagcgggtggaataccgcgacgcctccgaagccgtgcaggagttccgggaaacggccgaggccattggccgcacgccggccgactgcctgcgcgaagccgcccgtgactggaccgcaaagacgaaagcggtttacggcctggctccttacctgctgttcctgttcgcctcgctcatgcccggcctggcgttcgccgaaggccccttttccgtgtccgacagcgacctgtccaaaaaactgttcctggacagcttgtttcccgagctgaccggtgccggtggcacatcgccccttgctgctgcagtcggggtgttcaactccgccgtgttgatcgtggcaggtgtcctggtcatgtatacgctgatcgccggcacgctctccaccgctcaggacggcgagctactgggcaaaaagtggtcgagcctgtgggttcccatccgcaccaccctgggtgcggctgccatcatgcccacgttcggcgggttctccttgatccaagccatcgtgatctggctggcgctccaaggcgttggcatcgccaatgccgtgtggggagcctacgcagaaaacccgttggccggtgccgcttacgtgccaccgtccgaagtgcgccagctccaaaaaacagccggtgccatgttccagatgcacgtctgccgcgccgccctggccaaagaacagcagcgcaccgatatggccgccttgggcagtgtgggcttgaaagactggaccgcttccaagtcgtcgctggacagcaacggcagcagcagtgggcaatggggctgggagctgaaaaccggttggggtttcagctgcggaaacgtgctgatcagcaagccatatccgggcgacattccggccgaaagcgcgaccgcaaagaacctgatcaacccgtatgaagtggcccaagccatcttcccagcgcaccaggcggccatggctgcgatggatgcccgcatgtccacccttgccgatcagttcgttgaaaacccctacaccgccgatggcaattcgatcaacggggccatggtttcggccggagtgcgtgcggcagctgaggaatacgccgcttcgatcaagtccgcttcgcaggcttacgccaacacgctccagtcggatgatttcaagcaagcgttgacgcaagacggctggatgatggccggtgcgttctacaccaagattgctcactccatggatgccctcgcatcggccaccggccgcacggcgaaggtgcggttgaacaactcgttccccgaaacgttcgccaccacgcgcttgctctgggccgaaggcgctgcggcgttggaagaagtggcaagccctggtgctgccaccatcggtgccgagcgtggcggtgaagtcatggacaaactgctgaccatcgccctggacgtaggccgcgacgtgaacccagacggcatgagcgggcacccgctgatcgcatcgaagaacactggggaggccatgaaaagctggggctggggcatcctgactgtcggtgcgttggccgtggccggcgtgggcatcctggccggcaacgtggccggcaagggcctgggttctgacattgcgtttctcggcgtgatggatctgatttcaacgccgattttcgccctggtcgggccgctgatcctgggcggttccatcctggccaacgtcgtgcccatgctgcccttcatcctgtgggtgggcgtcatcttgggttggatggtgctggttgttgaagccgtcattgcctcgcccctgtgggccgtggcccacttggcacccgatggtgacggtgtggtggggcgtggtggccagggttacatgctggtgctttcgctcacgcttcgccctgctctcatggtgctggggctgatctgcgccatcgcgatcatcgtccccatcggtgagctgttgaacagcacgttcgccaacgtgttccgcatgagcgtgatgcaggacaacgcctcctggggtggcttgaccacggtcgtggtcggagtgtgcctctatgcggtgctgatggtgacgatcatcaccaaagtgttcggcttgatccacgtcatcccggacaacgtgttgcgttggattgggggcggtgtggacaacatgctgggccagaacgcccaaccccttgccggtgctgcagaaggccaatccaccgcgctgctcggtgccggcgtggccgctggtgcgatgaccaaccagcttggcaacaagctggcgggtgcggccaaggaacacgccgcccggcaagcccgcgaggacgaacacaacgagcgccaggatgacgcagccctggagggcctggaaaggtccagggaaaaggcttggaacgctgaggaaaaggccgaaggcagcacgtcggcatccagccaggaccgtgcggccgatgctcagacgcgccacggccaggcagcggtgaacgtggccagccggatggatgaaggctttggcgagcgcctggcccaagcccgccaggccgaccagggaaccggtggcacggctgctcaagacgctttgattgccagcgaagccagcaatggaccggatgcccagccctaccagcgggccttggctgaggcccaggacgcgttcgggaaagcccagcagcacgcccaggccagccaaacgctggcccgcaacggggcactgacgggccaaggcggcggcgcaggaatgagcatggctgacaaagccgccgctcaggcccaggcgttggacagcggggccggcgaccactacagcagccgccagcaagcggtggacgcagcagcggccgcggatcccagctttgcccagggcctggacgaagccagggccagcgggaacgagcaagcgtttgtgtcggaaaaggcccagtgggcaggcgtgcgggaagacgcgatgcgcaagcgcctggccgagggcgatcagaacgtgaaacccctgcgggccagcgatgcgattttgcgccgggccgctcaagacggagtgctgtga

SEQ ID NO: 529366 - DNA, 525 bp, Stenotrophomonas maltophilia
atgggcatctaccgttacatcaaagccaaaaccacggccggcgcaaagcgcaccgggaacgcggccggaaaagtcgtgaacgccgcagaaatcgccgaaacggccagcgccacccgcgaaatgctggctgagttttgggccacccgaaagggcaccggccggtgcgaaaccttccagaacgccgtcgttcgccgaggcctgaccgaagacgacttgcgggccttgcaccgccagcactcgattgtggcccacgccaccctggtgttctttgtgatggctgctgcgctcggcacctggcacggcctgcagggctcgcaagccggagccatggcgggcctgggggccagcctggcaatggccggctatttcatccgtgccgctttccgtgccgctcagatccaacgccgcgagctgttcgctttccccgtgttcctgcgccagcccttggactggctccccgcctggacgctgccggcggcccggtccaccaccccagccaaacgccaggtgcgccatgaacgataa

SEQ ID NO: 529367 - DNA, 258 bp, Stenotrophomonas maltophilia
atgaataagagtgaaacgagtgagccaatcgacccccgcaggtgggacgagcgtttggccgatgccttggctgatttctgcaagaacagcccccgcaaagcggccttggtaggcctcgccctggtgggtctgctggtcctggattggcgctacccgctctgcgccctttacatcgcctggctgcgtttccagcccacccctgccctgctctttggggcaggcctgggggcggtggggatgctcgctcgcattgcctga

SEQ ID NO: 529368 - DNA, 777 bp, Stenotrophomonas maltophilia
atgtcttcaactccgccttcccagggccgtctcggccgggccacgccgaaccctgccgccgctgatgacggcgacgcgctgcacttctgcagcacctgcgcgttttccgatgcctgcatgtcgcagggctatgacaagaccgcgctgggcgacctgcacgtgctggtcgaccacgtcggcccgttccatgcgggtgactacatcttccgcgccggcgaatcgttcgattcgattgctgcggtgcgcgccggcatggtcaagaccttcgtcgatgacagccagggcaacgagcaggtgctgggcttcagcctgccgggcgaagtgatcggcctcaacgcaattcacggttcgcgcttcccctgcaatgcggtggcgctggacaccgtgcacctgtgccgcatctcgttccccaagctgagcctgctggccacgcgcatgccggggctgcaggccaagctgttcagcctgctcagcgcggagatcggcaaggtcgccacgctggccgccaatcaccgtaccgaagagcgcatggccgcgttcctgctggacatgtccgagcgttacgcgcggcgcggtttttccgccacgcgcttcaacctgacgatggcgcgtaccgagatcgccaactacctgcggatggcgccggaaaccgccagccgcgtgctgcgccgcctgagcgatgatgggatcatcgcggtgaagcagcgcgagatcctgctgctgcagcccgagcgcctggcggcgctggcggtggccgacgaatccgatccgaactga

SEQ ID NO: 529369 - DNA, 2304 bp, Stenotrophomonas maltophilia; identical to SEQ ID NO: 521881

SEQ ID NO: 529370 - DNA, 330 bp, Stenotrophomonas maltophilia
atgttgttgcgcggggtgttgacggctcggctgacgcgatacgcctccatcgcgggcaccttggacgcaaggagcatggccatcgcgtcgtccgcctcggccgtgagccacgcatcgagctggccaaggtggatccagacaggcatccggtcgtggatatcggccgacactccgctactgtcgccggtgatgatggtgaaggtgcccaggttgccgtcaggcagcagcgcgctggtgtcctaccacagaccagcagcccaaagtgggccgtcggcgtggatgaaccagggatctttcttgccgtccacgtcgctgatcgaccactcgtag

SEQ ID NO: 529371 - DNA, 654 bp, Stenotrophomonas maltophilia
atgatatctcaactaggggaaccgattcgattccggtggcggcgcccggcactggggtgcaagacagattcagcgcggctgatgcccggccggggcgcccggcccaggggcgccagcaagacagatgcagcgcggccgatgcccggccggggcgcccggcccaggggcgcgagcaagacagattcagcgcggccgatgcccggccggggcgcccggcccaggggcgcagcaagacagattcagcgcggccgatgcccggccggggcgtccggccaggcgcgcagcaagacagattcagcgcggccgatgcccggctgggggcgcctgggctatgagcgcaagacagattcagcgcgacgggcgaggatcggacccgaccataccggattggtcgtgtgcgtaggttcatgccgtctgtaccccgacgcgcgcactcgtctccccgccacgcctgcgcacttcatagggtgctttttctgcactgcctgcagcgcggcccagccccggccctgtatggcgttctccgggcttcgctggcaccggtccgccctgcggttccctgcgcggcagggggtgtctgcgtggcgccctgtggcctcctatggccaccttcgggcggggccaatttttcaggtgaccacgggaaggaggtaa

SEQ ID NO: 529372 - DNA, 249 bp, Stenotrophomonas maltophilia
atgaacctggtgaccgtgaccgtcgacgcggagatcgacctcgacgacctgatcgagaacctgagtcctatcagcagggactacctcgccggcctcctgaaggttgaaggcgagacagcacgcgcaccagatggccgaaccttcgaacagatcatcgaagcggcgttctatgagacgcgggcaatgccctcagtaccgcgggcgctggcggagttgttctgggttgtgcacgggagggccatgtcatga

SEQ ID NO: 529373 - DNA, 1071 bp, Stenotrophomonas maltophilia
atgagcatgagcaagcgcaaggcatccatcacgtcaaccgcagcgccgtcggcgctgctgggggatattcgggcactgatcgaagcatcgcgccagcgcgtcgcctcaacggtcaatgcagagctgaccctgctgttctggcgcatcggccagcgcatccatacggaggtgctggccgggcagcgggctgggtacggcgaagaaatcctgccgtccctggccgagcagcttgtccgcgactactggcgcagcttcgcggacaagaacctgcgccgaatggtgcagttcgccgctacgtacccggacgaaccaattgtcgtgacgctgtcacgacaattgagctggtcgcatttcctcgcgctgctgccgcaaaaagacccgctccagcgggactactacgcgcagatggccggtgccgaacgctggagcgtgcggacgctgcgcgagcgcatcgactcgatgctgtacgagcgcacggcactgtcgaaaaagccgcacgaaacgattgcgcaggagttggcgaccctgcgcgatgcgcagcgcatgacaccggcgctggtcatgcgagacccgtacatcctcgacttcctggggctgcgggacacctggcaggaaggcgacctggaggcggcaatcatccgagaaatggaatccttcctgctggagctgggtgcgggcttttccttcgtggcccggaagaagcgcatccagatcgataacgaggatttccaccttgatctgctgttctacaaccgcaagctacgtcggctggtggcgttggagttgaagatcggcgagttcaaggcggcctacaaggggcagatggagctttacttgcgctggctggacaagcacgagcgggagccggaggaagcctcgccgcggggaatcatcctttgcaccggcaagaagcgtgagcagatcgagttgctggaactggacaagtcgggcatccacgttgccgagtacctgactaccttgccgccgcgtgcggtgttgggcgaacggttgcagcaggcgaccgagcgggcgcgcttgcagatcgagcagcgcaagaaagacaccgagtag

SEQ ID NO: 529374 - DNA, 510 bp, Stenotrophomonas maltophilia
atgtcgcaactgtcctttccctcgttcgattccacgctgatgatgcgcgatgcccacgggcgctatctgttagcgtcggccgacgacattctggaagccgcacgccaggtcatcgaccagaagatgcagcgcggtgctgaattcacttcgccggcagcagttaaggactacctacgcaccaaactggccggcttcgagcacgaggtcttcgcggtgctgtttatggacacgcgccatcggctgatcgaatatcgggagatgttccgcggcacgatcgacggtgcttcggtgtatccgcgcgaagtggtcaaggaagccctgcggctcaatgcggcagcggtgatcctctcgcacaaccatccgagcggaaatcctgagccatcgcaggcggacaaggcgctgacgcaacggctcaaggatgcgttggcattggtggaggtgcgcacgctggatcacatcatcgtcgcgggaggcaccaccgcatcttttgcagaacgcggcctgatctga

SEQ ID NO: 529375 - DNA, 942 bp, Stenotrophomonas maltophilia
atggcattgaatctggcgaagctcgtgttgggttacttgaaggagcggccagatgaaaagctgaccgcgcggcagatcgccgaatggatcttcgccacgtttccagatgaatgccaagcgaagaaacagagcagccagtacgtcagcacggatgctgaactgttgcagcagttggtcgcggaaatcagctctcagcgcccgcgtttgcaaaaacggcatccagagctaaagaccaccgagggtcggccgcgtaagtactactactcggagaaatctgacgtcgccgaagttgcggcggcggagggggtggttgccgttcccattgcagacagtagcgatgccaaacttggagagcacgcgatgtacccgttgctctcgctgtatctgtgggaggagtttggcgtctactcgaagcggatcgacgagaagcgctcatcgaacaagcgtgggcctaacggtaaccgctggctgtacccggacctggtcgggatggaggacttgggcgctgagtggcatcaggaagttcgggactgcgtgaatcagtattccgacaagcgcaccaagctgtggtcgttcgaagccaagttgctgatcaaccggtcgaacgtgcgtgaatgcttcttccaggcggtttccaactcgtcatgggcaaatttcggctatttggtcgctgcggagattgaggggcaagacacgctgaaggaattgcggatgctgttcgcggcgcacggcatcggcttgatcaaacttgatgccgacaacccggcggaaagtcaggtcttgattccggctcgtgagcgcgacgagatcgactgggatatggccaaccgactggcaaccgagaaccgggattttctggaatacgtgaagctggtgaagcagttctaccagacgggggaagccaggctggccgattgggatgtgcccgagacgacggactga

SEQ ID NO: 529376 - DNA, 2997 bp, Stenotrophomonas maltophilia
atggcgacgactgacaccagcgagaaggggctggaagccctgatcgtccgcgacctctgcgctagcggcggctacgtgcagggcaacccaaccgactacaaccgcgacgtggcggtggacgtggtgcagttgctggggtttctgcaggccacgcagcccacggtcgtcaccgtgttggaactggccgttgagggcatcaagcgcacgcagttcctgcaccgcatccagggcgagatcgccaagcgcggcgtggtggacgtgctgcgcaagggcgtcagccacggccctgcgcacgtcgatctgtacaagctgctgccgacgccgggcaatgtcagcgctgccgagaacttcgccaagaacatcttcagcgtcacccgccagctgcgctacagcaacgacgaatcgcagcgctcgctggacgtcgccatcttcatcaacggcctgccggtgctgaccttcgaattgaagaactcgctgaccaagcagactgtcgccgacgccatcacgcagtaccagaccgaccgcaacccgaacgagttgctgttccagcttgggcgctgtgtggcgcacatggcggtggacgatgccgaggtgcggttttgcccgcacctcaccggcaagacctcttggttcctgccgttcaaccagggctggaacagtggcgcgggaaacccgcccaacccgcaaggtttgaagaccgactacttgtggaagcaggtactgcagaaggactcgctggccaacatcatcgagaacttcacgcaggtggtggaggaggaagacgaaaaaggcaagaagcggcgcaagcaggtattcccgcgctttcaccagctgcgcacagtccgcgccttgctgcggcgctcccgcgaggacggggtcggcaagcgctacctgattcagcattcagcgggcagcggcaagagcaacaccatcgcgtggctggcccatcagttggtcgagctcaagaccgcagccgaggcgatgctggcccagttcgactcggtcatcgtcatcaccgaccggcgcgcgctggacacacagatcgcccgcaccatcaagagctacgaccacgtggcgtcgatcttcggccactcggaggatgccgccgagctgcgcaccttcctgcgcaagggcaagaagatcattgtgacgacggtgcagaagttcccgttcatcctcgatgagttgggcgatctcggcggcaagaagttcgcactgctgatcgacgaggcgcattccagtcagggcggcaagaccaccgccaagatgcacatggccctgtcaggcgcggcgggtgacgatgaggatgacgacgaatccgtccaggatgccgtcaacaagctgatcgagtcgcgcaagatgctgccaaacgccagctacttcgcgttcacggccacgccgaaaaaccggacgctggagttgttcggcgagcgctacgtggaaggtggggaagtgcgctaccgctcgccggaggagctgagctacaccaccaagcaggcgatccaggagggtttcatcctcgacgtgattgcgaactacacgtcggtggacagtttttaccacgtcgccaagacggtagaggaagacccggacttcgataaggtcaaggcgctgaagaagattcgtcactacgtcgaatcccacgacaaggccatccgcaagaaggccgagatcatggtcgatcacttcatgacgcaggtggcaggcaagcagaagattggcggcaaagcgcgcgcgatgattgtctgcaacggaatcgcacgagccatcgactactaccgcgaggtgtcggattacctcaccacgatcaaaagcccgttcaaggccatcgtggcgtactcgggcgattttgagattggcgcggtgaagaagacagaggctgaccttaacgacttcccgagcaaggacattccgtccaagctcaagcaagacccgtatcgcttcctgatcgtcgccaacaagttcgtcaccggctttgacgagccgctgctccacacgatgtacgtggacaagccattagcgggcgttctggcggtgcaaacgctgtctcggctgaaccgggcccacccgcaaaaacgcgataccttcgtgctcgactttgccgacaacgccgaggcggtaaaggtggccttccaggactactaccgcgccacgatccaaaccggcgaaaccgaccccaacaagctgcacgacctgaagaacgatcttgacgcaaagcaggtgtacagctggcagcaggttgaggacttggtggcgctctacgtgaccggggcagaccgggacaagctcgaccccatcctcgacgcttgcgttgccgagtacatcgacaagctggacgaagacgggcaagtcgagttcaagggcaaggccaaggccttcgtgcgcagctacggtttcctggcggcgatcctgacctacggccacccggcctgggaaaagctctcgatcttcctgaacttcctgatccccaagctccccgctccgaaggaggaagacctctccaagggcgtactggaagccatcgacatggacagctatcgggtggaggcacaagcgtcactgaagatgtcgatggacgacgcggatgcccttatcgaaccacctcctcccggtggcggcggcagtggcggtacgccggaaatcgacaagctatcgaacatcatcagagccttcaacgatatgttcggcaacattgaatggaaggacggcgacaagattcgcaaggtcatcaccgaggaaattccggcccgagtggcgcaggacaaggcctaccagaacgcgcaggccaactccgacaagcagaacgccaagctggaacacgacaaggcgctgaatcgcgtggtgctggagctgatctccgatcacacggaactgttcaagcagttcagtgacaaccccagcttcaagcgttggctgaccgacatggtcttcgactcgacctaccacccgggtgcggtgccgccaaagaccccgccgcagacgggcgcatcggcgtga

SEQ ID NO: 529377 - DNA, 1422 bp, Stenotrophomonas maltophilia
atgtcagaggcgaacgtgtaccccagctaccgcacggcgcgaatgcgctggctgcctcccgtgcctgaacattggaacgagcagcgcgcaaagaccttcttccgcgaggtggacgaacgctccaagactggacaggaagagttgctttcggtgtcgcacctgacgggtgtcacgccgcgcagccagaagaacgtaacgatgttcaaggccgcgagctacgtcggttcaaagctgtgccagcccggcgatatcgtcatcaacacgctctgggcgtggatggccgcgcttggcgctagcaggcaccttggcatcgtcagcccggcctacggcgtgtaccggccgcaccgtgcggacagcttcaacccggcgtatctcgactatctactgcgcacccgtgcctacgttgccgaatacatcgggcgctcaaccggcatccggtcctcacgccttcgcctgtatccgaaccagtttctcaacatcgcgctgctgcaaccgccgcgtccggagcaagaccagatcgtcgcctacctccgggcgcaggatgcccacgtcgcgcgcctcatcaaggccaagtgcgacctcatcggtctgctcaccgagcagaagctgcgcatcattgatcacgccgtgacgcgcgggatcgacgcctcggtctccttgaagccttccggtatcgattggctgggggatgtgccagggcattgggatattgctctgatcaagcacgtcgccgatgtgcgcttcagtggtgtggacaagcactcgcatgatcacgaaattccagttcgcttgtgcaactacacggacgtctacaagaacgacacgatcaccgacgacatggacttgatgcgcgccactgcgacggtaggggaaatcgcccggctcacgctgaaagcaggcgatgtgatcatcaccaaggattccgaaacaccagacgacattgcggtaccagcgtgggttccggaagggcttcctggcgtggtctgcgcctaccaccttggattgctacgcccagatcccggtcgcatcgagggtgagttcctgtttcgcgccatcgggtctgcccgtatcgccgagcagtttcacgtgctggcaaccggcgtcacgcgcttcgcactcggcaagcatgacgtgaaaaacgctgtcattgcactgccaccagtcgaagaacaaaaggccatctgcaagtggatcgaagacgagtgcaaaccgctcgaggacgccattcagcgtgccgaagaggaaatcaagctgatccgcgagtaccgcgaccggcagattgccgatgtcgtcaccggccaagtggatgtgcgcggctggatgccgggtccggacgatgtggtggccgaagaggatctcgcggcattgggcggcgacgaagaaatcgataccgatggggaggaagacgatggcgacgactga

SEQ ID NO: 529378 - DNA, 2394 bp, Stenotrophomonas maltophilia
atgaaacccgtaaaacaacaagagcaaagcaacctgaagtgggtcgccgactttatctggaacatcgccgacgaccgcctgcgcgacgtctacgtgcgcggcaagtatcgtgacgtcatcctgccgttcaccgtgctacggcggctcgacgctgtgctggagtcgaccaagcaggcggtgctggagcgcaagaagttccttgatacccacaaggtggccgagcaggacggcgcactgcggatggcatccgggcaggctttctacaacacctcggagttcacccttgccactctcaccgcaagtggacaaggacagcgcctacgcgacaacttcgttgattacctggacggcttctcgccgaatgttcaggacatcctggcgaagttcaaatttcgcgaccagatccagacgatggtcgaagctgacatcctcggtcatctgatcaatgactttctcgaccccgaggtcaacctctccccgctgccgatcaaggatgcggacggccgaatcaagctgcctgcgctcgacaaccacggcatgggtactgtgtttgaggagctgatccgtcgcttcaacgaagagaacaacgaggaggctggcgaacacttcacgccgcgcgacgtggtcaagctgatggccaagttgctgttcctgccggtggccgaccagattcagtcgggcacctacctgctttatgacggcagttgcggcacgggtggcatgctgacggtggccgaagatgccctgcacgagttggcggcgagccacgacaaggaagtctcgatccacctgttcgggcaggagatcaaccccgaaacctacgccatctgcaaggccgacctgttgctcaagggtgaaggcgacgaggccgagaacatcgtgggcggcgcggacaagtccacgctgtcggcagatcagttccggtcgcgcgagttcgacttcatgatctccaacccgccttacggcaagagttggaagactgaccttgaccggatgggcggcaaaatggagttcagcgacccgcgcttcatcgtcaatcacggcggcgatgccgagttcaagctcatcacccgttcaagcgacgggcagctgatgttcctggtgaacaagctgcagaagatgaagcacaacacaccgctgggcagccgcatcgcgctggtgcataacggctcggcgcttttcaccggcgatgctggccagggtgagagcaacatccgccgctgggtgctggaaaacgactggctcgaagccatcatcgccctgccgctcaatatcttctacaacaccggcattgccacctacatctgggtgctggccaacaaaaagcctgcgcaccggcgcggcaaggtacagctcatcgacgcctcgcagtggttcctacctatgcggcgcaaccttggcaagaagaactgcgaactggccgacgcggacattgagcgcatcctcaagcattacctcgaccagccgcccgccgatgcggaagccgccaaggccgtgcccgaatgcaagtggttcgacaacgccgacttcggctactggaagatcacggtcgagcgcccgctgcgcctcaagagccagctcaatcgcagcgccatcgaaagcctgcgctttgccacaggcgatgaggcgctgcgcagcgagatctacaccaggcacggcgacaagctgtacacggaattcgccaagctcaaacccgagatcgaagcgtggttgaagggtgacgatggcgacgaggataccgacgacgagtccgacgacgaagacgccaagaccaccaagaaggccgtcccggaaaagcggcgcaagaagctgctcgaccctgcgacctggctgcgcgacaagaccctgatggaactggccaagctggcgcagcaggaacttggcgaaggggttttcgacgaccacaacgagttccgtgcgcgcttcgaagccgtgatgaaggcccacaacaaaaagctgggtgcgcccgagaaaaaggcgatctacaaggcggtcagctggcgcgatgagacggcacctcccgttatcgccaagcgcagcaagctcaaggcagcagaccatttcgaacccggctacgacggcgcgtacctggaaaccgtcggcaaggatcgcttcatggtcgagtacgaggccgatgccgacctgcgcgacaccgagcaggtgccgctcaaggagcccggcggcatcgaagccttcttcgcccgcgaagtgctgcctcacgcgccggatgcctggattgcgatggacgccaccaagatcggctacgagatttcgtttgcgcgctacttctacaagccgaccccgctgcgcactctggtgcagattcgcgccgacattctcaagctggaagcgcaaaccgacgggctactacacaagatcgtgggtgcggcgtga

SEQ ID NO: 529379 - DNA, 1758 bp, Stenotrophomonas maltophilia
atggccaagacacttgaagcccacgacaagctgatccgggagatcttcgaaggcagctaccagtttgagattccggactaccagcgcccttacgcctggacgaccgagcaggcgggtgagttgttcgacgatctgatctcggccatgcaggacgcccgtgtctccggcgcgaccagccaatacttcctcggcagcatcgttctgatcaagaacgacagggagccgaaatcgtcggtggtcgatggccagcagcgactgtccacgctgacgatgctcttcgcggtactgcgcgaggccatgccgcacgccgccgacgacattaccgatttcctctacaaaaagggcaaggtcagcctcggcgagaaaaacgaataccgcctgaccgcccgcgaggaagatgccgacttcttccgcaccaatattcaggagcctggcggcatcgcgcagttggttgccagcaccgacaagctggaagacagccgtctacgctaccgcgaaaacgccactctgctgctgggcaaggccaaggcgctaccgcccgccgacctgatcgcgctgtggcagttcctcgccaacgactgctcgctggttgtcatctccacgcccgatcttgaagccgcgtatcgcatcttctccgtgctcaataaccgggggctcgacctcgcgcctatcgacatcatcaaggcgcaggtgctgggcctgatccgcaccacggcaggcgacgtcaagagccgcgcgtatgccaaagagtggagccggatcgaaaacgcgctgggccgcgatgccttcggcgatctgtttggccacatccgcaccatctacgccaagcagaagcagcgggccacgctggtcaaggaattccaggagcacgtcaccgagtacaaggctcccatcgacctgatcgacaaggtgatcaagccctacgccgaagtgtgggacttcgtgcgcgccgccgacttcgaggccaccgagcacgccgagacgatcaatgagcacctgtcctggctcaaccgcgtggacttcaaagactgggtgcccccggcactggtgtatttcaagcgcttccggcaaaagcccaagctgctcgcagaatttttccagtcgctggaacggcttacctatttcctgctggtcaccaaggtgggcatcaacgagcgcatcgaaacctacgccgcgctcaccaaggaaatcgaacaggagacattcaagggcgagctggccgagctcaccacgctggcactgactgacgcgcaaaagcgcaagttcgtcgcggcactcgatggcgacgtttacgacgatctgcccaaggcacggatggcgctggtcttgcgccttgaatcattggtgcgggccccaggagtgcaactgcagaacgccgtgtcattggagcacgtgctaccgcaaacaccgccggatggctcggactggcttcagtggttccccgaccagaacgaacgggaagcctggacacaccgcctggccaacctggttccgcttgaccggaacaagaactcgtccgccagcaactacgacttcgccaagaagaagaatgtgtacttcaagggcaagggcactgcgtcgcctttcgtgctgacacaggaagtccgctcggaagatatatggacaccggcgatgctgattgatcggcagaaccgcctcgtcggcgtgctcaaaaaacactgggttcttgaggtgtcgccaaccgaatctgtcagcaaagcgcctgacaccacaacagctatgcaagggcaggcttaa

SEQ ID NO: 529380 - DNA, 294 bp, Stenotrophomonas maltophilia
atgcacgagaacaactgggagtacgcgctcgactgctccgccggcaactactacgccgccgaccggggcgaggcctatttgtcctactgggagaaaggcctcggcatcagttgggacggctccgacgtacccgagtggcggaagcaacaggacctcgtccctcggccaactgtccgtgtgatgaccgaattgaagatctactactcgctgttcggagaggaggactcgaagcctgaaactgaggccagagaagcggaagatgcccagtcaagcgtccgtcatcccgggcggtga

SEQ ID NO: 529381 - DNA, 216 bp, Stenotrophomonas maltophilia
gtgctcggggtctcgcatgtcagccccgctcacatcgatcagctcgcagacgacttccagaccgttttacgcaagagcctatttcttcgcgaggccttcgccgggcttcgcctcgctgatccttcgttcccggcaacggtctatgcccgcctggtcgagaacgaggacggcacgcacgacctgatctggtcgctcagcaagcccaaggcggcctga

SEQ ID NO: 529382 - DNA, 291 bp, Stenotrophomonas maltophilia
atgcagaagcgaaccgttcagcgcggccgaccggccggctccaccaccttcgatgccgaactggcccaagccttcggcacggtggtgcgtgcactacgcacggaacgcggcatcgctcaggagacgctggccaacttggccggcatcgagcgctcgcatattggcaaggtggagcgcggagagcatgcgccgaccctggcgatcatcttcaagatcgccggggcgctggaatgcagtaccgcggtgctgatggccgagacggaaagccggcttcaagccgccgaggcatag

SEQ ID NO: 529383 - DNA, 348 bp, Stenotrophomonas maltophilia
atgaaacagctcatcaccaccgacgaccgcacgcgcttgctggccaacggccaggcccgcgctggagggcacgacaccgacccgctgcccgtgatgcggttgttcaccccagacgcgcacgcgatctggctgctggcgtcgctcgatcctgcggatggcgatacctgctatggattgattgaccttggcatcgggatgccggcgctgggcatggtcaagctgtccgacctcgccggcatcgtcgggccgcgcaagcagcccgtgatgcgtgatcgctactttcagccaacgcggccgctgtcggagtacgttcgactggcgcaggaagacggttcgataccggactga

SEQ ID NO: 529384 - DNA, 771 bp, Stenotrophomonas maltophilia
atggctggcctgagcgccgaacatcgagagcactggtatccgaccgccgcgtatctctacacgctgcaccttgatggtccggccctggcctgggagtacctgcgccgcaatcccgactaccgccgcgactggctgcgccgccgcccggatgcggcgcaccgctggggcctgcgcctgctggaagatcccgccctggacgcacgcgacgcgcatccggcctggtttcccgatcacgacggcgtggtgcagctttatcccgatgccgatccgccgccggatgcccatgccttcgagttctggcgcgtccccggtcgcaagcacctgattcacgacggcaagcgcctggtgctggtgtcgcattggcccggctgctgcctgcggctcgcgctggcgccgggcctggaagacggcatggcctatctctatgccacccgcgcctgcgccacaccctgcgcgcgctatcaggccctggtggccgaactggacaagttgacggcgctgccggatgccgtgcctgcggcagcggcccgttcccggcccacgcccgcggcggtgcaggaactacacacgctccaggcgctcgacgcgaccctaacgggtgcgtccttgcgcgaggtggccgaagggttgttcggcgtggatgccgtggccgccgactggcacgccgacagcgccttgcgtgcccgcgtgcggcggctggtgcgtcgtggcgaggcgctgatgcgcggcggctatcgcagcttggcgcagcttgctccagttgcatcgtag

SEQ ID NO: 529385 - DNA, 588 bp, Stenotrophomonas maltophilia
atgacgaccgtttccacttcgtccgcctcgccgcatcctcgctcgcgcctgcgcgctcgcctcgtgctggcgggcttcgccgccgtcggcctcgctgcgctggcctgggcggctttcgtgtcgcagctgccgcgtctgacctacaacccgtccggcagcgtggcggtcggctggtatcgcatcgaaccgttcgacccgcgcaccgcctcgctgcctcgtccgttgtccgtggacagcatcgtgctggtgccgctgcccgacagggccgccatgctggctgcgcagcgtggctacctgccgacccgcgtgccgctgctcaaacgtgtgggcgcggttgcgccgcaacacgtctgcatcatcgccggtcaggtacgcatcgacggcgtgcctacggccgccgtgctgcgtgccgaccggctgggccggccgttgccatcctggccgcagtgccgccgccttgcatctggcgaactgttcctgctgagcgtgacgaatccggcgtcgttcgatagccgctacttcggcccggtcagcgcatccaccgtgatcggcgttgcgcatcccgtttggctggaggcacgcccatga

SEQ ID NO: 529386 - DNA, 309 bp, Stenotrophomonas maltophilia
atggcgcgcaggcgcactgccagcagggcggcgaccacggcggtggcgggcgcaagcagcagatgcaggttgacgttggcggccggaggtgttgccgaccagaacgccaggccgatcaaggccagcgatgcgagcgacccggagcggcgggtgcgtccgggcccgtcactgcggaaccccagcagggcggcggccccgaagccggccagcaacggcagtagcggatacggtgcgacccacatccatgtgctggtcgatgccagcaccagtgcgatcaaccacggcgaaggcgcacaccacgccaagtag

SEQ ID NO: 529387 - DNA, 324 bp, Stenotrophomonas maltophilia
atgcgatgcgtcctcgtccttggtgccgtgctgctggccgcctgcggccagcagccagccgacgacctcgccgatgccctggccgccgatcccgtgcggctcaaggcattgcgcgcgcaatgcgcggccgaccgacaggccacgggcgaggacgcttgccgcgccgccgccgaagccttccagcggcgcttcttctccggccaggctgggccggatgaataccaaaccttggccgaccttccgccgatcccgccgagcttcgaggagccggccgatggcgtggcgcccgcaatgccacccgaaccggaggaggacatgccatga

SEQ ID NO: 529388 - DNA, 384 bp, Stenotrophomonas maltophilia
atgacgcagatgaccattcctgctttccgcttttctgcaaatccggctttgcgccttgcacggctgcgcagcctggcccgccctgcgggacaagggctgctgctggccgcgctgctgctgttcctggccggaaccgcgcaggcggccggttcctcgatgccctgggaaggccccttgcagtcgatcttggagtcgattcaagggccggtggcgcgcatcgtcgccgtgatcatcatcatcgccacgggcctcgcgctcgccttcggcgatacgtcgggcggctttcgcaagctgatccagatcgtgttcggcctgtccatcgcgttcgccgcgtcctcgttcttcctgtcgttcttcagcttctcgggcggggctgtcgtatga

SEQ ID NO: 529389 - DNA, 1377 bp, Stenotrophomonas maltophilia
atgaccctgcgcctgcacaacaacctgactcgccagctcgaaccgttcaccccgctcgatccggcctgtccgaccctgtatgtgtgcggcccgacggtctacaactacgtgcacatcggcaacgcccgtggcccggtggtgttcggggtgctggccgacctgctgcggcgccgtttcggtggcctgcgctacgcgcgcaacatcaccgacgtggacgacaagatcaacaccgccgcgcgcgagcagggcgtaccgatcagcaccatcaccgacaggttcgccgccgcctaccgtgaggacatggccgcgctgggcgtggtgccgccggacatcgagccggaggtgaccgcgcacattccgcagatcatcaccatgatcgagcagctgatcaccaacgggcatgcctacgctgccgaaggccacgtgctgttcgcggtggccagcttcgatggctacggcaagctctcgcgccgcgatccggacgaaatgctggccggcgcccgtgtcgacgtggccccgtacaagcgtgatccgggtgatttcgtgctgtggaagccgtccagcgacgacctgcccggctgggcgtcgccctggggccgtggccgcccgggctggcacatcgagtgctcggcaatggccgccgcccacctgggcgagaccatcgacatccatgccggcggcgtcgacctgcagttcccgcaccacgagaacgagcttgcgcagagcgagtgcgcccacggcggcaagatcttcgcccgcttctggctgcacaacggcatgctcaacttcggcggcgccaagatgagcaagtcgctgggcaacatcgagcgcgtgcacgacctggtgcgccagcacccgccggaagcactgcgcctggccctgctgtcggcccactaccggcaaccgctggactggtccgatggcctgatcgaacagtcggtgcgcaccctggaccgcctgtacggcaccttgcgcgaactggcgtcagtcgaggcggtcgttgcgatcccggccacggtcgaagcgaccctggatgacgatctgaacaccccgcaggcactggccgaagtggcccgcatcgccgccgatgcgcgtcgtgccaccgatccggccgagcaggcgcgcctgaagggtgaactgctcggcgccggactggcactgggcctgctgcaggccgatccagcgcagtggttcggcactgcggccagcgacggcggcgacgatgcccgcatccagggcctgatcgatgagcgtgccgctgccaagaaggcgcgcgacttcgcccgttccgacgccatccgcgaccagctggccgccgaaggcatcgtgctggaagacaccccgcagggcgtgcgctggtcgcgcaagcgcggctga

SEQ ID NO: 529390 - DNA, 693 bp, Stenotrophomonas maltophilia
atgggtgccggtgccgttcccgcagagcggggtttctgccggaatccgggtgtggtgacctacggccattccggttcgatccgccatcccagtggtgcagtggcgaagtatcgcttcgagccgacgctgcatggccgctcgtgggcgcgttatggctgcaatatggccgacagcaccggtagcgggttcctcgactcgatcgaatacacgcccgcgaggtactacacgtggtcgctggtttccaggacagtcaccgggccgggcatcgaccagccttatacgtgggcctacagttacggcccggccaacgggtgctatgccgacggcagcaaggaactgtgccaggccaattcgccggccacgaagtgggtggacgtcaaggatgcagagggcgtcaccacccggcacacctttggcaatcgattcaatgtggacgaaggctatctgctttcctcggtccagccgggccgcgccaccaccctcagctatcagcttgacgcttccggcagctatccggcattggccgggcgaccggcatatcagcgtgccagcggaatcatcgcagccaagcagataccgttgttgcagaaggtcatcgaacaggatggcgtacgctacatctggaaggtcaatacgttcgacagcatggcacgacctgtgtccatcactgaagccagccagcccgtgcagtag

SEQ ID NO: 529391 - DNA, 435 bp, Stenotrophomonas maltophilia
atggacctgttcgcctggctcgcgttcggctgctacctgttggcgttcttcattgtctcgctgtttgctgcggcctacctgaaacgctcggacttcatgccctaccacggccaggccgtgggcctgccatggaaggaggtcgaaccgcgcatgcagttgctgctgatggcactcatccgcgtggtcggcgccggttggatcgcactggccggcgccggcgtgatgttggcctggctgatcttcttcggcggacacttcgcgctgccgcaactgctggccttccagctgttctgcctgttcgccaccgtaccgccgctactggtcgcttccggcgtgcggcgacgcaccggtgcgcgtacaccggtgcccgccggcgccgcggtggtgctgctatcggtcatcggattcgtgctggccctgttggcactgtcctga

SEQ ID NO: 529392 - DNA, 1077 bp, Stenotrophomonas maltophilia
gtggatggcgaggcgcgcaaccatgacgcggtgggcaacaccaccagcatcggcggcaaaacgttcacctacaacgatgccaaccgcatgaacgcagtgaagcagggctatgctgtactggaaagctacgcctacaaccatcgcggtgagcgcgtgctgcgtaccccggccagtggcgcggctcagatcaccctgtatgacgaagcagggcagtggctgggcaattactcggccacgggccaggcgcaacagcaggccatctggctggacaactacccggtggcgttgatcaacatgccggccaccggcgtgccggaactggcctacgtgcagccggatcacctgggcacaccgcgcgtggtgatcgatccggtgcgtgatgtcgcgatctgggagtggagcaacaagagcgaagtgttcggcaaccagattccaagtgccgacccggatggcgatggtgtggcattcgagctggcactgcgcttcccgggtcagcaggcgacggctgcgagtgggttgttctacaactaccagcgcgagtatgacccggcggtggggcggtactcgcagagtgatccgattgggttggacgggggcattaatacctatgcctatgcggaaggagatccgctgagctatgttgaccctttggggcttcaaagcgttggccccactggtgcttacataggaggggagcctcgggcttcagacgcgtgcatggatgctgcgattctggattctgcgttgaatttgacacccggcgtcgggacgctcaaagccttcactgaaggcgccagctctctggattcgatgtccgcagtgatgagcacgacggctgccgcaactgaagtgcacacgcaaagggcggatgcggcctcaaatgcgaggattcaggagcttaatcgctgggggagaaatcgcaaggagcaagcttcgctgaggacagctatccaggccaacaagggtctaaaccaactcttgcgtgtggttggtcgaaatttgggattgttgagtgtgggcgttgagaccataaaattctctcaagcagctgaggagtgcatgtgcaaagcgaaataa

SEQ ID NO: 529393 - DNA, 1230 bp, Stenotrophomonas maltophilia; identical to SEQ ID NO: 509197

SEQ ID NO: 529394 - DNA, 1209 bp, Stenotrophomonas maltophilia
atgcctgagtggcgaaagcagctgaaccgcgtcgcgcggcccgatttgagcgcgacggaagaatttgagacaccggcacctccggcctggtgcagcaagcgccagcaaaaacgcacgatccaggggcggtttctgggctgcttgcttggcggtgcagtcggcgatgcgctgggcgcaccggttgagttcatgaagcggaccgagattctccgtcgcttcggccccgagggcatcactcagtacgcaccggcttatggtggactgggtacgatcaccgacgacacgcagatgaccttgttcaccgccgagggattgatccgaggctgggtgcgcggctgcttcaaaggcatcacgacctactccggggtaacggcccacgcctatttgcgctggctgcaaactcaaggcgaacgccctacatgcgacatcgacttcggcacggatgagcctggttggttgtttcagcaacgccaactgcacagccgtcgcgcaccgggcaatacgtgcctatcggcgctgcgggcgatgaactccctcggggagccggcccgcaacgacagcaagggctgcggcggtgtcatgcgggttgcgccggtcgggctgttcgcctggcgcctgcgccagtacgaatcccctcaagacgccttccggctgggtaccgagttggctgcgctgacccacgggcacccgactggagccctgaccggtggtgtgctggcggttctgatcctggccctgaccgatggtgcgtcgctgcgcgaggcactggacgcatccaaactccttctgcgaaccgagcccggtcacgaggagacgctgcgggcaatagagatggccgaggagttagccgattccggtttaccaaatgaagaagccattacccggctgggccagggctggatcgctgaggaggccctggcgatctccatctattgcgcgctggtcgcccgcaatttcaaacatggcgtgatcctggcggtgaaccacgatggcgactctgactcgactggatcgatcgtgggcaacctgctcggcgccatgcacggcgtgaaggcaatccctgtcgagtggctggagccgttggagttacgcgatgtcatcaccgaattggcggaagatctctacgcgttcaaggactgggagatcggcgaatacaacgacaacgaagatctgaaccagcggatctggcgcaagtacccgggattctga

SEQ ID NO: 529395 - DNA, 447 bp, Stenotrophomonas maltophilia; identical to SEQ ID NO: 508235

SEQ ID NO: 529396 - DNA, 882 bp, Stenotrophomonas maltophilia
atgaacgtgtccgccgacacttccgcacccgaccgcctctcctccctgctggaacgcttccgggtgcaggccgcgctgttccacagtggtccgctgtgcgggcgccacgtcttcgagccgcagcccggtcgtgccttcctgcacatcctgcgccagggtgaaatggaggtccgtcatcccgggggcgatatcgcgctgccccggttgaagatcgacacacccagccttctgctgtatccgcagccgctgcaccatgtgttcttcaacgcaccgctggatggcccggatttcacctgcgccacgctggacttcgatggcggcgcgcgcaatccgatcgtgcagtcgctgccaccggtgatggtggtgccgctggcggcgatcggcgaactggatgacaccctgcacctgctgttcgccgaggccgatcgccagcgctgcggttcccggctgctgaccaaccgcctgttcgaggtggcgctgatccagatcctgcgctgggtggtggaccacccggatgcggcgggcgtcagccatgggctgatgcgcgggctgtccgatgcgcggctggcccgtacgctggtggcgatgcaccaggcgccgcaggacgaatggacgctgccccggatggctgcgactgccggcatgtcgcgcagcgcgttcgcggccgtgttcaaggaggtgatgcaggcgacgccggccgcttatctgctggactggcggctgagcctggcctgcgcgcagctgcgggccggcgtggcggtcaagcaggtggcgatcgaggtggggtttgccgataccgcctccctgtcgaaggcgttccgcaagcggctgggcgcgtcgccgagggcgtggctggtcgcgagcgccgcgcaggctgggtag

SEQ ID NO: 529397 - DNA, 843 bp, Stenotrophomonas maltophilia
atggcggagaacaacgttgagttcaagggtaaggggcaggcactacggctaggtattcaacaagagctgggcggcgggccgctgagcatcttcggcgcagccgcacaaaagcatgacctatcaatccgtgaggtgacggctggcgtgctcaccaaactggccgaggagttccccaatctagagttccgtcagcgcacgtccctcagcaagaaggaaattaacgagaagctgcgaagcttcgatccgagactcgggcgcgcgctattcgttgaaagtgcgagcatccgccctgacggtgccatcaccgaggtcttggatcggcatggcaagtggcgggtcatattggttggtgaatcaaagcatcaagggaatgatgtcgagaaaatcctagccggcgtcctgcaagggaaaaacaaagatcaagatttcatggctgcggggaatgctatcgagcgcatgcacaagaatgtgctagagcttcgcaactacatgcttgacgagaagcacttcccttacgtcgttttcttgcaaggctcgaacttcgccatagagtcattcgaggtgaagcgaccagatggccgcgtggtcaaggtggtgcatgactccgggctgttgaaccgtattgaccgagtaacagcaagtagtctgtccagggagataaatcagaactactgcgaaaatatcatcgttcgagcaggcgatcacgaccacatgttccagatcgcttcgttgtactgtcaggcggcaccgtggaaggtgggagagatgggcgagatcatgctcgacgttgccaagacatcgctcagagtcattgccagtgacttggatatggggcggacctaa

SEQ ID NO: 529398 - DNA, 936 bp, Stenotrophomonas maltophilia
atgaatgcgctgaagaaatcgggtcttaagcactcgtcagaggcgttaaccaccgcacgaggctacggaagcacgacgcacatcttcgacgttggcgactgccttgaggtgttggctaaaatcccaagcaattcgatccaactcatagtgtgcgacccgccctataacatcttgttggcgcattgggatgaccacgccaattacatagattgggcaaagcattggctcgccgaggctgagcgcgtgttggcgccaaccggcagcatcgccatctttggcggcttgcagtatcaaggcgaggccggatcgggcgatttgctctcgcttatttctcacatgcgagagcacagtaagatgctactcgcaaacctcatcatctggaactaccctaacgggatgagcgctcagcgcttctttgcgaatcggcacgaggaaatagcgtggttcgcaaagacgaagaagtatttctttgacctcgatgctgtgcgcgagccatatgacgaggaaaccaaagcggcttacatgaaagacaagcggctcaaccctgagtccgtcgagaaagggcgcaatccgacgaacgtctggcgtatgtcgcgcctgaacggcaactcacttgagcgcgtcgggcatccgacccaaaagcctgccgcagtcattgagcggctgattcgcgcgctgtcctatcccggatccaccgtcctcgatttcttcgctggcagcggcgtgaccgctcgtgtcgcaatccaagagggccgtaacagcatctgcaccgacgcagatcctattttccgggaatacatggggaagcaggtcgagttccttcgtgcagaaggcttgctggacgatattcggcagtatgaaattatcgaagggatcgaaaatcttgaagctgcttacgctggacttaccgacgcgacgcgaacagcagcagagtag

SEQ ID NO: 529399 - DNA, 252 bp, Stenotrophomonas maltophilia
atgagcgccaagccgaactatcttggattcgtcgagccgcagcgctggccgcccgatgacggagcacgccgcgaacccgtgttggacgtggtcaccacaccgccgcgcgtcgtccgctatgtcggctatcggaagtgcatgcgctgcggcatcctgttctggtcgcaagacgtgcaacgcttgcgcctctgcaccggcgacggtgtgagccgcctcggctgccgctcgcgggacgacacagacggaatctga

SEQ ID NO: 529400 - DNA, 219 bp, Stenotrophomonas maltophilia
atggcagacgttcgcggaatgctggcacgggtgcgcaagctcgaacgctcgaaggtcgcgggcgacgaactgcgcgaatgggtcgaaagtacgttccgcgctgccatcgctgacggtcgcatctgtcccgttgatggcgacgtagtgctgcattgcctgctcgtctggataacggacggcacggcgcgcggccacgcgggcgaaggggcgctgcgatga

SEQ ID NO: 529401 - DNA, 210 bp, Stenotrophomonas maltophilia
atggctgattggcaagtcaccagcacgaaggacgtgcgcgagcgtgaccgcttcgagattaaccggcacgacgagcgctatagccacccgatgcgcgtctgcttcctgcatccgtgcatcccgcgcgaagtggcagaggaaatccgcgcactgctaatgaagcgtatggaggaacgactggcagcgcgtccgttccggcgggagcgttga

SEQ ID NO: 529402 - DNA, 195 bp, Stenotrophomonas maltophilia
atgaaaagcgacaacctcgacccgcgcgaaaacgcgcccatcaagtacggcgtcacgcctgacgaattgcaacagattcagcagcgccgcgtcgaagcacacgagcagcgacaggcggcggacacgctgaacctcgcccgcgctgtgaagctggggcgcgccctgaaacaacacgagggggaatcacatggctga

SEQ ID NO: 529403 - DNA, 441 bp, Stenotrophomonas maltophilia
atgacctgtttcgtctcgttcggcagtcccgaacacaagcgcatgcagcgcgaccagcgtatccacgtcatgcccgccgcacccggcacggtcgcggtgcatctggtattcgctgcgcgcgggtatgtggtcaaccacggcacgctgaccaagagcatggccgaagcgcggaagctggcgcacaagctcatggagcaatgggacgcagcgaacagcagcccgctacaacgccacgcgaccctgcgcccgattacggcgcaacaggcaggcgcggccagcaatgacggtgcgttcgatgctgcgcagttccaagccgattacggattgatcgtccagacctgctacgacgcaatccgccactgccccgatgcggacgtgcgcatgcaggccgcccaccttcttcaatcggtcgggtacatcccgcctcggagcttgcaatga

SEQ ID NO: 529404 - DNA, 462 bp, Stenotrophomonas maltophilia
atgaccgagatcgttcagcctgaatggatgaagggctacacgcccaccgtccagaccggcaacccgaactggaaaaaggggatgaagtccccgaacccgaacggccgaccgcgcggcatcgtggacaagcgcacaaaggtcacgcaggcgctgatggacgacgcgcccgccattgcccgtgtcgtcattgatgctgcgcttgccggtgacgtgcaggctgccgggctggtgctttcgcgtgtcgcgcccgtgctgcgcgcccagaccgagcgcgtggagttcgactttgacgctaccgcgcctgtcactcggcaagtcgaggccgtgttgcaagccatcgcagacggcaaggtcgcgcctgacgtgggcaagcaaatcatcgaagccatcggctcgcttagcgcggtgcgtgccgtggacgaactggaaaagcgccttgcggcgctggaggagaagcaatga

SEQ ID NO: 529405 - DNA, 708 bp, Stenotrophomonas maltophilia
atgcccacgccggttgatattcgcatcacgcctgcattgcacgccgataccttgaaagaggtggacggctacgacgacaacaccgcgcctctgcttgcgcccgcacttgaagcgctggacgacgcatatatcacgctcggcaagctgcacgacgcgcgcgacgctgcgaagaagaacaaggcatggacggaggaaatggccgttctcaacgtctccgacgctgcgggcaagcaacagcaacgactcgccaagaagttggacaacgtgcgcgtcacgttggaaaagcagatcgcccatttcgagcaagagctttctcagccgctggaatcgcgcgccgccgtcaccatcgcgggcgaggtgcgcaagttcgtcaaggaaatgccgaccgagaaacgccacgagttcttgcagaaggctatcgaagaaggcgacgtgaccacgtgcagcagtgttctaggcgcacccgcatatctgtccggtcttgatgcaaacacggtgcgcgtcctcacgcgcatgtggcacgagcgcacttcaccggaactggcgcagaaactgaaagcggtgcgcagcgccaagtccgttatcgagcagcgcggcggactgatcttcggggaaatcgagaaggcaatgggtgccaagtggtcgaaggtcaacgagcttcgtcagggcaatgacaaagcgcttgaggctctcaagttcagcgcctga

SEQ ID NO: 529406 - DNA, 417 bp, Stenotrophomonas maltophilia
atggaagccaagacctacacgaaccgcacgaacgcccgccgcgctggtgtcgccgctggggtgccgtcagagctggtagaaatcaccgtccacaagaacggcgacgaggtgcgcttcggctggaagcagaaggacgcacccgctgccgaacccgcccctgtggtgaccacaagcaagcccaagcgggcagccgcgccgaaggtgcagcaggaagaacgcaacggggtgaagcgtccgaaggatggtggcgcgtgcgctgcggtgtgggcgtggctggacgcgcacccgggcgcgacggtcaaggacgtgcgcgaggcagcgccggaacacggctggaacgcttcgaactgccagattgagttctatgcttggcgcaagttcaacggcattagcggacgcacgaaggcagccgcgtaa

SEQ ID NO: 529407 - DNA, 1455 bp, Stenotrophomonas maltophilia
atgaaccacatcaacgcccccagcatagggcaaggcgtttcaggcggctcggagaatttgccagccgcgcaaaaaggcgcacaggccgcgcagcaccccagccaataccccagcggcggcaacggtgcgaacgccgccccagcgcccgcgcaatcgcccgcatgggtgcgggagcgcgagcagtcccagccgcttacctcggaggcagtgcaagcgcaggccgaaacggcgcgcgccaatgcggtactggagattcaacgcgaagcgaccaaggctgaggaaacccgcctcgaacaggagaaagtgcgcctcaagcgcgacctgctcaagaagggcttaggcatcgaagaaagtccgggcagcccccgcgcattggtcgggcgcacgcttggcaccgtgcagatgcgcgcgattgactggctttggattggctggattccgaaaggatacgtcacgcttcttgctggcgagactggcgcgggtaagtcaaccgtgctggccgacgttaccgcgcgcgtgaccacgggcgcaccgtggccgggtgagtatcagcagcgcgagccaagccgcgttctttggctgggcagtgaggacagcatcgaggaaatgaccgcgccgcgcctagtggcctgcggcggcaatctcaataacgtggtcgagattcagggcgtgacgcaacaggggaagcgcaacaccttctcgatgcaagacgaccttgatgaaatccggcgctggctcgcatacgcgcgcgacgttgaatatcgaccttttgcgatgctcgtcattgaccccgtgaccagctatctacccggccagaagctgcgcaaggttgatttgaacgacgcggggcaacttcgcaccgtccttgagccgtggctggtgctcgcgcaggagcacaacatcgccatcgtctgcgtgacgcacttcgccaaggacacaacgcgctcaatgctgcatcgggttctcggttctgccgccttcgcgcagacctgccgcagcctcatggcaattgtcagccgggaggacgatggcccccacgccaaggcaatgatgcaagtcaaagtgaacctgccggagcatcccggcggctcgtggaagttcagcacggtcaaggtcgaagtcggaaccgacccgcgcaacggcaagcccatcagcgccacgcgcccggattgggaggagctagacagcgccctgacgccgcagagcatggtgggcaatgcccgcgggccggtcagtcagtacgaagcggcgttcggtatgtgggtgaaggcatatttcttgaccacaccggcaagcccgtggcagccgattccgcaggtgaagcaggccgcgttatcggcgcgcgttgtcaccgaacgctggtggaacgagcacagcagcaagtacctgaacaagcagaacgtcggagggacttggtactgccaaccgaagaacctgtatgcagaaactacgtaa

SEQ ID NO: 529408 - DNA, 219 bp, Stenotrophomonas maltophilia
atgaagctgctcaacaatgcagaaactgccgaactcctcgggctgaagcccaacaccctcgaaatctggcgcatccaaggccgtgggccggtctttcggaagatcgggcgcgcggtgcgttacgtcgaagccgacgttctcgcatggctcgacgcgcaagcgtgcaacagcaccagcgaatacgacagcgggcagcgccgccatctgacgaccgcctaa

SEQ ID NO: 529409 - DNA, 1266 bp, Stenotrophomonas maltophilia
atgccgaaattgactaagacctacgttgacaaactgaacccgcccgccgacgggtacgaactgcactggtgcagcgagacaaagggcttcggcctgcgtgtcacccctgccgggaaagtgacctacatcgttcaaggccgggtgcgtggtaagtccgcccgtatcaccatcggcgcgcacggcatcttcaccgttgaccaagcgcgcgaagtcgcccgcgagcacctgcgcagcatgcgcatgggcactgacccgcgcgagacggccaaggaggaagccgccgcgcgggtgacgcttcgacaggtggccgatgcctacctgcgcgaccgtccattgaaggacagtagcaaggaagccattgagcggcatgtggtgaccacgttcgcggcgtggcaaaagaagccggttgcctccatcaatcgtgagatggtcacaaagcgcttcaacgagatcaagacgaagggaaccacaggcaacgggcctgcacccggtcaagccaatcagggcttctccgttctccgcgcgctcatcaactacgccattcgtgaataccgcaagccggacggctcgcccgtcatcgcggacaaccctgtggacgtgctctacaagaaatgggttccgttgaagccgcgcgttactcgcattcctgatagcaagatcggggcggtctggtcatttctcagacaatcccgcgagacggcatacaaccgggatacgtggtcaagcatcgaccttgtgatgatgctcttgttgaccggccttcgtattggggagtgcagcgaactcacatgggatcgcgtgaacctagaagaaggctgggttcatttccccgaccccaagaactcgaatcctgtttggattccgctgtcgtcgcaggcattggaaatactcaagacgcgccagcgtatcaaggggaacccacacgtctttccatcatggggcaagtcggggcacatcagagacccgcgcgacacgatgaagaaggtcagcgaggttgccgggacgaagatcacgccgcacgatcttcgccgtaccttctccgacatcggctatgcaaagtgcggccttgacgtgctcaaggttgaactgctgacgaaccatgtccctatcggcgtcaccgcgcgccactaccttgagacttcacacttgcaatatctcaagcccgaaacgcagcgcatcgcggactggatagagaaggaagcacggattgctgaggcagtcgcatcgggtgaaaacgtagtggcgatggtggcgatgcgcgcctag

SEQ ID NO: 529410 - DNA, 138 bp, Stenotrophomonas maltophilia
atgccggccagcggccggcactacctggcatcagccctgcgcttcggccgccgcgcggaagaccagctgcatctgcagcggctggaacaggcggtggacgccctgccacgcttcccctgggaaactgccgaacggtag

SEQ ID NO: 529411 - DNA, 753 bp, Stenotrophomonas maltophilia
gtgattcactaccacgggaccccagtgagcgggaccaggcaggacgcatgccgctttctggcgggacggcacgcgctggttccgttcgctcgtcctgatgacctcggtattgcgctggaagcgtgccagtcggtcgtactcgacaattcggctttctcgaactggcgcagcggcggtggcgacgtggacgttgcggcgtatcactcctgggtgcaatcagtggcggggcatcctgctatcgactggtgcttgatccccgacaagatcgacggaacggagaaggacaacgtcgaactggtggcgctctggctgcggatgggctgccgggtcctctccgttccggtgtggcacctgcacgaatcgctggaatggcttgaccatctggtgggcagcttccaaaccgtcgccataggcagctccggcccatggtctgacccggggacggatcggtggtgggctcgcatgtccgaggcgatgcacgttgcgtgcgacgccgcagggcggccacgcgctcgcctccatggactgcgtatgctcgacccagagattttccgccgcctgccgctggcgagcgccgacagcacaaacgctgcggtgaacggcggcgccgtcaaccggttcgggatgtatccggccccgactgcaggccagcgcgccgaggtcatcgccagccgcatcgaggctcaccagtcagcgcctgcctgggaaagccccggccagcagccccgacttttcctgggggatacagcatga

SEQ ID NO: 529412 - DNA, 249 bp, Stenotrophomonas maltophilia
atgaccaacatctaccgaaagcagttcgtgagcgtttgtcctgcagacggcgaggcgattgtctacagcctcgaaatccgctccgaaactatgctccgcgtcgagcacatcaaccttgcgacgggaatggagaaatcagcattccacgaagagatcgcagatcgcctctcggaacgcttcggtggattgcaacgcatcatcgctgttcaccagggcgtcgaaatcgaaacggtcaggggtgccaagtga

SEQ ID NO: 529413 - DNA, 324 bp, Stenotrophomonas maltophilia
atggctgaccagctgctcaccgctgcaatggaggaggccgagccgatccggtccgcctactccgatggccccatgtggaatgccttcggcctgacccgcgccgcctacctggtcgttcctcgcagaacgcttcagtccatgccgctggaatggcaggagcgcttcgtcgccctgatggccgaagcccacgcccacctgcccgccgaggctttccccgactacaccgtgcagcgccaggagcgcggccgattcattaccgacccgctccgtgactaccgccacaccgggccgattccagccaaggaaaaatgcgatgagccctga

SEQ ID NO: 529414 - DNA, 231 bp, Stenotrophomonas maltophilia
atgaccaccgacaacaagaccctggctgttgatgttctccagtggctgggcgacgagcgcttcatgtacgggcccgacaccgagagccgcgccaagtgcgaagaagcccgcgccgcagtcgccgagctgatcgaggcactggatcttgccgcgtacggcgagtacctgccggaatcggtagagcagcaaatccgaacttccctcgcccgcgtaagaggagaatcagcatga

SEQ ID NO: 529415 - DNA, 369 bp, Stenotrophomonas maltophilia
atgagcggccctgttgatgtgctggcggtgatgaaacccgccgatcatcttgtttcaagcgaaaactcatggcgtttcgtaaggcggtattcgcaccctgaaggcgtgggcggtgaggcctcgctttttgaaacaaagtgcgcattcgtatcgctggacggccatgagcctcccccgcaagcggtggttgaagcgagaaagttgcgagaagcgagggatgcagtatccaacctaatcgagaaggtggacgaacttctgtctacccacggcgagtaccgaggctacggcggtgctggcgaagccattgaagaacacatgcgcgcagagctggtattggctctggcacgcgtcaagggcggtgccgcatga

SEQ ID NO: 529416 - DNA, 165 bp, Stenotrophomonas maltophilia
atggaactgtccgaccagctgaaccagcttctcgctgccaccagggcagccatcgagtatcacgagggagcgccgggcattgaccgcctgcaggccgcctacgaagaatttaccggtgagcgcgtgttcgcctatcgcgatgaagatgcggaggacgaagcatga

SEQ ID NO: 529417 - DNA, 342 bp, Stenotrophomonas maltophilia
atgagcaaggtagtcaagatcgagcacgacatcgtgcatttcgatacccagcacaccctgtattcggaccatgatcaggactgctgcgaatcccactacctcagcttcaaggatctcagcgtcgatgacttcgaaggacttgagttcaatcttgatggtgacttcttcgagcgagttgaggacttcggcattcgcctgttgccgaccaacggccagccgattccggttcctggctatgggtacaacaacggctactacagctcgaatctgactctggttctgtgctgggagcgcggccagaagtcgttcgatatcagcgagtgccaggagatcctggaatga

SEQ ID NO: 529418 - DNA, 351 bp, Stenotrophomonas maltophilia
atgaacctcgaaaagatcgacaccagcactacggcagggaaggccgaggtcagctacgagctttcgcttgctgcgagcctgcgccagttggctgaggcgcagtggaccctgagtaatgagccgatgcccgaggatgcgcgccaggttctgttcaacgctgccgggatgctggccatgaatcggagcctgatggatacgggcctgaccacaattcaagtgcagaaccagttcatcgaagcgatgggcaacgagatgcgcgccgctggctgtgacttcgatcctgccagcgggaaggtggtcaacacgctcgccaacacgctccgcgcagacctcgctggggagaagggctga

SEQ ID NO: 529419 - DNA, 363 bp, Stenotrophomonas maltophilia
atgaaggagctgatcctgccgtggccgcacaaggacctgtcgccgaatgggcgagtgcattggtctgccaaggccaaggccgccaagaaggccagggctcaggcgtacattctggcagttgctggcggctgcaacctctggaaatccgaaggtcggctgcacctgtacatcacgttccacccgccaaccaagctgctgcccgacgacgacaacatgctggcccggttcaagccgtaccgggacggcatcgccgacgcgctgggtatcgatgacaagcggttcatcagccacccgctggtcagcaacgaggtccggaagggtggccaggtggtggtgcggatcacgggagggcccggggcatga

SEQ ID NO: 529420 - DNA, 174 bp, Stenotrophomonas maltophilia
atgattgagctgcgcagcgtcttcctccacaaggggttcctgaagcgcgtggttgccgatctcgggattgattacaagagcttgccgactgaaaacggtcagaggtactacgactgggttggaggcggcatccgctattgggacggctggcgggagatgcccagtggccggtaa

SEQ ID NO: 529421 - DNA, 216 bp, Stenotrophomonas maltophilia
atgaacttcccgagcaaatccaagatcattgaggagtgcaagcttgccctcaaggccatggaggatcagtggatggtgatcgatggcgagcttggcccaatttctccaagtggaaagttaggagacctggccggagccattgaacatggcgaggaaccggcgatagagcgattccgcaagttcatcagagaaatggagtcgtcagacggtttctaa

SEQ ID NO: 529422 - DNA, 282 bp, Stenotrophomonas maltophilia
atggaagtcgacgctaagcagggcattgcctacctcatcggacgaggcgtagcagcagaaaaagcgctgcaaacgactataagcagtagcgcccggggagccgctctggccgagagtcttcgcgttaacctacagatgacccgagaccagctctcttcgagcctcgccctggcgcaaatcgggcaagaattcctgccattcgccgaagaaggattcgatggggtgcgcgcagccgcgctacgcggcgctgccaacgggaaatacgtaattccaaagcggtag

SEQ ID NO: 529423 - DNA, 261 bp, Stenotrophomonas maltophilia
ttgcgcgacggcccggagggtgccggtcaggacgaccggcacagccatgctcggctgcgagcaagcgaagcgcgcgacccgctgttgctcttctttctttcttccttggcggacggcacggcggtgaccccgatcgatgcggcgaagttcgcggcggacctggcggccgatccgatggcgaccgagaagctggcgaccggtatcgatgcgtttgccaaggatctgcaggcgctgcgcgagcggatccgcgcggcactgtga

SEQ ID NO: 529424 - DNA, 273 bp, Stenotrophomonas maltophilia
atgcaggcccttcgggtcggtgacctgggtgacctggtccagcgcgttgtactggctgcggatctccgccgccacgccgccgacatcctgcagggtctgcgccagtcggttgagcggatcgtactgctggctggtcacgcgctgcagggcgtcggtcacggtctgcgggttgccgttggcatcgtaggcaaagccggtagcgtgattgcctgcgtccttcagtgcggtcagctggccgagcgtgttgaacgtccgcgccaaggtgcgacgtag

SEQ ID NO: 529425 - DNA, 1203 bp, Stenotrophomonas maltophilia
gtgatagaagcgcgtcagcgcgatccagcccagatcaaagtcctgcgcgatctcatacttctcgcccgttttaacatcacatgggttgccgacattgccgtcgcaggtaccgccgttggaggccgggtccttgtcgggaatcggactcatgttcgccgctgtatcgttgcggggcatggggcagctaccgttgccgccgtccttgtcgcacttctgcgacttcgaggtgatggtcgcaacgaattcctcgttgacgcaggcgttgtgcttgttggaccactgcgtgaaggggatcgggcagttcaagcgtcgcatgcgagcaagccctgtcgttcctgcgtcgaagggcacgcacggagactccgccgaattgctgcccagcatgccggtgacccggtactccctgacctccgaaattccgtccatccctggagcagttgggccccattctccttccggcacagcagtttccccaggacactggggattgatgtcctgcaagtctgcaatgagcgcttccagcacttcctcttcggacaggaagccaccatcacccgcgccgtagtaggtccagtcagggtcggatggctgcgtctttcccatccagtaggtaatcgacgtgtttccgttcaagtccacgactttcgacttgatcttgtcgacgtactgccagccgaactggaactccggcgggaaggggctgggcgccggcaggttcttgatggcggccaccgccgcctgctgggtcttgtactgggtcgcatcgccaccgggctgcgaaatacgccaggtgatcttgctttcctgcgcctgtacaacagccggcgcaatgcagccaacggcaacgatcgccagcacggcacacaaaatggtcttcagtcgttccaacatccctgttctccttcctggacgaacacagcgccggcgggaacgagaacgcggagctgtgccccgcgtcatgcttcggatcgtccctggtccggaatgcggcagtgccaaatgccgcctttatcgttgaggacgcttgcatgttcaagtgtggagccgcgtaaccgatcacagattcaagcatccaacgccattcagcggtctacgccccgtccccatgacttcctgcacagggagtcggtgttatacatcactacattaccaacacgacctgtcgcgaggtcggcaggctgtggcactccgctgcagacctga

SEQ ID NO: 529426 - DNA, 1287 bp, Stenotrophomonas maltophilia
atgccaattgccattgatccgcgcctaacggcgcgacttgtggagcgtttggtcactgagctggaccaagcaacggtctttgccaacttcctcgtcatgacttcatcaatgtcaggcctcggcagcattgaccgaagcctgccaagcaagggcgctttggcagaagagttgagcctatacatcggcgaccagccattttccacattcatttctggcgaaatccaccggcttttcagagggacctcctttgatattaacgccagcgatatgccgctttcttcctttgaggagaccgaagacacgaggcaagtggcaacggagcttgttaggcagttttgctcactgccttggagctatgaggtttgccttcgcctgccagatggcctttaccacctcttggtggcccatcccggggggatcacgctttccgatcgccatcggctggcacttggggcagatcttgaggatccgtaccccaaaccaaccaacctcctttctctctcagcgccggcaagctcaacgctcttgggcgcgttatctggaacacctaaaacgtcgctctgggataaagacgccgcataccttgtcgttaaggccgaaggctatttcagactatccgcgactgagcccattctttcggcgcgcgatgacatgtttgcctttctcggcctgggcattgctcttgggctcttctcggctggcgccgggcgcacgctcggtgaggctcctaaatctactcagctgatcgtgtatcgacagtctcgcgaagacgtagcaggatcaggcttctttgctctggaagatcatcaacagaagggcatccagagcctcggcctagcgtgggaccttgcactggagcccagtgccatccgagaaaagttggatcgcgtcagcctgattcttcgatcaaaggagggcaagaacatcaagctttctgctcgctggctttttgacagctactgcggtcgtgacaagctgctcagctatgtgcaggcaacggtggccttggagatcctgctcggagatgaggatgcagatgcaaatgtaagcttaggcacccttatcgccaatcgatgcgcctaccttatcgcgaactcgccagagggacgatcaaacatagtgagtgcttttcgggacatataccgtatccggtcaaagattgtccatcgcggaaagagtcgcctgaactcagatgagagtggtcttttccattaccttcaggagttggtgaagcttgtaattgacaaggagcagcgactcatggcgcgggaagtcagcaaagaatga

SEQ ID NO: 529427 - DNA, 1173 bp, Stenotrophomonas maltophilia
atgctcacagcggtggcagtcaaaaacgcaggcccgggcaggcacagtgacggcggcaacctgtatctgtacgtcaagaaggacagtggtcgtaagacttgggttttccgctaccgagaccggctcacgggtaagttgaaggacttgggactaggctcggtcagagatgtaagccttgcgcgagcgaggcatcgcgcccagcagctccgagctgaactcgcgacaggcatagacccattgcgcgcaaaaagagacgcactgaaagcggcgcggcgcggcctggcaagacaaataaccttcggagagtgtgcactgcactgcattgcgacacatgagcacgaatggcggaacgcaaagcacaaagcgcaatggacctcgaccctcaaaacacactgcgcctcgattcaggacatacccgtttcagaaatcaatgtggaccatgtatacgaggtgctgaagcaaatctggctcgataagaccgagaccgcgaccagagtcagggcacgaatggaacgagtccttgattgggcgaaggccaacaactatcgcgagggcgacaaccctgctgcgtggcgcggcaatcttcgcagcctccttccctcccctgcgaaggtaaaaaaggtcgcacacagacctgcattagactacacagaagtgccagccctgatgcgcgagctggcgtccaagactgacctgtccgcagcctgcctgcgcctccagattcttacagcgactcgtcccggcgaagcttcggccgctcgatgggaggagttcaacttgaccaatggaatctggaaaattccagggtcacgcacgaagaccggaacggaacacgctatccccctatccgcccaagccattgcattgctgaccagccttccaacatcgggggacgctttcctgtttcctgggaagccaggtaagtccatcacaactgcggcctccttgaaactcctgaagtcgctaagagcgggacagacatgccacggcttccgaagctccttcagagattgggccgccgaggccacccatcacagtagagaagcggcagagctatcgcttggacacgtcatcaaatccaagaccgaggcagcctacttccgttctgatatgttcaaaaagcgagttcccctcatgcaagactgggcggactactgccacgccaagccgtag

SEQ ID NO: 529428 - DNA, 834 bp, Stenotrophomonas maltophilia
atgctgaatcggtttgccatcgcggtgtcccttgcattcgttccacttggctcccaggcacagagccatctcaccgtcaccggccagtgggaatatcacgatgcgtcccgaatggagacggacgagggactcaatgtctgcttccagctggacgcgacttctgtagcccggaatccgcagctacaacagtggggcggcgctctttgcctgtcaaacccttcggagggcgcaaagctccttggggtcgtgcaggccgcccagaggcctgggtgcaagtacgtagcaaaaggaacggctaccgtcgtgctcgccaatgtgaggttgctgccggaagatgaaatgtacgacgagcgcattgaagctcgcctcatgcaggtgcgggtgaatcgtgtgacatccgcacttggcagtgactgtgaccgctccatcacttcgcggggattcgcgtctatccacgaggccatcgctgcactaggaactcatccaagctatgcaggtgtgtcggcatcagatttcgtgcgtatagatgccggcaatggctacgctgagcttgatgcgagcacgcagatgtggttgccgcgaggtgcctcaaacatgctggtgacgtactacgaaggcaactccggtttgcatgagctgggcgtctatcggtatgaagggggccggtggcacaacgcgagtagtgatgtgctgcctgggtacattgagagcgccaagaagttcaaagggaccaacttctacttggacagcagcaacggaaggccggtactgagaagccttccggggagggaggcatggacttacgcaaatggtcgctttgcgcggcagcggtag

SEQ ID NO: 529429 - DNA, 1170 bp, Stenotrophomonas maltophilia
atgactcccttcgaaggcatgttctatcgtcagcttgctgaatggtttttgaggccactcccaactggaggtgcccgagcggccggctcccatcccataggaatggccacggatacgggccttgttaggactgagaatcaggacagagcggccacttgtcgcggatgcgacaggttcggcaatcaattcgtgctgtcaatggtggcggatggcatcggcggcctccaatcaggcgaccaggctgcgtctgtcgccttagccgtcattgcagactccgtctatcaatcagcgctcatagccaacaccaagccatccgtgtggctcgaaaaggcgctgaaggatgctaacgcgcttttgaaccaacagttcagaggcaagagcggcaccactcttaccgcagtgctactcacccaggccggcaggtcgtgctgggcaagcgtcggcgacagccggctttacgagtattcttcgaataagctaacgcagtggtcgaccgatgatacgctcgccggcatgctcggcatagacagagaggccgcagcttcggagcagactatgctcttgcagcatttgggaatcggcccagaactagtcttgaaagtccacgagttcgacaaaagggaaacgcggaagcttttgctctgtagcgatggcgcgtactttgtcagccctgactctcgcctcttcgctcagctgctcgaaactggaaaagagctcccgcctgcggttgtcgcccgccgtatagttgagatttcgaagtgggctgggggcccagataattccacagtggtgcttatgggcttaccgctggagctggaagcgccccgagacgaagagcctggcattctgaatatctgggactgctttggtgaagtagcgtactttctaccaattgagccacgccctcaactgagcaaagcccagtcttcctctctcaagcctgaccaactgcctcaggagcccgctgcagatgcaacgcctccccggaaggctaccgaccttagggaggaaagactgtcgaggcctaaacgaaatagacgaaaggcgactccaaagagcaaaggtcagcacttgaaagcgacttctttgcgggatggcgatgagatgaatgaagatgaggaagcagcatctcaggtgcagctaaggttctcccaggacacggacgactag

SEQ ID NO: 529430 - DNA, 1053 bp, Stenotrophomonas maltophilia
atgtttccagagcgatacaaaatcatcgatggaccgctgaatggtggaatgagctctgtttacttgtgcaaggacaccatcctcgaacgaaacgtagcaatcaaggttcttcaggaggtgacagagagccgccgcatggctgatgaaatctccgcgctgttgaagcttcgctctaagcatgtggtacaggtactggaccttcttgaggtgggagaaggccatggcatcgttcaagagtatgttgaagggcacgacttgtgccatcttcccgcactacccactgacgctgaagcgacctacaagcatctgtggcagattgcggcaggaatcgcggacattcatttggcgggagtaatacatcgcgatgtaaagccgaacaacatgaagattgacccagaaggtgtcatcaagatttttgacttcggcctggcgagagaccagaaccgcaattcctcgacaatgggctttgttgggacgtacggattcgcagcaccagagctatttgatgcgcccgccacgtttacatttgcagtcgatgtctatgcgtttggtgcgactgccctgcatgttgttgcgaagggcattcctgccgcgttgcgaaccccaacacggccgactggcctaccagcgttgttctttgaccagttcaattctggcctctccgacgaggttcttcgactcttagaatcttgcatggatgtcaaccccaataggcggccaactatgcaggtcgttcgcgatgctctcgccaggcaccttttgcatgaccggcatcaagcgttagcagtttaccaaggtcagccgcatctgctaacgaagagcaagcgcagcgttaccgcaagctgggcgaatgttgcatcggtcaagatatcgtacgacggatttcgtttctttgtggccgagctttcaggcgaggtctacataaattacggccttgcgacccaagggcaatcactgcccgagtcatgtgtggttgcactaggtgcgccagagcgcggcgctgctcggaagtacattacatttgacctttcacacccagaggtggtcctatga

SEQ ID NO: 529431 - DNA, 1080 bp, Stenotrophomonas maltophilia
atgaacgacttaatcaaggatggacaagtcataggagggcgctataaggttgaacactaccatgcgcaaggcggcatgcagcttgtctataaggcttacgactcgctgacgggccggacagttgcactaaagacaccgaagaataactctgcgaccaagcgctttaagcgaagcgcagttgtagctgctcgagttaatcatccaaacgtcgcaaagactttggactacgtgaaagaagatggcgtgcgcttcctcattgaagagttcattgaaggcgcagatttgtctaaggcgatactggagcacacaccgtcgctcgacccttacactgcggccaggctgttccatcacctagcgaaaggtgtttctgccgctcaccacgcaggtgttatccatcgcgacctgaaaccaacgaatgtgatggtttcggatgactacaacctgagctcagtaaaagtcacggattttggtgtagcaaagttggccgaaagcgaacttgaagaggctgcagctggcggtggcgagacaatgctcctctcagacaccgctgtgggcgcacttccttacatgtcgccagaagcaatcgaaacgccaaagaaggtgacaacgaaggccgatatctggtcactaggggcccttgcgtttcagttcgtgacgggggccctgccatttgggaaaggcctagccgccgtatccaaaattgtagccggcgagacagtcgagcttcccgcattcgtattgagcaatccacagttcaagcctcttgcggcacagattcttgaattgtcagcctcttgtatgaccaaggaccccaatgctcggcctgatgccgatgagctggtaatactttgcggcaatctttgctacaacgccgcccccagagagcaggggcacgtgaggcacattgcagaccacaagaagtggggtttcatcgcgggaccagggggtgatgtcttcttccatgtgagctgcgtctatggctccccattgaaactaggggacaaagtcgtctacacgaagcacttgagcggcgctgcgggagcggcccctcgcgcatatcccgtcatccgctatttctga

SEQ ID NO: 529432 - DNA, 933 bp, Stenotrophomonas maltophilia
atggagagttcatatcttgagctgcactaccatctagttggtggttcgcactccatggatgcgagcgttcgcaacaaatgcgagcgcgaggcactttcggtcatctatgagattgccaaatacctcgacgtaagcaccgtcgtcgaaagctatgcacatcaagaaggtgggcttcgggatgtctggaaggcgataggccgcaatgacaagcaactaaccctaattgtcgcaatttttgccatccttttctcttgttcgcccaaagaggacgagcagctttccagtttggagaaggagaagaaggagctggagattcagaagctaaggctagaaataaaggcacttagcactgaggtcgaccctgatggtgcactagagcggcgcgcccttgaggtggccgacgcgttgaacatgagtggacgaatagctgtacggaggtcgaacttttacaagaacttggtttcgtacgacaaagtaactgcggtatcgttctcaccaaaggcacgacttgattcgaactctatcgagcccacggtcaaccggtcggtcttctcggatttcgttctgcactccgacaagctgccccctgagatttatgaagaagcagtaattgaaattttcgcgcccgtgctaattgacgccaatcaacagtggcgcggtttctttaacggcgctgccatttcattcgccatgctggaccactccttcaaggcggacgttgtcgcaaaaagggttaaatttcagcatggaaccactatacgatgtacgctcaatgtaattcgacgttacaacgagctgggagaagtggttgtggcgggatataccgtccctactgtgacagaagtcgccgaaggaggctcgtcttacgtagataccagtgaaggcgtgcggcgcaagaggaagcccaatcctcaccagcctccactgctctaa

SEQ ID NO: 529433 - DNA, 534 bp, Stenotrophomonas maltophilia
atggaagaccagaaatacgaagcgcgacaaaccgagctgcagaaggggttagcaggtcatttcctgcaggacgactacaacgccttcgttaccttgaccttcaagtctgaagactcagttagctaccaccacgctgagaagacctttggtcgcttcctccacgcgctccggtgcagcctgtacaaggaaagatgcacgtacaggatgcccttgattccggtcgttgaaagttatccagggaggtcgttgtgcagcggcgctccttatgaccccatcgagcggactcatatccattgctgcatcaagcttcccggaaatccactagaccataaggaactggttagggagaagtggcttgctgcaggcgaagtatgcggagacccacatgtctacgaccgaaatggcgacaggtggttcattgagattgcaacgcctgccgaaatgaggacgtacgtcaactactcattgaagcagtgctgcagcgaccaccagcctgtgctctggaactttgcgcgcaagattcggactgcttga

SEQ ID NO: 529434 - DNA, 630 bp, Stenotrophomonas maltophilia
atgcgcgggatacgggctgccggccagcggccggcactaccgaacacggtagatccacgccatgcgtggatgcgcgcgatacgggctgccggccagcggccggcactaccgagcgcggtagatccacgccatgcgtggatgcgcgggatacgggttgccggccagcggccggcactaccgaccgcggtagatccacgccatgcgagggtgcgcgcgatacgggctgccggccagcggccggcactaccgaacacggtagatccacgccatgcgtggatgcgcgcgatacgggctgccggccagcggccggcactaccgagcgcggtagatccacgccatgcgtggatgcgcgggatacgggttgccggccagcggccggcactaccgaccgcggtagatccacgccatgcgagggtgcgcgcgatacgggctgccggccagcggccggcactaccgaacacggtagatccacgccatgcgtggatgcgcgcgatacgggctgccggccagcgaccggcactaccgagcacggtagatccacgccatgcgtggatgcgcgcgatacgagctgccggccagcgaccggcactacctgccaacggctccctcagcccttgtagccgttgctga

SEQ ID NO: 529435 - DNA, 255 bp, Stenotrophomonas maltophilia
atggctgagccgcggatcatccacagcgaggccatcaccgaggcgaacggaaagctctgctcgttctcgatgcgatgggaaatcgatggcgactacatgcgctgccggatctgccagcggccgcagctgacgagctacgcacgccacccgtttccgcacgctgacggctgcaaaggcacgcagagccatgaggcacacccgtggatcacgtttgtgcagctgatggctcctctcagccaggcggtgggcaaatga

SEQ ID NO: 529436 - DNA, 297 bp, Stenotrophomonas maltophilia
atggctgagccaatgatcctcgtcgcgcacggcgcgaaggcaaagcagaacttcgacgccgaccctccgcgctgcatgacctgcgtgtacttccggcgcgagccccatacgcttaatcgtgaagtggtgaagttttcgaggaagggaaagcccagaatccgcaaggaaccactgcgcaaggatccgatcctcaaccccatcgtagaccgctgcagcttcgggaacttcctgaccaagccgcatgccatctgcgacgagtggcacagccgaaccggcgaggtgatcgaccatggctga

SEQ ID NO: 529437 - DNA, 951 bp, Stenotrophomonas maltophilia
atggcacttcagccaattgacatcactactccgcagcccaatggcaagctcggcgaccccgcgcgcgtcatgtcgcagaagatcaatgccaatgatcaatacttggagcagttggcccagggtgcggacaccaaagcgaccgctgcgaaagctactgcagatgctgctcttcccaaaagtggtggaacgaccactggtcccatcttcagggcaggcgtgcaaaatcaagagatgttccgcatccagaacacgggcacgcaggttggcatcggcggatcgttcggttcatggagcagcaacaggacgccgggccttcaggttgactgccagtctcgggccgatgcctacatggtcgccagagcgacgaactggggcgttgcccacctttttgctttggacgtgtaccaaggcacgacgtcggatgtcattactgcgaacttccatttccccggcaaagagaacgcgatgaggttctttgcgaatggcaatgtaacgttcgctggcacgcttacgcagaactcggactaccgaatcaaggacgaagtgcagaccatcgatcctgtggccgctgcatccgccctgcgcatggtgaggcctgtggagtacacggacattcagggcgggagcagcggtccacgccgagccggtgtcattgcccacgagttgcaggagcacctaccgctgttggttgacggggagaaggacgccaccgagaccatcgatgtggcggagggcgatctgacaccttacgcgcctggcacagaaccagaaggctacgtaccaccggtgatgaagctgaggcaggtgcccaagctgcaggcggtcaactacgccggctctaccgtttacgtgattgcaggttggcaggagcacgatgggcgcattgaacggcttgaggccgcgctggcactggcccttgaaaagatcgcggcccttgaggcggcagcatga

SEQ ID NO: 529438 - DNA, 639 bp, Stenotrophomonas maltophilia
gtgatccccgcctccctcgacaatggtcatcgcatcatcgccaacacgctggccgcgttccgtgccggctccgcgctgggcagcgttgcgctgcgcccctgccccgaggcgccactgccgctctacatcggcatcgcaggcagcaagcgcgcaggcaaggacacgctcgccaatggacttgcgtcggcgctggggctgccctgtgacagttttgccgcccccttgcgccagttcgtcgccgccatcctcgggctgaccgtgcgcgaactggacagccacaaggaagtcgccatcgattggctggccgaactcaccccacgccacctgatgcagactgccggtaccgaatgggggcgtgaccgcgtccatcccgagctgtgggtgcgctcgctgttcgcacgtctgcccgagggcgggctggtaaccgacgtccgcttcgccaatgaggcccgcgcgatccggcgtcgtggtggtgtcgtgatccacgtcaaccgcccgggccatggcagcagcgaccctcatgccagcgagcagccgctgccgcgtgagctggtcgacatcgaagtcgacaacgatggcaccccggccgatctggtccgcagatcgctggaacagttgctttcacgcggtgtgatctga

SEQ ID NO: 529439 - DNA, 378 bp, Stenotrophomonas maltophilia
atggaggtcgaacagttcacgtcgacgcgcctgaaggccatcgagttgttcaagtcccaacccaagggaggcaaggacatcgtgagcctggatgcgatcttcatctcgctgtgctcgctggccaggatcccgaccgacaccggcaacgcagcacggaccgtggcccgccccggcagccagcagcctccagccccttggttcatcgaaaccctcgccgccctgaagggcaagggtgagtcggtcaccgtggcacgctttctgatgttcgccaaccgcttcccggtcaagcgcatggaccaggtcaacgcggcgcgctggttgcgggacgcaggctacattccgcgcaaaaccggtggcaacctggtgttcgacctttga

SEQ ID NO: 529440 - DNA, 780 bp, Stenotrophomonas maltophilia
atgagtgacgccaccacccgcgtgatcagcgcgcgcctgcgcggcgccatcgatgggcggaaccgtaccttccgtcatcccgggggtgcactggcgaccttgcaggcggtgtaccgcatcgacgagcaagggcggcagcgcttgcctgatgctgtgatcagcggcgccacggccactctgtcggccgcaccagcacccggcatgctgatcgagggtgacgcacggatcgtggttcgagccgaccacgctgtgctgcccccaaatgccacccacgccgaacgtggtttggctcgcgccatcgtcgctcgcccgctgccggtggacatcaccgcactgtgggacgccgaccgctgtccagccgccctgctgccttggcttgcctgggccttgtccgtagatgaatggaaggcctactggccggagacagtgaagcgagcgcgcgtacgcaccgcgatcgccatccagcgccgcaagggaacctggggcagcgtgcgcgatgtcgtcgccgcttttggtggctcgatcctgatccgtgaatggtgggaaacgcagccgcagggcgcgccacacacattcgaagcggtgatgaccatcgccaatcagggcggcgaaaccgccaccgccaagttcgtcgacgatgtgatcggagagatcacccggaccaagccggtgcgctcgcatttcaccttcacccagggcatgcagtccgacgccactgtcggtgcgctcgcgagttcccatgtcacggcatttcgccgcatccaactgatcggagagtaa

SEQ ID NO: 529441 - DNA, 1470 bp, Stenotrophomonas maltophilia
atgcgcttgaaaatcaccgacgctggcttcgccaagctggtcaacacgtcgaacaccggcaccaacgccgtcctggtcacgcaagtcggcctgacgtccaccgccttcacacctttgccggagctaacgacgcttcctggtgaaatcaagcgcctggcgacgttcggcggccaagcagtaggcgacgacaccgtacacgtcaccatccgcgatgacactgtttccgcgtacagcctacgcggcttcggcctttacctggctgacggcaccctgttcgccacttatggccaagccgatccgatcatggagaagacgtccgaatcgatgttgctgctggcaaccgatacccgcttcagcgagatcgacgccacgcagatccaattcggaaacgcggaattcatctacccccctgcaaccactgaggtacggggcgtggtcgagctggccaccagcagcgaagccgaagaaggcgcggacagcgagcgcgccatcacgccgcgcggcctgcgcgccttcatcgacaagcgtttcggtgcatctgcgccgagcacgttcgtgcgcaccttgttgtcgatcgccaccgatgctgcattccgatcggcgctaggcctgaagtccgcggcactgaaagacgagggtgccgacaagggtctcgatgccgatctgctcgatggccgccatggcactcattacctggactggcgaaacatgaccggcgttccgtccagtgtgcacgtgcccggccaggtgatcatgttcgcgggctccgccgcccccaacgggatgctgctgtgcaatggcgctgctgtgccacgtgccacgtatcctgcgttgttcgccgccatcggtacacgatatggatccggcgatggcacgacgagcttcaatcttccgctgatccgcgaaggtacggtcgttgtgcaaacgactgaaccacaatcggttggtacattcacaacgggcgctgtcatcgcccacgcgcatacgggctcgaccgagaatgctgggctgcacggtcacgccctgaccatcgggaatgcgggtggtcacgcccatggcgccagtgccagcgctgtcggcgaccatgctcatggagcgtggaccgacgcgcagggaagccacaaccacggcgtgaacgaccctgggcattcccacacctggaatggtccggcgtccggcggcagcggtggatgggccgcagccacgggtgcacgccccaaccctaccggcaccagccacaacggtacaggcatctggctcaacgatgcgggcggtcatgggcacaacatcggtatgaacggcgccggagcacacacccactcgatctcggtcgccgcagttggtgaccacagccaccctgcttccgtctcgaacggcggcgaacacagccacgccgtgaatgtcaggcccaccggcggcgacacaaacctgcccgccggtcttcgaatgatctattgcattgcttactga

SEQ ID NO: 529442 - DNA, 579 bp, Stenotrophomonas maltophilia
ttgtttaccgaatcgcgctttgcacacgcctatgatccgctgacacgcgcgtatatgggtgcagtgaaactacagccctcgccggacggccgctggcatcttccggagtacaccgtggaagcggcgccacaacttcccgctggcgagtatcggtcgttccgcctgagtgacgatggcagccactgggagcaggtccctgatttccgcaaccggatgctctggaacacggtcacatctgcagtagtgcccaatcgcctggcgctgggtgacagcctgcccccggaagtgacgctgtccgctccccatccgctgatgagcggggatacccacttcaatgcctggaacgcagaagcccggcgctgggagctgaaacccgactacagcaaccgtccgctgtggaaccggatcgacggcagcctcgccgcgccactcgctcgtggcgaaacccttcctcccagtgtcattgaccgggcaccgcccgctgatcgcaccggcccaatcacttacgacgaagctaccgcaagctgggtaagcgtcactgcatccgactccacactcacagtaccggcgcaaacgtga

SEQ ID NO: 529443 - DNA, 969 bp, Stenotrophomonas maltophilia
atgagcgcgctgcgcagatggcgctgggcaccgttgccggggctcgccgccacgctgttgttgctgggcccgggcaacgtctgggcctgcaccacagtgaccgatggctttgtcagcacgatgtttcccttggtgttggacgaacgcgaatcgttcgatacgtcctttggtgcggccggtgtcgagttcagtggctgcccgaccgccgcgccgctggagttcgaggtggagttcaatactccgatgacactgctggggacggtcgagtaccgcggactgacctacggcaagttccaggtctccgacacgtcccccttggtgctgctgggcgcgtacgaagatcgggctggtccctccggcgaggtggcgttcaccatgagtgggcagaccctggtgatcaccgtgccggcatcaccgcgggcgaagctgatgacgaggctggcggtctccggccgacgcaatgtgcagagcgaaccgatctcgcttatctcgcagctgcgcatccgtccgcgcagcaatcctgcattggtcggcacgggcacgctggagctggggttcgatgtatcggtggtgcgcgactgcacggtgcagggcgccacgctggcgctgaaggatgtacctgccaatgcactgtcgggcaccggaagttcggcgggcgaagaggacttcacggtgaacatggtctgcagccacgacaacgtgccggtggagctgaccctgaccgatgcgcatgcacccggcaacagcggcagcctgctggccgcagcacccggcagcgatgccgcgggcgtgcagattgaactgctgcgcaatggcctgccggtgcagctgggcatgccctggccgtacggcatgtcgcagaccggcagcaatccaatttcgctgagcgcgcgctatgcccgcagcgccggcacgctgaaggccggtgcgattgtcggtgaagccgtactgatggccgattacccctga

SEQ ID NO: 529444 - DNA, 723 bp, Stenotrophomonas maltophilia
atgaaactctgcccatcgttgtggttgccggccctgctggtcaccgcgcttgtgctgccggcgcaggccgcggtaaccctgcaaggcacgcgcatcgtgcacgacgccagcaaaagccgcgatgtcacggtcaaggccagcaatgtgggtgagcaacccgcgatgacgcaagtctggatcgacgcgggcgacagccatgcgcgtccggagagcgtgcgcacgccgttccgactgacgccatccgagccgcgcctgttgcaggccaagcaggcacaggcctatcgcatcacctatgcgccgcggccttcggaagcgccgctgccgactgatcgcgagtcggtgttctacttcaacctgttggatatcccgcccaagccggccaatgccggcgaccgcaacctgctgcagttcgcggtgcgcacgcgggtgaagctgttccatcgccccgccggcctgccgggcagtgcgcgcgatgctgcggcacaactgcaatggcgcgccagcggcgctgccttgcatgtgcaaaaccccagcgcctaccacgtgacgctgagcaccctgacgctggccgatggccgcagtgtggacgtggacatggttgcacctggacagagcgctcacttcgcgctgccgcagggcgcagcgatgccaacgaaggtgatcttcacctggctggacgactacggtgcaccacgtgaacaacaggcgagcgtgggccgatga

SEQ ID NO: 529445 - DNA, 789 bp, Stenotrophomonas maltophilia
atgctgcgcatccacctgctgcagcagcggtatgcgctgagtgatcccggtatggaagaggcgctgcacgagatcgcttcgatgcgtctgtttgcccggctcagcggccttgatgccattcccgatgagaccacgattctcaacttccgacgtctgctggaaaagcatggcttagcggcgaagatgctggaggcggtcaacgcgcaccttgcacgcaaaggtcaatgtctgcgtgccggcacgatcgtggacgccacgatcatccacgcacccagttcgaccaagaacgcggacaaggcgcatgacccggaaatgcaccagacccgcaaaggcaaccagtggtacttcgggatgaagccgcacattggcgttgatgagttctccgggctggtacaccacgtgaagtacgcggcagccaatgccggcgacgttacggtcacgcatgagcttctgcacggcaaagaagcctgtgtgttcggtgacagtggctatgccggcgcggacaagcgggcggagttggtcgactgcaaagcagccttcttcatcgccgccaaacgctcaaagctcaaggctatcggaagtgcgcgcgagcgcaagcaggctgagcgttgggagaggttcaaagccagcattcggaccaaggtcgagcatcctttccgggtgatcaagcggcagtttggctacaccaaggtgcgttaccgtggcctggccaaaaacaccgcacaggtgctgacattgttcgcgctgtccgacctgtggatggtgcgccgacagctgctgccggcatag

SEQ ID NO: 529446 - DNA, 1362 bp, Stenotrophomonas maltophilia
atgtctcttgaaagcatatttgttcaagttccaagctatcgggacaaggagttgattcctacgcttttggacttgataaaaaacgctgcgaatccagccaatttaagggtcgccgtctgctggcagcatggcgacgacgaagtggtcgacgattttatcggtgcgggattccacctgtcacacagtgtccggcacgatgtcggcgtggtgcattgcttcataaaggatcttgcttcgatcaaggtgattgatttgagttacctgtctgccaagggttgtgggtgggctagatactcagctcaacgactttacggcggggaaaggtacagtctgcaaatagatgcgcatcaccgttttgtgcagagctgggacagggatatgatcgaaatgctcgagtcattacgggctcggtacgaaaagccggtgctaaccggatatccgccgtctttcgatccggagttttatccggcgcggcggcaggatttccctataaaaatgatgtttaggcgtttttcactgcgcgcattggtttcattcaaggcatcccgcatgaccgattgggatgagcgcgttatgcccatgcgggcgcgttttctaagcggaggcttcatcttcgcggatggaagcattgttactgaagtggcgaatgacccggggcattttttcgccactgaggaaataattatgtccgtgagggcctatacaagtgggtacgatttctttcacccgcataaagtgctgctttggcattactataatgacaagacagtgaggatatgggatgaccatcgccgggagaggagcgaagggcgagaggctggaattgattcgactctgctcgcgaaagaatcatatgagcgggcgatttctcttcttgagggcggcgggagtactgataaagacttcggtgatttcgggcttggttcactgcggactgttaggcagtacgaaagatatgccggcttgagctttgaacacagaagcgctcgttccgaggcaatcaaagggaccgagcccgatgagacgcatttttatacgtcggatgatgaatggaggcaggggcttgtttatacgaaggtcttgcatgtaatgttgaatggagcccggctgcggcgcttgacggaagagtacgatggtgtcgccttgatcgctaacggcgattttgattcagatggcgctagattgaaactgccttcagataagtttaacgaaattgtgtcgggcgagcaggactattgcttggtcgagctagatgttagtccttttgcgaattggcgtgatttccacgtcgttgctacaagctccggcacggggagtgaagtggttgtttcggatggtgtgtcggaagttcattatttatag

SEQ ID NO: 529447 - DNA, 1035 bp, Stenotrophomonas maltophilia
atgcagtttcgtaatcttggtaataccgggcttcaagtatctgcgttggcgctcggaacctggttgaatgttgggcagaggctggacagcgccgaaagtttgaaattgctttcgacggcttacgacaacggcgtcaacctcttcgacaccgcggaaaattacggctggggagaggctcagatcagtctgggctccgccattcgcgcactgggctggccgcgcgacacctacatcatctccagcaaggcattctacggaagcaggcgcgacgatcggttccatccgacacagcgcggtctatccaggaagcacttggtggattcgtgcaacgacgcgcttgcgcgtctgcggctcgattatatcgatctgtacttgtgccatgcctacgacccgcgggtcgatatcagcgagatcgtatggacaatgcattcgttgataatgcagggaaaaatactgcactggggaacctcgaagtggaccgccgcgcagatccaggaagcgcgcgacatcgcgttccgaaacaacttgattgcgccggttgtcgagcagccggaatacaacttggtcgctaccgaggtcgtcgaaaatgatctggcggatctggtcgacagttgcggcatcggccttattagttggtcgccgctcaaacaaggcatcttggccgggcgctacgggagtggcattgccgctggctcgcgcttctcgttttcagacatcaggactttgaaagatcaggtgccggaggcgcagttcgattcttggctggattttgctagacggatggagaagttttcaacacagctaggagtgtctacggcgcaacttgcgatcgcatggtgcttgaagaatcgcttgctcagcagcgtgctgcttggctgctccagtgcgagccagttaatggagtgcttgcaggctgtttccatcagctcgcgcatgagttctgaaatttggcttcaattgcatgagcttcggcgaatagaacatggtgatgctgaagcgccgatatccttggaagaacaacggaatgttggatga

SEQ ID NO: 529448 - DNA, 1236 bp, Stenotrophomonas maltophilia
atgatcaacggcctcaatactccgctagtcacgactatccagaagctgcaggaactgcaggtcatcataaagatcgccgaacgctgcaatttggcatgcagttattgctattacttctttatgggggatgagtcgtacaaagatcgcgatcccattatgaagcaggacaagttcggcgagatcgccgagtacctgcgtgagggtgtgatcgacttgggcataagaaacgtcaacgtcgtattccacggcggcgaaccgacgctgatgcgcccgcgcgatttccgcctgctggcggaaaatctgcgcgaggcgctggcgccgaattgtcgattaagtttcggaatacagaccaacggctaccacctgaatcgggaatgggaggagatattttcggatttcaatatttccgtcggaatcagtctcgatgggccggcggagtacaacgatcgctttcgcgttacccataagggtaaagggtcgcatgcgaagatagtgcagacgatcgagcgtctgcacgagctggagcgcgaagagaagattaacaatatcggagtattaagcgtgcttggacgcgatttgcctgtccagaaaacctttgatcacttcgtaagcgatctgcaattcagctatatcggcttcttgctgccggatcgaagtcacgatgagccgttcgtcgaaggtgattcggcggaagcctacggtgatcaactaatagagcttttccaggaatggctccgccatcaacacgtttctgtacgagaagtcacgaaggtgctgcgctatttccagagctttgcggaatcaaacgcgcgggctgccgatgtattcgacaagggcacgcacgtcgtcgtcatacagagtaccggtgaagttaattgtgacgactcgctgatccccgcgctcgattggcgaaactcacaaaggcggtactcggtcttcaactccagactgcgcgattttgtcaacgatcctggcttggtcagtctcgacctggcgcgatcaaagcttccagagggctgtaagcagtgcgaatgggtgaagatctgcggcggtggcgcgttggagaatcgattcagcaaggcgcgccagtttgacaattcgagtgtctattgtgccgggttgaaaaagtatttctcacatatttgcgattgcctggtcagcaacgggtacccgagggacgttctcgacgagaaactgaagatcgagggcgcctaccaacccacgttcgccatctga

SEQ ID NO: 529449 - DNA, 1629 bp, Stenotrophomonas maltophilia
gtgcttaatgtcggcaaagtagcgttgaaggtcgtcgagtgcttggattctccgaacgcaatcaggcaggtattctgcattgcgctactggcgcgaatcctgcttcccggacagtcgcaggcagccgaggttgctccgtgcttgaaggcgagtttggaagtcgacgctgcgatgacaacggcgaagttgcgcgtcgcagccgagcgccctccagaattcggctcgccggattggaagctcagcggcgttcagcagcccggattcttcgactacacgctagatatccgtcgcagcgtgttgccagaaggtcgcgagtatccattggtcgtccggatggacccagaccgcgcggccatcaacttgcggcagctgtcagggccagcaacgaagaatgcggacaggatctgcgaaacagttgctcttacggtggcaggaggggagcgaaacgaactgcagtccgcgactttcggaggttacgcattcttcaagaatggcttgcccacgcaggtgtcttctatcacttccgacgatcgcataccgcgccacttcgtggatagctacacagattggttccaccgctcgcggaaattttatcggtccgcgcttggcagggagacgcgcgaggtcaatagtgttctttttctcgtagaccaagacgaggagggccaacagagcggatgtcggtacgccggtagcgcgctaccgggtctacttctgattgggctgcggcccggatgtctgacgggcaggcaagagccgcccggcgaccttcgtcatttcgtcgcgcacgaaacattccatcagtggaattacacgatctcaggtgtcgaacgcgatcccaccgcgcaggcgtttcggctgatgctgctcgaaggcggcgcggagctggccgcagtgctgttcaatgcgcagacgaaagccgccggtgacgatgtcacggaacgctatcttggagccgcggctaaaggttgtgtcgatgcggccctgggccggcagcagtcgattgtcgagcttgtcaacagcaacaacgaatacgcgtactcgtgcggcgcagtctatgcgttcctgagcatggcgcctgacgggcgcaagcctttggatgccttagcgcgattctggaaacctgtgctagtcgcgcccgataagccgattcggagccgcgtcccatttgtcgatgcggccttcaccgcgaggatttcgtcactgccgacggcgaacgagcttttctccgcaaccgggtatcaattggtcgccgccaaagagctgaccaagggggaacgattccaggttgccgtcgaactgcttcgtgagatatcccgcaatgactgccaaggcagctacggtctttttacgggggctgacgagatcgtcatcgatccgaatttgacgcaatgccaacacctgcgtgccggtggcaagcctttaaacgtcggcggcttcgacatttatatcgctccactacaggcgcgcgcggcatggcttagcgcttgcgacgctggcggcaccgtgccggtcgcctacaaagactccgatctcgaagcgacgtctgtcgcctgcgcgtccaaacccaagaacatgttcacgcctcttcgcttactccgcgtcccgcagcgagaaacgctcccatga

SEQ ID NO: 529450 - DNA, 2163 bp, Stenotrophomonas maltophilia
atggctgatggaatgaccactcacgagaaagtgctgatgcccctcaagcgccgggacctctcgcgcggactgcgtttcagctggaagcggacgctgccgatgatcctgcaggcggaagcagcagaatgcggcttagcgtgtgttgcaatggttgcgtcatatcacggccatgatatcgacacgatgacgctgcgtgcgcatttccccctgtcgctcaagggcgcctctctgacgcgaatcatggctatcgccgcgaagctcggattcgaggggcgaccgctccggctggacttgccgcagcttggcaagctcaggcgaccctgcctcctacactgggatatgaaccacttcgtcgtgctgagtaaggtcgacgcgcgaggggttgtcattcacgatcctgcccgcggcatctgtaggctcagccttgaggaggcctcagagcacttcaccggggtagcgctcgaacttactcccacgactgaattccggccagttaaggcacgacagcccatttcgctgcgcgccctggctggttccgtgcgcggagtagtcccaactgcggtgcaggttttcatcctggccctggccttggaggtttttaccctagccggcccattctatttgcagtggacaatggaccaggttctggtctctgccgatcgcgacctgctgactctgctgagcgtagggtttgctgccgtcgtcctgatgcaaaccgcaatcaccgccatgcgttcttggttgatcgtctggatgggcgcgaccacaatgatgcagtgggccagcaacatagctgggcatctgttaagactgccattgaactggttcgagaagcgtcatgtgggagatgtcgtttcacgcctgggttcgatccaggtaattcaaaacactttcaccacgaagttcattgcctcattgctcgatggcttgatgtcgctggtgatcttcgtcgtcatgtgcttctacagtgttcatctggctgccttcgtagtcgccttgtttggcatgtatgcagccttgcgttgggccttcttcatgccactttggcgcgccaacgaggaccaaatcgtgcatgtcgcgcgccagcagagcgaactgctcgaatcgatccgcggcatcttgccgatcaagctggccaatcaacaagacagccggcgagcgcgctatgcgaatgccatggtgcaggttatcaatcgcgatgtaagaatccagcaactgaacatttcctttggggcgaccaaccagctcctcttcggtgtgggccgtgtggcgttgctctgggtagccgccgtcttggttctaaaggagagcttctcggtgggtatgatgattgctttcaccgctttcgcggatcagttcatcgctcgcacgaccgcgctgaccgataagtgggtggatttcaggatgctgaaactgcatgcggaacgtctggcggacatcaccttgagtcggccggaagaggacggtgacgacgatgaagcttgggagagcgatttgccgaatgcgagcatcgagcttcgagatgtcagctttcgctacggagaggacgagccatggatactcaagaactgcaatctgcgcgtcgagtcgggccggtccatcgccatcactggcggttcgggttgcggtaagacgacgttagccaaagttattctaggcttgctggagcctaccgaaggcgaggtgctattcggcggggtcccgatcagaaaactaggtgttcaccgctaccgaagcctgatcagcgcagtcatgcaggacgatcaattgttcagtggaacgatcgcgcacaacattagcttcggtgctcccatagagggagtggagcgtgtcgttgaagcagcccgccttgcggccgttcacgacgatatcgctgcgatgccgatgggatacaacagtttggtcggtgacatgggttcgagcttgtccggtgggcagaagcaacgagtgattctggcgagggcgctgttccggcaacccaggcttctggtcctggatgaagctaccagccacctcgatgtcgaacgtgaaaaattggtcaatggcgccatcagccagctctgtgtaacacgcatcgtgattgctcaccgactcgagaccgtgatgagtgccggagccagattcgatatgtccatgcctgaggggagcgcatgtcgtgcttaa

SEQ ID NO: 529451 - DNA, 795 bp, Stenotrophomonas maltophilia
ttgcagatcgtgatccagcggcagcaggtcgaaagcgcgcaaaatctgcttgatcgcattcagcccctcgaaaaggatcgctacatctcaattttcgagatcgaacggcagcaatcggccgtgcgtgacgcacacttgcagtacaacggcttggttcggctgcgtctggatttgcgtcagcagttagccgatgccaaggagcagttgtccaagttgcccttggatgcagccgtccagcacaaccagatcgctcgcgagatctctgatgttgcggaatcactggcacaaaacgaaatggagcgtgcagttctatttcgagctcaggccgatggtgtggtgtcgactgtacttatcaagactggtcaaatggtcagtgccggccagccaatgctgtcgctactgcccgctgacgctaccttgcaggcgcaaatcctggttcctggccgcgcgattggcttcatctcgcccggtaccccagtgatgctgcgctacgccgcattcccttatcagaaattcggtcagcagcgcggcagggtcatggagatctcgcgaagcgcgctatcccctgctgaagtgaccacgttgacaggtcaggtgccgccggagaacgaagggcctctttatcgcgtgcaggtggcactggaccgtcagtatgttctggtgttcggtaaacaggagcccattaaaccgggcgctgctttcgaagcagacgtgctgatcgaaaggcgcagactcgtcgaatggctgttcgagcccttgtatggcatcagagaacgactgaaggaagcgggctga

SEQ ID NO: 529452 - DNA, 261 bp, Stenotrophomonas maltophilia
gtgggcacctccagtgtagctgccgatgcgctgttgatgaacaaggcgttcgacaagggcgccgatctgctggacaaccggaatatctaccagcgggtcgacaaggccggggtgggatggaaattcggcgggcgcaattgggagcgtcaggaaacaatgaccgcacgcccgagggcgtggacgatcccgctcgaaatgctgtggggccagctgcgagagggaccgcgaactgggcgccaatgccagccgtgtggccgttga

SEQ ID NO: 529453 - DNA, 780 bp, Stenotrophomonas maltophilia
atgaacatgaaatatataagcttgcccattttgacggccgtcctcctgtctcctgcatatgcccaggaagctgaaacggttgcgcggaaacctggcatatccgtcgatgagaatgaaacatccgcgtggatgcgccaaacctttgagaagcgccaggcagagaacaagcagcgagggcaccggcgcctgacccatgacgaattgcttgagcttgtttcgctgaaggattacaacgcctcagtacaggaaaagaaccgtatcgtcagtggaattcaattgcgtagtgcggggcctttgcaggtcgaggaaggaacgctgccttctgcatctgagattgcgacgggattccgtacaagaattcgcagcggtaccgaacttaaagaaaagctctcctacgttccggctgatctctctcgctctccggtcgggccggcagaactattgaggatcgagcctacaggaacaatcagcaatggcaagtcaaccgggctgatccgtacctacttgctccccgggtcgggagttcttgtcgtatcggaagatgattacgtcgcgtcacagaccagaataactctgatcagggaaacgctaaatgccaacgtaaatggaattccggcgagggcgtactctgccatgtcgaaagatgggaggggaaaggcggagctgcgctgggttacgcccaaccgctcgtactggctgacgtttatcaccgatgactcaacacagctccagtctggagaaatgctccttcggcaggttgcgcagagtatcagtatgtag

SEQ ID NO: 529454 - DNA, 3933 bp, Stenotrophomonas maltophilia
atgtcgacaggctatgccgacatgagtttggatgtgaccaactcaatggcgatcggtgcaggctcgcgaatgaacggaagctattcatttgctttcggacagggggcgcgggttgagaagcagaacagcgtcgtgttcggctaccacgccacgacttccaacgttgatagtgtcgccatcggttacacatcacgcaccggtagcagtggtggtcacaatgtcgcaattggagccagagcttttgccgattacatcggtgcaaccgctctggggaacagttcaacggcacggggtgagaatgctgtcgcaattggaagcggggcctcggcgacgtcatcgaatgcggtggccattggtgccaattcggtggccaacggaagcaacatcgtttcggtaggaagcagcggcatcaaaaggagaatcgtgaacgtcgcgtcgggcagcgtttcatatggaagcgcggacgcggtcacaggtggtcagctgtacgataccaatcagaatgtggcgtcggcgcgaagcgctgcggattcggcttactcgacggccaggacggccgggaccgttgcagatacggcgaagtccaatgcggacaacgccttgtcgaaggccaatgtgctttccggccttctgggtcagacctctgcctcggggaacgtccgtgtaggtggaagcaacagcggtaccgtactcgacgtccgcaacagcgccagtgccaatcgcaggatcacgggcgtggcggacgccacgctaagtacgactagcacggatgctgtgtcaggtaggcagctgaataccacgaacagcaatgtgacggccgcgcgctctgtcgccaactccgccaagaccaacgctgacagcgcactggcaaaggccaacacgctttcgggcctcctgagcgagacctctgcttcggggaacgttcggctgggcgcatccaacagcggtaccgtcctggacgtacggaacagtgccagtgccaaccgcaggatcatgggtgttgcggacgtgacgttgtcctcgacgagtaccgatgcggtgaccggtcgccagctcaacaccaccaacagcaatgtcagcaccgcgatgagcgatgccagttccgccaggtccacagcgaacaccgcgctgacgcaagtggggacgctcaacggactgctgaatcaggtcagtgccagcggcaatgttcgcgtgggtgagaaaagcagtggctccgtagtggatgtgcgcaatagcgccaatgcgaaccggaagctgaccggtgtggccgatggcgtggtcagcgccagcagctacgaggctgtcaacggcaggcagctcaatgccaccaatgacaaggtgacgacggtggagggtgtggccaggtctgcgggcgcagacgctgccgcggcgaaggccgatgcagccaaagcgctgaccgagacggcggcgctgggcggtctggtggcgcaggtttccacgtccggcgatgtgcgcctgggcgggaagaacagcggcacgacgttggatgtgcgcaacagcgccaatgccaatcggaagatcagtggtgtggcggatggttccattgatgtcagtagtacagaggccgtgtcgggccgacagctctacgggaccaatagtcgaatttcggtgttggagagcgccagccagtacgtgagtgttggtgttgattctcttagccaaggcgcggaggctggcttgctcggggtagcagtcggtgattcagctaaagctggcatggaaggtggaacctcgctgggagcgctatctcttgcagacggcatcaactctgtagcaatcggacgcggctcgacagtctcgaaagactctctgaatgggtttgccatgggagccggtgcccacgtggaggcggctgacagtattgcaattggagctggagccaaggtccgggccggggcgactggcgcggtggcaatcggctcaggtgctgaagcaacagagtcgaatacggcgtcctttggtacgaaggattcagggcggcgactggtgaacgttgcccgtggcaccgccgaccacaacgccaccaccgtctcccagctcaaggattccctcgccacactcgggggcggagcaggcatggatgcgaatggcaacatcgtcgcgccgacctacgcggtgcagggtggaacgcagcaaaccgtcgaggatgcactgatggcgctcgatggcgccgtcatcaccgcaggccgtcgcatggacaaggtggaaggccagctgagttcaatcttccaggaatcaccctcgactcgtgccgacggcatgaaccagatcgcgctgaatggcgcgaatggcatggtgttgaccaatctggccgacggacgagtggcgccaggaagccgtgacgccgtaaccggcagtcagttgtatggcgcagagcagaagatctcgcagaatcggaatgatctggaagcgatgcgcaaggagcgagaggtgggcgcgcagacaatgcgtggattggatgcgagcgtcatcgactacggtggtgcgcgtttgactggcgtggccggggcgaggctgtcggctgatagctcggatgttgtgcgcggtagtcagctctatgagaccaacagtcgtgtttcggccatggaaggaatcagccagtacgtcagtgtgggtgccgctccaggctatggtcctgctcaggctggaccggttggtcttgcaattgggaacttcgctaagaccggcaacgatggaggaactgcagtgggaacccatgcgaaggcactgggcagaaattccatagcccttggtcgcgcttcggtcgtgcatgaggattccgatagcggatttgcgctaggtactggagcggaggtaggcattgccggaggtggtgcacgaggaggcattgctatcggtgccggagcaaaagtgggtaaaggagcgaatggttcgctggcaataggcgaaggctctcaggcgaatgaggccggagtggtttcatttggaagtgcaactacttatcgccgcctcgtaaacatcgccaacggtaccgcaaaccacaacgctgccaccgtcggccagctgcgcggcgcactgtccgcactcggcagcgaagtcgatgccaacggcaacatcgtcggtcccagcttcaatgtccaaggccagtcccaatccaccctcaacggcgcattggaagcgctcgatggtgcagtcgtcagcaccacctcgcgcgtaaaccacgtcgaatcccagctccgctccgtcttccaggaagccccctcggtccgcgcagacggcacccaccagatcaccctggccggcgccaacggcatggtcatctccaacgtagccaacggcctgatcgcggccggcagccgcgatgcggtcaacggtggccagctgcattcgatgcagcagcagctcaatgggcgcatggacgggctggagcagcgcatcgacgatcagccgcaggcccgcgccatcgcggctgcgtctacgccttcgccatccaccgaagagatcgcgccggcgccggagaccggcggctcgccgcagatcgcttcggccggtgaaggtgacaagccggccccgcagccgaagtcgaagcaggacgacacgcccaagccgcaggtcgacaccgccgacctggagaagatgctggcccgtgccaacgagtacaccgacggtgcgatcagcactttcgggcgtcgcctggacaagatggacaagcgcttcaatcgcatggcggcgatgagcagcgcgcagagcgcgatggcgatgaacaccgccggcctggccacgtacaaccgtctgggtgcgggcgtgggttacagcgagggcgagtcggcgatggcagtgggctaccagcgcgtgctcaacgagaagggctcggccactttcagtctcaatggtgcgttcaccaacagtggcgaacgcagcatgggcgtcggcgtgggcatcggctggtaa

SEQ ID NO: 529455 - DNA, 1137 bp, Stenotrophomonas maltophilia
atggaagccctgcggctgctggatgcgctcgttgaagccggtgtagatctccggatacaccgcggcaatcagctcgcggatgggcgcgtagtcgtgcatgcagccggcccagtcaaccctgctgccgggcagcgtggccagtgccatgcggcagacgatctcgacctcgggcaagacatcggcactggccggctccagtaccccgcgcgacgcggtgacattcgacatcgcgtcttcgatggtgacgaactgctcgccggccggcgtaacgatgcgctccgaacgcgccaccaccggcaggatcagcgcgtcgcggccatggaccaggtgcccgcggttgagcttggtggcaatgcccacggtgagctccaggccgcgcatcgcctcatacgcacgcggcgtatcgggcacggcatgaatgaagttgcctcccaggccgatgaacactttggcgctgccgtccagcatcgcctcgatggattcgaccacatggtggccatgctcgcgcggcgggtcgaagccgaacacctgctgcacgcggtccagataggccggcttcggcttctcgtcgatgccgacggtgcggtcgccctgcacattggaatggccacggatcggcccgatgccggcgccgggcttgccgaagttgccgcgcagcatcagcaggttggccacctgctgcagcaggcgcgagccgtactggtgctgggtcaggcccatgccgtagcagatcacggtggcgttggagcggatgtagatttccgcgcaacggcggatctgcgcctgcgatataccggacacctgcacgatctcgtcccagtcctgcgccagcacgtcttcgcgcagcgcctccaggcccaccgtgtgttcggccaggaacgcgtggtcgagcacgcgctcgccctgcgcctcgcgctcgaacatcaccttcatcatgcccttgatcagggccaggtcgccgccgatgcggatgtgcacgaactcgctggtgatcgcggtcgaaccgaacgtggccatctgcaccacgtcctgcggttcggcgaagcggatcagcgcacgctcgggcatcgggttgaccgctacgatcgggatgccgcgtttgcgcgcttcgaccaggttgctcatcatccgcggtga

SEQ ID NO: 529456 - DNA, 312 bp, Stenotrophomonas maltophilia
atgccgggtatcgaccccgtgccgccgcagttcgcccagcgcgtgcgcacccagcgggttgcccgccaccgcgccgaccatcctcacctgatgtcccagccgggacagcgagacaccgacgttggcctcggcgccgcccacatggacctgcagctgcggcgactgcagcagcagttcgtggccgggggcgcccaggcgcagcaacagctctccgaaacacacgatacgacccatctcagctccttcacgcgtgccgccggcatgggacactgcatggcatgtaagtggaccacgcagggggcgtggcattga

SEQ ID NO: 529457 - DNA, 738 bp, Stenotrophomonas maltophilia
gtggctgtgaattctgcacttacgcttgtttcctctggcgcgcccggcgaagagaagtctgggccgaagcgcacgcttaaagacatcctggatggcgttgcttcgaaagaactagttctagcctttagtgggccgattggtgcaggtgtcaaggatgtagttgatctcgtcgatagtgaacttgtcgggcttggctactccatagagagaattaagcttagcgagttgatacggcaggccgcaaaaaagctgaatttatctccctctgagcctgaggcagcgtccgccgcaagtcgatataaagcactgcaggatatgggtaacaagctccgaagccttaaggggagcgacgttcttgcccagttggctgtgcgtgatatctcattggatcgagctaagaagaactcaggcgaaatcaaagatgtcgttcccggcagagttgtgtatttgatcgatcaattgaagaatcccagtgaggtatctctcctgagagctgtgtatcgagaaaatttctatctcgttggcacactttgcggttcagatcagagaaagagaaacctccaaagcgaagggctttcagtaactgaggctgagtcgctaatggaacgagatcgcaaggagggtgttagtcatggtcaaaatctagaaaagacccttcagctagcagatttctttgttaggaattcaagctccaacactcgtgacctgccccctttctcagggccactagctacttag

SEQ ID NO: 529458 - DNA, 246 bp, Stenotrophomonas maltophilia
atgtcggcgcagacgaaagggggagtagtggagggacagctttcgttctcgttcgagatcagccgggacatggacgccgacctgcgcgttagcgaggcgcaggagcggtcggtagtcaatgttgttctgactgaatctgctcaggttacctgcatttcatcacgacgcatctctgtcgagaagcgagatcagagcgatgcttatgtacgtgttatggagtacgcccggagcctccggcgcatctaa

SEQ ID NO: 529459 - DNA, 3024 bp, Stenotrophomonas maltophilia
atgaagcgcaccagtgaattcgcattcgaaaccgccatcgaggcagttttgctaagtgaaggatatacgaaggtcgacgtcaaaggattcgaccgcgagcgcgcgattttcctcgatgaggcactggccttcattcgtgccacccagggcaaggtgtgggagaagctagaaaccctgcacggcgagcagaccggtgcgcgcgtgctggagtcgctatgcaagtggctggatacccatggcgccctggccacgctgcgccacggtttcaaatgcttcgggcgcacgctgcggatagccttctttcgcccggcccacggcttgaacccggagctggacgcgcgctaccgggccaaccggctgggtctgacccgccaattgcatttcagcccgaagtctgagaagtccctggatgtagtgttgtcggtcaacggcattccggtggtgacgctggagctcaagaaccccttgagcggccagacgtcggcgaatgccatccaccagtatcgccacgaccgcgatccccgtgaaccaatcttcgagttcaccaagcgcgcgctggtgcacttcgctgtggatactgaagaagcgcacatggccactcgcctggccggttcgtccacttacttcctgccgttcaaccggggcatggacggtggcgctggtaacccgcccgatcttgaaggacgcaactacaagacagcctacctgtgggaagaggtgctacagcgcgacagcctgctcgacctgctcgcccatttcctgcatctcgatgtggaagaaaagaccactgacgtcggtaagaaggtgcgcaaggaaaacctgatttttccgcgttatcaccagttgcaggctgtgcgccgtatggtggcggctgccgccagcgagggcgtggggcacaactacctggtcgagcattcggccggcagcggcaagagcaacacgattgcctggctggcgcaccgtctctccagcctgcacaacgagcgcgacgagcgactttttgacagcgtggtggtcatcaccgaccgggtggtgctcgaccgccagttgcagaacaccatctaccagcttgaccaccgccagggcgttgtgcagaagatcgacgaggactcgcgccagctcgccgaagcgctggaagccggcgtgccaatcatcatcaccacgctgcagaaatttccattcgtgtccgggcaactagccaaacttagtgaggagcgtggcgaaggcagcaagagccatctgcccacgcgcaagtacgctgtaatcatcgacgaggcgcacagttcgcaatcgggcgagacggccacggacttgaaaggtgtgctgggcggtggcgagctgcgtcgcaaggcgcaagagatggccgaggaggaaggcgaagtcgaactggagcgactgttccgttccatggccaagaggggccatcaaccgaacatgagctttttcgctttcaccgccactcccaaacacaagacattggcgatctttggccggggcgacgagcccttccaccgctacaccatgcgccaggctatcgaggagggctttatcgaggatgtgctcaagagctacgtcacctacaagacctactacaagctgatcaagaaggccgaggacgaccccaacgtcgagcgcaagaaggcggccaaggcgttggcccgttttatgcggctgcatccgcacaacattggccagaagaccgaggtgatggtcgagcatttccaacacttcacgcggcacaagattggcggccatgccaaggcgatggtggtgaccggctcgcgattagaagcggtgcgatacaagcaggagttcgaccgctacattcaggagaagggctaccccatcaagagcctggtggcgttctcgggcaaggtggaagacgacaagattccggagaagtcatacacggaagtcgagatgaatggcggcctaaaggaaaaggaactgcctgacactttcgccaagccggaattccgcgtgctgctggtggccgagaagtaccagaccggcttcgaccagccgttgttgcacaccatgtacgtggacaaacggctggcgggcattcaagccgttcagaccttgtcgcgcttgaaccgaactcacccacttaagggcgatactttcgtgctcgatttcgtcaacgatcccgacgaaatccaggaggccttccgtcaatactacgacggctcggtgatgggcgagcaggtcgatccggacaagctctacgaggtgcaggccgaactggatgcctcgggcatttatctgcaaacggagattgccgagtttgcgcatgtgttctttgcacctaagcgccgccagagccttggcgaccataagctgatgagtgcgattcttgatctggcggtcgcgcgctttgtgcggttgcagaacaccgaagaagacgaagcggagttgtggcgcagcaagttgcaggcctttcgcaatctgtacggtttcctgagccaggtgattccctatcaggacagcgacctggaaaaactcttcacctatctgcgccatctcgcgctgaagttgcccaagcgcaagagcgggccaggctatcagttcgacgaggaagttgaactcgattattaccgcttgcagaaaatcagcgaaggctcgattagcctcaacgaaggctatgccaaaccgcttaacggtccacgagaggtggcctcaggtatggtgcgtgacgaagctgtttcgctatcacgcctcatagacatcatcaatcagcgcttcggtggcgaattgaatgacgcagatcaattattcttcgatcagatcaccgaagccgcgagccagaacgagtccctacagaaggcagcagaggtcaactccctagacaagttccagctcgtatttcggcaggtccttgagtcactatttattgagcgcatggagcttaatgaagaactgttcactgattacatgggcaagccagagatgcgggagctggtatccaagtggttgggtagccaagtttacgctcgtctttcggatagggcaccgcagagctaa

SEQ ID NO: 529460 - DNA, 630 bp, Stenotrophomonas maltophilia
atgcggaccatcaagaaggggccggagcccgcgactttgacccagcatcgccagcagccgcatgccgactacgacaattactccgacaaggcgactttgcggcgggcgctggtggccgagcagcgcggcctgtgctgctactgccagtcgcgcatccgggccacgcccgagggcatgaagatcgagcactggcaatgtcaggccagccaccccgggcgacagctcgattttggcaatctgcatggcgcctgtctgggcgggcacggccgtcccgaacgtgagcagcattgcgatacgcgcaagggcaatgacggcctttgcttcagcgtatgcgacccggcgcaccccatcgagcacaagattcgctttttaggcgatggaaccatcaaggcagacgacgccgccatcgaagaagccctcaacgcggtgctcaacctgaacctgccgcgcctggtgagcaatcgcagggccgtgctcgcagcgtttcagcagcgcctgcaggactgccgtcgcgttgatccggcgcgtgagctgcccaggtgggatggtagcgaacccggcgacctgcccgagttcgcgcaggtgcttgtctattggctaagaaagaaacaagcgagggccgccgtatga

SEQ ID NO: 529461 - DNA, 1314 bp, Stenotrophomonas maltophilia
atgaaactggaagccctttccctcgcccactgtggtggcttcgagcagctcgacatcgccttcgaacccgatgtgacgctgatcgccggtgtcaacggcgtgggcaagtccacagtgctgcatgcgctggcggtgctgctttcacgggcaatgccggaatttacgccctcgcgctcggcgccgctgtacttcaccgatgacgacattcacggtgacaagggctcgctggaggtgtccgcgcgcatccggatcaatgggcagaccatcaatggcggggtgcagcgcctgcgcgcggcggacgagaagggcgaccgcttcatgctgctgcggcaggccgaagaggccaccgccgccaccgatttcgctcaggcgctgagtgcccgcacgctgaccggtgagctggaggcgggcctgaaggagacccgcgccgcgctggcgaccctaaagagcgccgcccattcgccgttggcagtgtatttctcgcccaagcgccagttgcccggccagccacgcagcctaccagaggccaagcccttcgagccgtccatcgcctacggccgcgccctgcacgatcgcgaagtagagctgcgcgagttcatgcactggttccggacccaggagaagctgggcgcggccaatgaaccgcgccggttcaaggtactggacgcattgcgcgccgtggtggttgaactcgtgccggagttcggcaacctgcgcatccaggaacaaccgcgacttggcttcgtggtggacaaacgcggccagcccttctatctgcaccagctttccgatggcgaacgcggcctgctggctctggtgttcgatctcacccgacgcctggccatcgccaaccctgagagtgacaaccccatcgccgagggcgcggcgctggtattgatcgacgagatcgaactgcacctgcatcccaagtggcagcgcgatgtcctgcagcgcctgcgggacatcttcaaggcctgccaattcgtggtgacgacccattcgcccctggtgctgggcgaggtgccggcgcgctgcgtgcgcttcctcgaattcgtgaacggcaaagtgggcgtaaccgtgcccgtcgaggcctatggcatggacgccaaccgcatcctgcaggagttcatgggcgccccggtgcgaaatcggcaggtggatggtgagctaaaggcgcttttcgaactgatcgaccaggagcatttcgacgcggcccgtgccgccattgcggccctcgaacacaagctgggcgaagacgagcccgagctgacccgagccagttcgctgatccgctttctggagggcgctgagtag

SEQ ID NO: 529462 - DNA, 1200 bp, Stenotrophomonas maltophilia
gtgatccacacgtctgtacgagtgaagttcatctgccggcttgggtacggcgattcgttaccaaaggacgaagagttcgctggtgatactcccgtttttggctcgaatggccagtacacgaccacctgcgccagaaacaccgagattcctgccatcgttttgggacgtaagggctcatatggcaaggtcaactgggcgccggatgggtgctttgcttcagacacaaccttcttcattgacgttcggctcaccggcgcaaatctgcgatggctgtattggagcctccagacgctgggcttggatgaggggtctcaagaggcggcggtacctgggctgaatcgggagtctgtgtatgaggaacgcatttggcttccctccctcaccaatcagtcgaacatcgccaatttcctcgatcgcgaaactgcccgtatcgatggactgattgccgagaagagacggatgctggcgctgctggaagaaaagcgcgttgccctcatcagccgcgtcgtcacgcgcggcctcgaccccgacgctccgctcaggccctcaggtcaggaatggctgggcgacattccggcgcattggggcttacagcgtctaaagcaacttgctgaggttcggggcggattgacgctgggtaagcagtattccggcaaattgctggagtacccgtatctgcgcgtcgcaaacgtacaagacggctacctcaagttggacgaagtattgacagtcgaggtgcctgccaaagaggcggcgtcgaaccttttggcctatggcgatgtgctaatgaacgagggaggtgacatcgacaagcttggtaggggctgcgtttggcgaaacgagatagcgccttgcctgcatcagaatcacgtctttgccgtcaggccgcattccgtggactccgattggcttgcgctttggacatcgacgctccaggctaagtgctatttcgagagtcgcgccaagcgctcgaccaaccttgcatccatatctggatcgaacattaaggagcttcccgttccgttgccgccggtaagcgagcagctcgcgatacgacatttcctagcagttaggcatacgcgacttgagacgctccgcggcgagcttcgagactcgctgcgcctgcttgtcgaacgccgcgccgcgctgatcaccgcagccgtgaccggccagatcccgccggaggagatgaccggatga

SEQ ID NO: 529463 - DNA, 2130 bp, Stenotrophomonas maltophilia
atgagcgttaaatttcagcaactcgccaatttcatctggtcggtagccgacctgctgcgtggtccctatcgtccgccgcagtacgagcgcgtcatgctgccgctcactgtgttgcgccgattcgatgccgtgctggcgccgagcaaggaggccgtgctcaagcgctatgagacgctcagggcgaagaatatcccgaacatcgacgccatcctcaacggcctggcaaaggatgagcacggtaccgcgctgggttttcacaaccacagccagctcgacttccaaaagctcaagggcgaccccgacaacatcggccgccatctggccgactacatcgccggcttctccgaaaacatccgcaagatcttcgagcgcttcgagttcgacaaggagatcgagaaactcgaagaatccaaccgcctgtatcaggtggtatcccagttcgccgagatcgacctgcatccccgcagggtcgacaacatcacaatggggctggtgttcgaagacctgatccggcgcttcaacgaagccgccaacgaaacggcgggcgatcacttcaccccgcgcgaagtgatccagctcatggtcaacctgctgctggaacccgacaccagcgtgctcacccaggccggcgtcatcgtcaccatctgcgacccggcctgcggtaccggcggcatgctggccgaggcgcagaactggattcgcgcccacaacgagcaggccacggtcaaggtcttcggacaggactacaacccacgctcttatgccgtagccgcctccgatctcctgatcaaaggccacaaggacggccaggtggtgttgggcaacaccctcaccgacgacccctttccggagcagcgcttcgactacctgctggccaacccgcccttcggcgtggactggaaggctgagaagaaggtcatcgaccgctggccgaacttccgtggctacagcggcaagctgccacgcatcaatgacggtgccctgttgttcctgctctacatgatgagcaagttccaggactacatgcctggaagccgcgacaagcctggctcgcgaacggccgtagtcttcaatggctcgccgctgttcaccggcggtgcgggcagcggcgagagcgacatccgccgctggatcatcgagcgtgaccaactggaggccatcgtcgccttgcccgagcagatgttctacaacacgggtatcggcaccttcatttgggtagtcaccaatcgcaaggccgcgcaccgcaaggacaagatccagctcatcgacgcccgcgaacgctacacaccaatgaagcgcagcctgggcgataagcgccgctacctagaccaggctgcgcttaacgacatcacccgcgaacatggtgcgctggaagacagcaagaccagccgcgttttcgacaacgccgacttcgggtaccgccgcatcacagtgctgcgcccactgcgcctgtgcttccagatcaccgatgagaggcgcgagcgcttcctcaacgtctgccccgagctgttcgacgcgctgcaggctgtgcaggacaacctcgggaccgagccgctgctggactggaaccaggcctgggacgccgtgaagcaggtgttcaaggccttgcccgagaacatcgagggctgggctaagggcgccaagggcaccgcgcaaaagaagatcttccgcgactgcttcaccgtggtcgatcccgaggccgagcccgtcatcgacaagcaccacaagatcgaaccgctcgactgtgccgctctgttccccggacagacgctgcccggcgacctcggcaagaataatctttacgagttgctgggcctgtacaccgacggcaggggcaagcacatcgagtacgaacccgacccggcgctcaaggatgccgagaacatcccgctgaaagaagacatcgtcagctacttcctgcgtgaagtgcggccctacgtgcctgatgcctggatcgaccgcgagacgttggacgagcaggacggcggcatcgggaaggtgggctatgagatcaacttcaatcgcgtgttcttccagtaccagccgccgcgaccgctacacgagatcgatgcggagctagccggtgtcgagcagcgcattcttgagttgctacgagaggtgaccgagtga

SEQ ID NO: 529464 - DNA, 993 bp, Stenotrophomonas maltophilia
atggagcgtatgtggatggtgcgtggcgaaggcggcagcctgtacgacgcttttcgggagcgcggcgtagctgccgtgggctggaagcagttggcggcacatgccaagcccggtgtcgggcgtaagcaattgatcgcgctgtaccagtccgccgagcccctggcaagacaaggcacggtggtttcgggtgcatcccaggtctggcgcttcgtcaatgacattcaggagggtgactgggtcatcacctattcgcccgccaatcgtctgtactcgatcggaaatttcactggaccagccgagtaccatcccgaatgggccgagcaaggcatgtcactggtgcgcaaggttcagtggcaagtgcaggagatgccgcgcgataacttgggcacgagcagcaaaaacagcttgggttcgaccctgaccctcttcgaagtaccgtccagcgcggtaaccgaagtgctggccgcgctaaagggtaaaccgacaccagcagcgggagaggaggccgaggaagtcatcgccgatccgctggccgacatcgactctcaggctctggaacgtatcaaggatcgggtcaacgaactggactgggacgacatgcagcagctggtcgccggcatcctgcgcgccatgggctacaagactcaggtttcgccgcctggctccgaccgtgggaaggacatcgtggcctcacctgatggcttcggttttgaacacccgcgcatcgtcgtggaggtcaagcaccgaaagggccaaatgggcagtcaggaaatccgcagcttcctcggcggccgccacaaggatgatcgcgggctgtatgtcagcacgggcggtttcagtaaggatgccctgtacgaagctgaccgcgcctccattccgttggcgatgtggacgctggaccacgtggtgcgggcgctgattgaacactacaacgggaccgacgctgaaaccaaacggatcgtgccgttgaagcggttgtactggccggcctaa

SEQ ID NO: 529465 - DNA, 858 bp, Stenotrophomonas maltophilia
atgtacacggccttctctgccggactgggatctgcttgcatgtcgaggcaggtgggagcggcaattatagatcgtgaaggaaagctaatatcaatgggctgcaacgatgtcccacgtggtgggggtggcctttatagggaaagcctgcagcccgacgatcatcgctgcgtccatctcaaagggggcaactgctttaacgatgagaagaagaataaagttagtagcgaaatcggcgtgatgattcttcctcatcttaaggagtttcttgagaagaatggtgtatctgatggggaggggaagtcaaaagaactttctaaaataatatcaagaattataaggggggagtcgcggcttaaggatattattgaattttcgcgagcggttcatgcggagatggatgctcttgttaatcttagtaggaccgggcaaggaacatcgcaagacgccgttctttatacgacaacatatccatgtcacaattgcgctcggcatatcgtcgctgccggaattagagctgtttactttattgagccttacgagaaaagcctggcaacagacttgcactcggatgctattagtcatgattctgatcaagagattccacttagtgagtggctggatcccgataggaataaacacagaaaggtcgcgtttctgcactttgagggtgtttcgccgaggcgatacatggatcttttcttcgccgagggcagaaaagatgagcatggcaaagggcggaaatgggtcggacgctctgcctcgaagaagattccagagtatctagaggcatatccagctcttgaatctagggtggttaagcatctggacgacagtgggatgggtctgggcgatgcttag

SEQ ID NO: 529466 - DNA, 975 bp, Stenotrophomonas maltophilia
atgcacctggacgccctcgccgccgcccgtcgccacgaacaccgcttcgacgacggcaatccgctggccgaacgcaatacccgccgcgccctgtggctcaccgtcagcatgatggtcgtggagatcgtcggcggctggtggttcaactccatggccgtgctcgccgatggctggcacatgagttcgcatgcgctggcgctcgggctttcagtgtttgcgtaccgctgcgcgcgccgctacgcgcacgacccgcgcttcgccttcggcacctggaagatcgagatcctggccggctataccagcgccatcgccctgctcggcgtggccgcgctgatggccgtgcaatcgctggagcggctgtgggtaccggcgccgatccactacaacgaagccatcgccatcgccgcggtcgggctgggcgtgaacctgctgtgcgcgtggtggctgcacgacagcccgggccacgcgcatcatcaccacagtcatgcccatcaccatgaccacgggcatggccacgaccaccacgaccacggccatgcgcacggtcacgatctcaatctgcgctcggcctacgtccatgtgctggccgacgccgccacctcggtgctggccatcgtcgccctgctcggcggcaagctgctcggcctgacctggctggacccggtgatgggcctggtcggcgccgtgctggtcacggtgtgggcggtcggcctgctgcgcgacagcggacgcatcctgctcgacgcgcagatggacgcgccggtggtggccgaagtgcgcgaagtgatcgaacagggcccgtggccggcacgcctggccgacctgcacgtctggcaggtcggccgcggcaagtacgcggtcagcgccagcgtggtcaccagtgacgccacgctggatgccgataccgtgcgcaacgccctggcgatccatgaagaactggtgcatgtgacggtggagatccaccgcagccagtga

SEQ ID NO: 529467 - DNA, 141 bp, Stenotrophomonas maltophilia
atggcgcgcctctacggctacgaaatcgctggcatttcaccgctgacgctgcgtattcgcaccgcttgggaatgcctgcagcagcgcgaggcgcgcagcgccgagctgggcttgtctctctctccgacaagtgacaagtaa

SEQ ID NO: 529468 - DNA, 942 bp, Stenotrophomonas maltophilia
atgctgcgccccgctgatgcgagtcgcatcaatgaaatccttgcccttcgcacctcacagcatcgcttgcccgaaaatggtcagcgcgagcttcgcttgaatgagcagcgagacggacttggcttagctttggacatcggaggcctagaccgagcagaggtcctgaaatcgatgaacatcgagcgggcagcaaatgccatgtcggtgttggatctactagacgatcttcccattcatgagcgctcgttactcgaacatgatcaaaaaattctaagcctcgtttgggaggagcagccagtcaagtccgccatctttggcgatgacagcggtcgctcggtccgggttatcgtaacggaccagactgacctggaaaccgttcttggcatcgaccttctgatctacaattgccttcacgacaactacatccttctgcagtacaagcgcatgcaaaaggaaccaaagggctggagttacccgatcccaccctcatcagacctgctctcccagctgcagaaagctaagaactttaaagccgccgtagcgaggcaaagagatctgccgccaccatcactttggagttataggctaagcgcagatcctttcttcttcaaattctgcgagcagtttcgcccaaattcgcgcgacgaaagtctgataccaggcatcactatgtcatccgatcacctggacgagtttcttcagttacccgaagccgcgaatagccgcggaggcacagcagttggctatcacaattgcccgcgatacttgaacaattcggagttcatccaactggcaaagtctggctggattggcactagcagccaatcagcttcactcctgaaagatattttggcggcgaacaagacagggggcagacaggccatgctcgccattattgatccaccagaggaaaaaacggcagctggccgtcgccgaaagtga

SEQ ID NO: 529469 - DNA, 618 bp, Stenotrophomonas maltophilia
atgcgccatggtgggtcgatcatggggtattggctgtcaggccatgcctcgatgggtgttgggagatgtctgaagttgaatgaggttgccggccagcggccggcactaccgggactatggattgccggccagcggccggcactaccggagctgtgggttgccggccagcggccggcactaccggggccatggattgccggccagcagccggcactaccggggctatggattgccggccagcggccggcactaccggagctgtgggttgccggccagcggccggcactaccggggccatggattgccggccagcagccggcactaccggggctatggattgccggccagcggccggcactaccggggctatggattgccggccagcggccggcactaccggggccatggattgccggccagcagccggcactaccggggctatggattgccggccagcggccggcactaccggagctgtgggttgccggccagcggccggcactaccactgccggcaggcggcggtcggggctcaggcgcgcagggtggcgccgccgtccacgtacaggtcgctcatcgccacgtgcccggcctgttccgagagcaggaacatcactga

SEQ ID NO: 529470 - DNA, 4851 bp, Stenotrophomonas maltophilia
atgttgtcacgcgttgcccaccgcctgcgcctgcgttgcgcggccaagccccttctgctgctgtcggtgcttgcttccggactgcttgcgccgttggcggcgcaggcgcagatcattccgacctggcgcgaggagtacggcaagcgcctgaagtacggcgatctggtcgagccgctgaagggagagatcttcggcgagaagatcaatctttacgacggttcggtcagcttcagcgcgaccgacatttcgctacccggctccaatggactggatgtctcgatcagccgcagctacggcgagattgctggcagtcgcggcgacaaagagttcggcacctggacgctggacgtgccttcactttccggcatctatggcgatcagccagagacggtgtcagagggctactggtcaccgcgcgcgcgctgttcgacggtaactgcgccgccgacgctggaagtctggaattatcggcacacgcagacgatcaacttcgacccgcacacctattgggatggggtgcgtcttacactgcctggtggcaacggtgaaaccgttctggccgggagcaacgacgcgaaacagccccggccgcaggtggggcagcccacgccttggaacacaaagggaggttggttcttctcctgcctcgcttcgctcaagagcggccagccgggtgaaggattcctcggccactcgcctgatggcaacaagtactacttcgactggatggtggcccgcgacgaagactctgcggtgctgcagccttatgacaccgtcacccatgcgacgctgaagcgcaggaaggtcttcctctacccgtcccaggtggtcgatcgtttcggcaactgggtccgttatgagtggaatggtggacagctgcagcgcatcagtgccagtgacgggcgcagcatcagcctggcgtacgatgcgcaggggcgtgtggttagcgcatcggcgggtggcaggacctggacctatggctacacgcctcagggtgacctgcaaaccgtggtgctaccggatggaacgtactggagctacaacctgccgccggtcggcgtgaccaagaagtacccggattacattggtcaacccgaggtccagtacatggacactccggccatgtgcgcgaagaccaacaagatcgtgcagaccgaggtggtgatcagcatcaagcatccctcgggtgttgtgggagcgttcgcgttccggccgttccgtcatgggcgcaagaacgttcccttcaactgccagacctctggcgatgaccagttgcttgccgatggttggaatctcacccccatctatcgagacgcgatgtcgctggtcgccaggaccatcgagggccctggcgtgccgagggcgagttggacctatcagtacgccaacctggggtggaagtacaaccgcgaggtgcatcagcagggctggccgatggtgccggtgggccagtccgaaccgaagatcacgatcgagacccagccggacggtgtggtcaagacgtatgagttcggcaaggaggtcgcctacaacgacggcctgctgctggcgacctccaccagctccggcggcaccgttgtccgcaccgatcgcagcgtctactaccccgatgcgcagcttgccactgcgccattcccacgcgccgcaggacgcaacctgaagtacggtgccaccgagctgggcgaacacctgaaccggccggtccagtccacgctgattacccaggatggcgtgcagttcacccgcacggtccaggcgttcgatccctccgtgcgcgagatcgaggttgctgagtccaactcgaacggccagggccggagcacctcgacccagtactacgacaacccgcagctatgggtgcggggccaggtggccagaagcctggtgaacggcatcgagcaatcgcgcaccgagttcgatgcagccaccgcgcaacctgtacgtgcctacatcttcggtcgactggcgcaggaggtaacctacgccgccgacggcaacgtagcgtcggtcaaggatggcaatggcaacacgaccaggctggagcgttggaagctgggtatcccacaatggataatccatgccgacggcacggtgacccgggccgctgtcaacgattctggctggattaccgccgtcgccgacgagaatgactacctcacccagtacgaatatgacgggatggggcggctgacacgcgtcgagtatcccagcgatgacagcgtcgcctggaatgcaaagagacaggcgctcgaatgggtgccggtcaatgagtacggtattcctccgggtcattggcggcagacaacggccacgggcaacgcacgcaggatcacctacttcgatgcgttgctgcggccgatgctgacccaggagttcgatgcgggcaatcaagccgccacgcagcgcctgcagttgtttgcctacgatgcccagggacggcagacattctcgtcgtatccggtttcagacttcccggttccctggaaggggacctggaatgagtacgacgcgctggggcgggtgacctcaagttcgcaggacagcgagcatggtctgctgaccaccctcaccgagtatctgccaggtgggcagatgcgcgtgaccaaccccagggggcaggtgacgcagacccggttccagatgttcgatgcgccgtcctatgagcacccggtgtctatccagatgccggagggagcggtgatgaatatcgctcgggatgtcttcaacaagccattgatcatcgcccgcggcaatgccgatggcagccagacggtggcccgccgctatgtctattcgcccagccagcagctgtgcaagacgatcgagccggaaaccggcagtaccctgatggattacgacggcgccggcaacctgatctggtcggcatccggggtcgattctccatcgccactgacctgcaataccgaggccatcagcagcagcggtcgcgccgtctatcgcgagtatgacgcgcggaatcggccaacctatctgcggttccccgacggaaacggcaatacgagttggacgtatacgccggatgggctcccgtcgcgattgttggtccggaacgattctggcgccacgacggcgtccaatcactatttctacaacaagcgccgcctgttgacagtggaaagggtgtctcagcccgattggaacgattggcccatcatctacagctacaacgccaatggccacccttccggacagacctggccgagcgggctgacggtcgactacgcaccggatgcgctgggccaggctacacgggtcgggaacttcgctaccgacgttcgctactacgcgaatggcggcgtcaagcaattcacctatggcaacggcatcgtgcacacgatgcagcagaacgagcgtcaactgccttcgcggaccaccgattcgggtgttctcgactttgatacgcgatttgatcggaatggcaatgtcagcgacatctacgacctggcactgggggcgttctacaaccgtcacatgctctatgacggtctggatcgactgatcgcggcaggctccaacaactttggcggcgattcctggcaccggttcagctatgacgcgctggacaacctgaccggctggatgctgccgggtgtcaaagaccatcgctactggtacgacgcgcacaaccgcctcaccaatgtgcgggatggtgcgggcaatacgcttatcggcctgagctatgacgtgcagggcaacctgaagctgaagaatggcctcaaccacagcttcgacttcggcaatcgactgcgcgaggtcagcggcaaggagagctatcgctatgacgcgctggggcgccgcatccttgcctccgccccaggactcggagtggtgctttcgcagtatgcgcaggacggtcggctggtattccagagtgatggccgcaagggcctggggcgcgagtacgtgcatctggccggcagcctgatcgcgcgccgggactacgcaggtgcggacgccaagatcacctaccttcacaccgatgcgctgggaagcccggttgccagtacggatgcctccggcaacgtgatcgagcgtactcattacgagccgtatggcgcaccgatcggtaaggtggtggatggccctgggtacaccgggcatgtgatggatggtgagaccgggctggtgcagatgcagcagcggtacatggatccgcagttgggggtgttcctgtcggtggatccggtgacggcgtatgagcagcctgttgggcagttcaaccggtatcggtacgccaatgggaatccctataagttcacggatcctgatgggcgtttgggctgcactggtacgagaattcagagcgtctgtaactctgggggagttgcagcgctacggacttcagcacgaagtcctttggatgttgcagggggcaatcaatccgaaactgcaagctcaagggcaggaggggaggctcaagcagcttcgcccgcccaggtaggtgggaaaggggcggtgacaagtgtttttacaggtgatcggaatccgactttcacatactctgtagcagcaggtgttggtatcaaggctgagttcaaggagggggaaggaaatgatcgatactcactcataactcccgccctaggtgccggcgcagctggaacatggaatcttttcaccgcaagttacgatttcctgcctgcgcaggcatcctctccagctgatgcgggtctcaatgtgggagggcagtttggattaatcggtgtgcttggtgctagtttgcgttacacgccgccagccaaatttgagcttggtgttaatggcggacttggtgcggcggcgcgtgttgaaatgtacgaggttgggctcaccccaggaaagttgccatga

SEQ ID NO: 529471 - DNA, 492 bp, Stenotrophomonas maltophilia
atgaaccgagcacgcctgagacttggccgccattccctgatcggacaaacctaccttctgacctccgtcacccagggacgtcgacgcgacttcgaggatgccgccgcggcacacgtggtgatggacttggtccgtcgcatcgacgctgaaggtctgacgcactcgcttgcctatgtggtcatgccagaccacatccattggcttgtggagctccgcgcgttctcactggactacatcatgcaacgcttcaaatcgagcagtgcattgcggatcaatcgcatgctcggccggtcaggaagattctggcaatcgagctatcacgatcacgcgatccgctctgatgaatcgctgttccgccatgcgatgtacgtggtggggaatccgatcagggcaggattggcaacgcagcttggtgagtatccccatgcgtggtgtagatgggggatggatgggaagttcgaggcaatcgagctttctggatcggagagatag

SEQ ID NO: 529472 - DNA, 696 bp, Stenotrophomonas maltophilia
atgggggctgagatatggattattgagtcgctgagaccgggtgaccggaccacaggcagcctcttgtccagcaagataaaaaatagcgacgcagccctcacgaggcagcttcaggtcaagcttctcaccccgaaaagcctgaaggagttcagtgactgcttgaatgatgtactccagtcagcagctgctggaaatcacccaatacttcatatcgaagcccacggcaacgagaacgggctccaacttacgaatgacgacttgatcgattggcccgatctctcggtaccgttggccaagatcaatgacatgatgagggggtggctggtggtgactacggaattctatatcgagttctgcaagacccgctccctcaccaaggcaatgtgggctcttaattcgttcggggcttccaagcggaactatttttttacaacgcacagaagctgttttgtccaactttttgaggagaggatcacggagaagatttcctcaatggagcgatcacagcggatagccagactcgcatccacgttggtagcggcgtcagcaactccggaggaaataagtgctgcgcaccatgccgctacaaaagtcgtggacaaccctacagagtccgcattccgcgcgtggcgtcagttcgtgttcgctgacaagtacccagagaatttggacctcttcccttttccgtttccttga

SEQ ID NO: 529473 - DNA, 138 bp, Stenotrophomonas maltophilia
atggatttggattacagcagtgcactcggcgtcctgggcgctctgtccgcaggcgttgccgctattggcactgccaagctcgcaccggccgccatcgcggttggctacaagtggttcaaggccgcgatcttcggttga

SEQ ID NO: 529474 - DNA, 318 bp, Stenotrophomonas maltophilia
atggcgaattcgacgggtttggtctggaaagtggcgctgggggtcttcgtcggcggcagcgcgctgctacttgccacatgcggtgtcctgggcattgccggacatgctgccatgaaggaacaggaacgcgctgcagcagcacttgcccgccagatgactcagagcctgccgatcaatgaaattcgcgagaggcgcgaagccgcagaacgagagaagcggccgaaggccatgcctccgggtcatcgctgcatcaatggacagacttttcgccgggtcgagaacggctgggtgcaggtgtcatccgcatgcgccccgtga

SEQ ID NO: 529475 - DNA, 273 bp, Stenotrophomonas maltophilia
atgaccacttctgagggtgcctcggcaggccctccttttcgcaaggaatgcaggtcagatgaagaggccaacgcgacactggtgccgctgggtggaacatttcgggcaaaagagaaggggacggagaagataagtcgcatgtgcacaaacgacttaatcccctccgtcccctttttctccactctgaagaacgaaaaaggccggcgtgagccggcctttcccttgttgcaccgcgaggcggtttacagcgacttcgccgcttccaccacgtga

SEQ ID NO: 529476 - DNA, 975 bp, Stenotrophomonas maltophilia
atggcctgggcaaccgacaccgccgccaacatcaccgacctcatggcccgcctgcgggacttcctgaccaccaacgcggccctggtggcagcgaaccagcagtggcaggttgtgggcggcgtggccagcggaccgatcgtggccaacgatttcgtgtcactcaaggggcgcggactcgccggtgaagacgagatctacctttcactgcaggcgtgggtggtgccggccagcaactactacaacatgtccctgcgcggtcacctttcgtacaaccccgcgctgccgagcatcgacccacctggcaccaattcgaactacatctcgatcttgggggtgaattcgcccatcaagtactggttcgtcgcaaacgggcgttgcttcaaggtgatcacccgaatcaatggtcgctacgatgccatgtacggcggcttcatcctgcccgagcacctcccaggggattggagctatccgctgttcatcggcgcctcgtacctgggaaggaacgcccaggcctctctcgacgactattcgcattcgaacttctggaatgccaatgccgacggtcgcggcaatctcgcattaagccaggggtacctattcacgcctgtgcaggcgtggctgccgattcggaacttcaacagcaacagctccttggctagcgggcgggtgacgatgccgtgggctcgctatgtctatcagcagaatgtgcggaactgccttgatggacagcgctggctgcagcgaggccaactggtcggcatcggctgggcgtcgggaaacccagatagaggcgggcagatcgaagaaatgcccgagcgaggacagttctacggcagcttcgacggcgtcttctataccccatccttcgccgcgaccgcagaacagatcgcaactgttggaggtgtcgactacctgttgattccgaacgtgtatcgaaccggcgacggcgagtacgccgcctttgctttggagtga

SEQ ID NO: 529477 - DNA, 975 bp, Stenotrophomonas maltophilia
atggcatacgccgagttcaacaatgtcccgaacgtccagacgctgatcgacctggtcgtgcagttcgcgcaggccaatggctggaccgtcgaacgcaacactctgtcaggtgccaatcgcactgccacggtccgcattcctggggtttcggactacgtgcacctgttcaataccggtcaggacagtctgcggtcgcgtatctccattggctacgacggaggggcgacgcctgcgcagcagccgttggtgtctcctcgcgacatcttgtcctatgagctgaccggccccttcccgcgcctgaagctgtttgccaacaggaccgcgatccatgccgcgatcgctcaggccgtcgctggcgagtatcgccatcacgcattcggcgtactggagaaggctggcgactatccaggaggcacttacgtcgacggcacctactgggcgcgaactggtagctacagcggaatgctgacctcaagcggaaacaacgttgtcctgttcgggcacaacaccagcaacacagggtgtggtcacgtccgggcagattcgaccgaagacggccgcatcaacagctacagccagatctgcaactactacagcggagctttaggcactgaaggtcaggctggaagtggcgttgggtcgatctatcagtccaccacgtctaccagctacgacagcatgtggatgggatacgtgctcgctggatccaatgacaataccttctctggccgcagcatcttccagccgatcaatctcagcattcgccggcctggtaccaatccgtacctgtcaccgatcggccaggtaatcggcttgcgtgcgtgttacatggaacggcttgagccggagcaggaagtcacgatcggtgacgatacctggacagttttcccttggctgcgtaaggcagcgatgaacagtgcgaccaatgcgccgccggcgagtggaaactacggttgggcgatccggaagtcctga

SEQ ID NO: 529478 - DNA, 2001 bp, Stenotrophomonas maltophilia
atggtcgacgtaaagatctctggcctgccggctgccgccgcgctcaccggcaatgaggtggttcctgctgtccaagggggcagcaacgtgaagctcttggtcagcgctatgcgtgcggggctggcgcctgctgacggggtgctggccaaggcacaaaacctggcagatctggccgacaagagtgtggccaggggcaacctgctacgggtggcttctacgaacacaggttcttcggggcaggatggttggtgggccaagttcgctgaggtggtttactcgggaacggggaccaactacctgcagatgaatctcctcatggaccaatatgcagtggctgcgaggtcttctgcggtcctgatggtgtgtatccgcttcaacagcaacgcagcaattggcgggctcagccttgagctgattgccgccggctcgaccgtgccagccgatggcttcatggcaacggtttccttcgccggcgccaaggctacggtgtctctgtgggtacgcaagcccacagcattcgaccgcccgtacttctacgagctatccaggcaggcgtcgtcagcttcgattgggatcagctacttttctgatgcgctgtggcaagcagcagcccccgaaggggaagccacatacagctcccgtatgccctttggcacccgggtggaggtggaccccacggggcggctcgtgatgaacgtcggcgcgcgcctgcccgtttcccagcagctacgcttcggcgatggtgtggcggccgacgtgggggtgattactgccaacagcgtcggtacggcgattgttgctggcaacgcgacttctggaagcggcggcctgctgttgcgccccacaaacgccgcatccgttactggtcaggtagctctaaatgccgatggcagcatgatcttcggaggtctgccggcggccaagctggcaactacgaccagcctcggcgcagtcaataactccggcacggagagcatcggcggcaccaagaccttccagaactacacttacttttccggtggtttggcctctgatggcaccatcacgatcaggggcgatgccaccggagctgcccgactgatgcgaatcggtggcgcgcgaaccgcagacggtccggcttacttcgacctcgtcgcggaggcgaaccgctctgactacaacactcgcttctatcgcagcagtggcatagacggcgacaccaacatcaatcatcgcggcgccggtgcgctggcactgaatgctgagaacgctggttccatcagcttccgggtgtcaggggccagcaagctgctcgtcatggccgaccgtgtccagccggcggtgaatgtattgccggcagctgataacagcctggatttgggggctggtgctacccgtttcgccaatctctacgtcgtcaacgcgccgatcaccggctccgacaagcggatgaagaagaacctccgccacttgagtgatgccgaagaggccgcttttctggcgatcgcagagctggagtcggtctgggaatggaaagtcggcgaccgaatccacggcggaccgaccgtccaggacgctcgcgacgtgatgctggatcacggcctcgacccgtgggcctacagttgcttctgccatgacagctggccggcaaaggcggccgtctggcgcgaatggcctgcgcaagatgaagtctgggaggagtggtccgcccaggaggctgtctacgagctggtgccggccacctacggcgatgaaggccaggtactgacccccgagacccgcgtcatggtttcgcccgctgttgaagccggccgacggctcatcagcgaggccgtggaagccggccgcgaactggtggagccagccgtagaggcgggtgagtccttcagtttccgcgtaggcgagctgcacgcatggatgctggcggctatggctcgccgcgaccgccgtgaacgagaggcggccgagctgcgcctggccaacatcgagcagcgcctggctgtccttgagtccggcaagtag

SEQ ID NO: 529479 - DNA, 459 bp, Stenotrophomonas maltophilia
atgaagattctgttgaccggcagttccggacggatcgggcgtgcgatcttcggcgcactcgcggccgcccacgaagtggtggggctggatcgcagcccgttcgccaccacccgcatcatcgccgatgtcaccgatcgccaggccgtggaacgcgctgtccgtggcgtcgatgcagtgatccacaccgccgccctgcacgcaccgcatgtgggactggtgcccgatgcggtgttccagcagatcaacgtggaggccaccgcgcacctgctgcaggcagcgcgcgaggccggtgcgcggcggttcgtgctgaccagtaccaccgcgctgtacgggcatgcggtggtgggggggggatgccgctggatcgatgaagacaccgagcctgtaacggcgcgcgataaatcgcccgccgccggtgagataaacggtgggctaccaatgttgcgcccagcggaatga

SEQ ID NO: 529480 - DNA, 1320 bp, Stenotrophomonas maltophilia
atgcctcccatgaaagcaagcagactgaacgccatctcaaaatccaagtcaacaactctttccacggaaaagggcgtaaccttccgcgccttcctggacggtaaagccccccaaggtcacgggttcaaatttgccagccttttttctggagccgggatcggtgactatgggctgaccttggcgggtgccacgtgtgtcgccgcttgtgaaattgattcgcatcgacgccttgtgcatcaagagaacatcgaatccaagctctttggagacttacttaggtccagtcacgccatcatcgagctactccggaactccgatctggatcttctagttgcaacacccccatgccagagcttcagcactgccaacgcgggacggggtcagaggcacgattacattcacgcgtctaaagacgccagaaaccatcttttcttccatgctctgtctgtagctgcgaagatcaagccgcgtttcgtcgtgtttgaaaatgtcccaaactttcatgagaggaaagttgcacaccctgccaggaacaatgtgattgggcgagtggttgacttcatggatagcgcgatgtctgggtatcttgcatggcatggcactccctgtttttccgagcttggcgtcccgcagcggcgcaagagagcactatcgatctatgttcggcgagatgttgcagagctgctgcagattcgcgctcaagatattgatccaaagctctggccaagcgcacccagaagagctcccaaggacgtttctcaagcactgaagctcagcaccaccaagtcttggacggatcatcgcaagcaagatcatctgcacacttggccggactacagtcccactcatttgtcttggatttcttcgattccaaagaactcaggactgagcgcttggaccaacaactgcgagaactgcggcagtggatttacgccttggggcgagcttagctgcacaaattgcggaaagctgatccgctctcggccacatgtgacgcaacgggacgggaatatccgccccgtgcgtggttttagaacgagctataggcgaatgaacccgcacgagctagccccaacgattactacggcgtcgggccactttagcagtgacctcaagcttcatccgagcgaagaccgtgtactttccccacgtgaatgcgcaatcctacagaccattccccgaacgtttgaatggccatctatcccgagacagaagcgagcgtatctgttcagggagatgatcggcgaagctgtcccctgcttggtcacttatcgacttggccttgcggttggggaatgggtccgacggttacaggcttga

SEQ ID NO: 529481 - DNA, 204 bp, Stenotrophomonas maltophilia
atgcccaagccgtatcagatcgtgttgttgctgacctgcgctcaggcaatgtccgcctgcaccagcgttggcaggcggcagtcgcaaccagtcagctgtccgcagccgccgcagccgccgcccagtctgatggtcgaaccgacgaccgaatcgaaagtgcgggccgagctattggagccgctgcccagtgcgacgcacaggtaa

SEQ ID NO: 529482 - DNA, 315 bp, Stenotrophomonas maltophilia
atgaacttcgatgacgccttcgcgctgagtgccctgcgcgagatgtacacagcttttggggtggatgcgcgggtcacacgcgggacggaagccagcgtgccggtgcgcatcatcgtgaatcgtggcgaggttcggctcggggagtacggtcaggcggtcggcctggtggactcggtttccttcctgtacgagcagtggaagccaagacagggggatgtcgttgcctggtcagatcggcttggagaccacgccaagcgggtcgagcgaccccgtcgggaagatgggcttgaggtcgaggtgacgctcaatggctga

SEQ ID NO: 529483 - DNA, 981 bp, Stenotrophomonas maltophilia
atggcctacatcgaacacgccaatgtggcgaatctgcagacgttgattgatctgatcgcgcagttctgcgccgccaatggctggacagtggatcgcaacacggtgactggtgccaataggacgctcaccctgcgcattccaggtgtttcggactacgttcacctttacaacaccgatcagatcagcctgaagagccgggtttcggtcggattcaacgtagctgccgtgcccggatcgcagccaaacgtttcgccgtcggacggtaatagcaacgtgcaggcggggccgtatcctcggctcaaactgttcgcaaacggaaccgcagtgcacgttgcgatttctactgcgaccgccggtgactaccgccaccacgctttcggcgtgctggagaaggcgggaagctatgagggaggcacctatgccgatggaacctattggggatatttgaccggcaactacagtggctacctcacgtcgaacggaaacaatagagcgctgttcggccacaacacttctgcgacgggttgcgggcacttgcgcgcagactcagttgaggatggtcgtagcaacagctttcaccggatcagtaactactacagcggcgccttgggagctgaagggactgcatgcacgggtattggctcgctcggccagtcatcgaccagccagagctcgtacgacctcatgtggctcgggcgcgctctgggcggctcggatgagaacatcttctcgggtcgtagcgtcctgcatccgataacgatgtcgattcggcgtgctggcgcgagcccgtacctttctcccgttggtcgtgtagttggaacccgtgcctgctcgctagccaagttggagccggaacaagaggtcaccatcggcgatgagacctgggtagtgtttccttggctacgcaaactggcgatgagcggcgccaacaatgcgactccggccacgggcaactatggctgggcagtgcggaaatcctga

SEQ ID NO: 529484 - DNA, 1704 bp, Stenotrophomonas maltophilia
atggcgatcatcctcgccgacgtcagtagcgtggtcggattctggcaaagccggaatctggacattccccgcaccccgtttccgctggtgccgacacggacatcgctgtcacgaccggatttccgttcgggtccggcggtgccggccagtatcgttgtacctgagcagccggtatcgggctctgcgatccctacctcgcatgatgactggtactacaggttgcatgtgctacccctacgcattgacctcgggaaccttgtaaccaaccaggtccgttcggttcgcctctggaacgcgtacttccagacgcagaggctgttggcagtgtcgctggatggcgccgaaggcattgatctgactggccccggtgcgccgccgttggcgttcgctccgctgcaggttcggcaatggagcctgactgcgtcgaccgaaggtccacccgtgatcgccgccgcgcttactttcaccttcagcgttctgggcgagagggtgatcacgatcaccggcaatcgcatgtcggcgtggatgctgccccccgattggtctcggccggtgtcggagagcctggcgtgggcaaccgatgtccagcaagccacggacggcggcgaggctcgcttcccgctgcgcggatcgccgcgacgctcctgggagttcagcgttctggccgatcggcgcgagcgtcaagtgctggaacatgcaatgttcgactggtcggctcgtacctgggcgctgccggtctggaacgacgtttcttggctgcgcgtacgcctggcgctgggcgtgcagtccgttccggtacaggccgccgcccagcgcgactatcgggtcggcgggcttgccatgctttggaaggacgtcaccacctacgagctggtggaggtggccggcatcgccgccgagagcctgcagctggcccgacccactgccaatgcctgggcgcctggtacccgggtgctgccgtgcaggacggctcgtatcgccgagacccccagcctggaacgcgtgaccgaccaggtcatgcggtcgacagtgcgtctggctgcggtggagacctgcgactggccggcagtggcaccggcgacggtctatcgcggtcgacctgtgctggagcagcgccccgatctcgaccaggtgcagacggccgagttcggccggcaactggtggtgatcgacggtgacatcggtgtggttgccgtcgacgacatctccggtaaggcctggccgctgcagtcgcatgcctggcagacctggggacgctcggagcaggccaacctgcgcagcttgctgtactggttgcagggtcgagcggccgccctgtggctgccttcctgggccgacgacctgcagttggttgagccagccctgaatacgtccagcggcatcgtagttgcctgggcgggtgtggcccgcttcgggcgcgcccagccaggccgccggcatctacggatcgaactgttcaacggccaggtgctctatcgccagttggtcgaggccaccgaacttgatccccagcgcgagttcctgcagttggacgtgccccacggtatcgccctacagcctacagccatccgcctgatcagttggatggtgctggcccgcctcagctccgacaccgtcgagctgtcgcatgaaaccgatggcgaagggttggcgcgctgcaaggtgtcctttgccggcatcggcgccgaggagggtgaatcgtga

SEQ ID NO: 529485 - DNA, 228 bp, Stenotrophomonas maltophilia
atggtcggaaacgtcctggttaccgttgaccacgcgcgcgtcgccaagctgggcgagcacagtggcgtgctgtgcgccgctggcatccgtacatggatggaccggcatggattggatcttcgccagttcctggacgatggcctgccggtggagcagttcgaagcgctggatgatgcctttgcccagcgtttggccgcgatcgcccgcgaggaggccagccgtgggtag

SEQ ID NO: 529486 - DNA, 402 bp, Stenotrophomonas maltophilia
gtgcgcctcgccctgttgcccctgcttgccgccgccttccccacgctggccgccgacacccccgaacatgtgctgccgatgtggatgcagggcgggcacccgacggtggcgctttcgctggacggccgggccgaaccgctgcgcttcgtggtcgacagtgcggccggcgccacgctggtcgatgggcgcgtggtacgccgttacggcctggtcgatggcaaggccgaggtttcgatcgcccagggcgccagtacctcgggcgcgcagctgcggcgcacgcgcaccaccacttggcagctcggcagctggcagctggcagctgcaggccagcgcactgcaggccgatctggcgtcgctgaccaagggcgacgaccccgccatcgacggcttggtcggcaatga

SEQ ID NO: 529487 - DNA, 351 bp, Stenotrophomonas maltophilia
atgccggtgccggcctctacccagcgttcgtgcgcgctgccgccgtcatcctcccatgagagctgcagcggccagccgtgctgggcaggccatcggatctgccatgcccgggcatcggcggcgtttgcagccagccattgctgcgctcgcgccgcctgcgttcccgtggccaccgtcggtgcggaggccggcaccgggccggcctccatccatcgcgtgatcggctcgcggaacacgctgagcgtgccggtgaggaagatcgcgcacaacagccagccgcaggtgaggccgcaccaggtgtgcagccacgacatgctttgccggaagcccgccttcatgccgtccccgtga

SEQ ID NO: 529488 - DNA, 849 bp, Stenotrophomonas maltophilia
atggcatggcgcacacccgcatgccattggtgccgtgcaggtacacgaaaccatcgaagcactgcacaaggccgatttcggcggctggccgatgaagtggctgtacttcatcagcggcctgctgggcacggcgatgatcgccatcggcacgctgctgttctccatcaagcggcgcaagcgcagcgagcaggagttcggcgcggccacggcaggcatctatcgctgcgtggaagccttcaacgtggcatcgctggccggggtggcactggcaagcatcgtctacctgcacggcaatcggttgctgccactggaaatgagcgatcgcagcgcgtgggagatacgcattttccttttaacctgcgcggcctcggtgctgcatgcactgtggcgtccaccgcgcctggcctggatcgagcagttgtggctggccgccgcgctgtgcctggcactgccactggtgaatctggcaaccaccgggcaggggctgctgatgtacctgcagcgcggcgcatggcagcaggccggcgtggagctggtcgccctggccttcgggttgatgctggcaagaatggccctgatgctgcagcgccgctggccacgggcgcacgaggttgcgcgcagtgccaaacctgcgcccgggcagggcgcggcccatcgctggcaggtggcgagccgcgtgctggctgcctcgctggggggctacgtattcaccgcgcttaccgccacggcactggcactgttgctgccctcgctggtgggcgtacgcacgtccgtttcggtcctgaccagttcgctgctggggttcgtgctgttgatcgccgttgccgtgggcatcttcagtacccgtag

SEQ ID NO: 529489 - DNA, 417 bp, Stenotrophomonas maltophilia
atggatgagcgccacctcaagtacctgtacaccgccctggcggtgctgttcggcctgcccagcctggcgatgggcggtatcgtcgcagcgatgttcctggtgcatggcctgcagtctttcggccgcaacagcgaccccaacctcgtgctgctggcgtggggcctggcgggtgtcgtcggatgcctggcgtggctgtggctcagcgccgggtatctgctgcagggccgggccggactgcaggtgcgcgcggtgtggtggtggctgctgctggccggtggcctggccgcactgccggtcatctggctggccgcgtggatcggatggcaggaggtcggctcggcgttggaagtgctgatgctgggcccgtcgctgctggtgccggccgcgatgctggtgtggctcaaacgccgcgcatga

SEQ ID NO: 529490 - DNA, 432 bp, Stenotrophomonas maltophilia
atgcgcaccgtgcgccgtcgacacggcttctatctgcttcttcatagcttgtttttctccattccctgcgcattggctggcctggcgggcctgctagtgctgctgtggggatgggcacatggcagcggtaagggagcatttctcgcatggggtgcggcttggggtgtgctgtccgtggcagcgtgcattcttgttgtctggctggcaaatacatggcagatgcgtggaccggacggattgaaagcggccgcgccaatgctggtggcgctgtttctgctgtctgccgctcaggttgtgtccgcattgatcatgacggtcccgggctttggatgggagccgattctgctggtgttggcgatgggttggggagctccctggctcagccttgcctgccacttccgatggctggcaaagggcggcgggcctgagtga

SEQ ID NO: 529491 - DNA, 231 bp, Stenotrophomonas maltophilia
atgtggtttcagatagccgcgttggtggtatcgctggtaatgagcatcgttttccgggccaagccagccgtgccgaaaccggccgctctggaggacttcaatgtccccaccgctgaggacggccgcgaatgcgcgatgatcttcggaacgaactggatcgacgatcccaacgtgcttttctacggcgatctgcgtacctcgccgatcaaggtcaagggtggcaagaagtga

SEQ ID NO: 529492 - DNA, 1302 bp, Stenotrophomonas maltophilia
atgccagagagtcagtctgtaagcgcgcagctgccgaagatagtgcaggagctccgcaatatatttaccgcggtcgaaagcgcccgcggaggcgctaacgatcccatccagagatatggatggaatgcgccaggtatgacgccttgggacatcggaatgctagctgaggagcttgctggacagatcgagtccgagctcccgtttgaggagagtgcagaagtcaccgcgctgcttgaatcatggccggctgcacttcagcacgtagcaagcaactcggtccctcacttggtcaattccaatgctccgtctgctgcaatttcggtcgtaagtactctctccgcactgaggatggcggtcaattcagtgctaggttggtcggatgtgcgggaccgcggcaagatgccgcaggcactcaggcgaaagctcgccggcctcgaggcatctatcaacgcgattgtgccagacgcggataagctaactgatcaaattgcaattattagggatgctgctgacgcggcttacgatcttcctgtaagtctggatgagctgaggcgggctagggcgcagatatctgcagatgctgacgttgtgaaagagagaagcattcaagctgcggcggcactccagtcgtcgaacgaaattctcagcaagctagaattggcgcagcttgaggccgatgcgttggtggcaaaggtgcgggagtcacaaagaatcactacatcaattggactcgcggccgcctttgatgaaaaagcccgtaggctgggagtgaccctggggctatgggttggaatactagtgctgtcactatcaggggctgcagtgctaaccgcatatcggtggcagacgctgaccaggctggcggaaggggagccaaattggccggcggtatcccttcaaatctttctctccgcaatcagtttggccggtccgggctggctagcttggctggcgactaagcaaatcgggcagcgattcaagatggcagaagactatgccttcaaggcatcggttgcgaaggcgtacgaaggctacaggcgagaagctgaactactcgaggacagcggaatggctgtccgtctattcgattctgcgcttgctcgactggatgaggcgcctctccgattcttggatagcgagactcatggaagcccatggcatgagttcgctcagaccaacgtattcaaggaggcatcctctagaattccaggcttcttacagagctacacggatttcttcaaggctccagtggcacggcgccggcgagatgaggtggccgacccggcatctcaggacagctag

SEQ ID NO: 529493 - DNA, 414 bp, Stenotrophomonas maltophilia
atgacgggggagtcacttaagttcgattcttcgctatacgatccgcgatatccagacgaatgttcggatacatttgctgcgtgcttgaacgctcgtggcgtctatgagagtacgcgctttgcacttagactgagccctgttgtacatgacttggtcgaaagcgctattgccaagtcggaagcagggggcaccaactacaccggggaggagcttcaggcctactccacctatctgcacgaaacggtacattggtggcagcacaaaggctcgacgagtggtttcgtccgaagcttgctctatccggtgcagacccacgcgaatatgtccgatctgcacggcatcttgcagagcttgggcccgcaaaagtgcattcagaatctggcattgagcggcgagcttggcttgcttccttga

SEQ ID NO: 529494 - DNA, 1230 bp, Stenotrophomonas maltophilia
atggatacggagttctatctatcactgacccgggatccaaagaccgctcctgagatctataaaaacccatacttccaagctgctgggcactcattcttgatcacctacgctcagatcgtgggcgccgtgagcgagctgattgacccctctggagcattcctttctgatccgcaggtgattgctgacaacctgatggcgatggcagagaagcgcatcgagggctactactatgggacgaggatcgcacgcgctcctgtgggcttatatgagttgtatgaagggcaggcccgtttcatacaactgcagttcctggcgagatcatcacaatctggtctgacaattgatgaggctaggggcgagggcatgcttgaaggggtgtatggcgccgcattcaagcagttcttggagatttcggagacgtctgagccaacgtctattattggtcccgttgtcgcattgttcctattcatctgtgacatggcgatcaacccaaccgttggctttcctgctcctattaaagtctacgagaagttctacctcgaagcagaccctggagtccgattctaccttctgtgcaaagctgtcatcgaggagccttcgctgcgcgatctggttcaagactactctgcagaagagtaccgagagctagcgcaaagactgggaaggctatcggagcttggggatcacattgccgatctggaggagttccgggagcacgtcggtgccagtgtcgaggctcgggcgttgatggctgagcataagagcttccacttcgcggatagaaacattgttctgaagcttttgatgggcgagttcatttctttcgtgaatgatcgaaccgaatgcccggaatttttctgctgggccgggtactggttgaaccgggggagcagcgatagacctcgccagctgtggctgtctcacctgtcgctgttctcggacaaggcggacgacgctgctctgtacccacgcatgcatccgggacgcgctgaaaaggatgtgctcgagacgttcaatcagttcttcgcttccatgatcttgtatgacctgagcagacaatgggtgctgcagtctggcccattcaagctcaattattcctggctaacccaggacgctgacgatccagagtttcacgatcgagtgaatctcgtgtttcgaaagcactatggcgtcggtcttgccgatttctcggtccttgatagcgctgccatcagggcgcagatccgctaa

SEQ ID NO: 529495 - DNA, 546 bp, Stenotrophomonas maltophilia
gtggctctgacgacactgaaatcgctcgacgctgagatcaagcagctcgaagcacagaagaagcttgttgagaagcgtgacagtgaggtgccgcaggcaatcgctgttctccagaagtactctagagtcctcacggccgctcagcggcgccagattgcgaagctcgtgggaagcgctggcgatgatgatgcaggcgtacccgtgcgagctaggaagcctttaaagtcctcagtcaaaggacgcacactcggcaaggttgccccgaagtaccgcctgcctaccggcgagacttggacgggcagggggctgacgccgaaggtcttcaccgcttgggctaagtccgctgaaggcaaggcctggagtgccgcgaacgtcggcgagaagtatcctgccgcaagttcaaccaagccgcaggctaaggtcggcaaggccgtgctgaagaaggcgcgcaaggtcggcgctaagggtaaggcggcaagtgctccggccaaaaagggcgccgagaagatcgctcgaaaggccgttcgcaaggcaaagtctgcctga

SEQ ID NO: 529496 - DNA, 285 bp, Stenotrophomonas maltophilia
ttgaagcacgatccgcggatagacattggcaccgtctatcgttccggagaacagccgttcaaccgccagcagccggtgttgagcgtcaagaaaggccacttcaaagtgctctcgcgtctcatgagccaatcgaaggcggaagaacgcgccacaggtggcgacgtcactcatggcctgacctggcttacaggctcggcgctgcagtatccgcagggctcgggcgattgcccggtcatcgcgaagcttcgaggctgcctccatcgcagcgcactggctacgatctag

SEQ ID NO: 529497 - DNA, 618 bp, Stenotrophomonas maltophilia
atggcgctgtttccgtcagagggacatggcgatcttatcggtcttcactgcgggcacagttataaggatgaggatgtcatgcggaacccggatattgcgttgacggatgaagagcaagctttgttcttgtccatcaagttcgattggacagatcacgatgatttgcgtggatcgcttgagccgatgaggctacttgcaaagagtgtccttgggcgaggtgcggtaccggaggttcgaatcgccttctttacggatcctgacttcaaccccggtgggcgaggtaagtcgcgcaaacaggtgttcgagggcaacggtacttgtggtgatgaaattcttggtcacccaagcttcctcaagcatcttgagtatttcatttgcggcccagagcttcctgctgttgtgattgaaaggttcaagagcgaagcaactggctccggctatcttacgggcggggacataaacgacctaacgcccttcgcgagatcctgtgttcgctcaaacggcttggaccctcatcgtgctgcggaggagttcttcaagcttgctgttgagtgcggtgcaatgccgtcttccgcagagtccgtgcgaagttcggttcgtgcggtgaagttgcgatag

SEQ ID NO: 529498 - DNA, 660 bp, Stenotrophomonas maltophilia
atgaaacttgtcagtagcgccgcatatgcggcatctcaagctatgtgccggcggggcgtgaacatctcccgctcacatctatcagaagttgtcgccgcattgctcggctacaggaccttggccgctctatacgtcgaagagtctgaccagaacctggattaccatctcgacgacgccgagcggctgatactgaatattccgctggggttagtccgggccagtagcattggcctgtccgagatagccgtacatagttgtgtcgaagcgctgaaggtagtggccaccgttcccgttcacagtggcatatccgatctctacgatggatacgcgcgagagatgctggaactggccatcgccgagggcgattcaacagcgatggcaactgcggagagcaatgcctccttcgaagaaggcccctacatggaagacgaggcaacgaccagtggcgacctatgggaagctccaacggagtggagtatcgaggcgaccggcaccatgagcggcgagtacgaccccgatagtgatcgcatgtacaacggacactccatggacgtctggggcaagctcctgttctttaaagccggacgtgccggcctgatctatatagagtgcgaggatggcgcaagcccggacgacacctggcgcgacgaggaaatctga

SEQ ID NO: 529499 - DNA, 309 bp, Stenotrophomonas maltophilia
atgaacacgatccagacgcgttcggcgctgatgccggactgtggcaccgttttgcccgccgactcagcattcgctcttatccccgaaggcctgcgtgaccgcccggccttgagcctgaaggagctgctccgggtgatcccggttggccgcagcaaggcctatatgctgatgaaggaggacccgaccttccccaggggggtgccgctctacgacggcgagaactcccccaagttctactggacccacgaggccatcgcctggctgcagggccgtgccgccaagattggcgccaacaagggagggctgtga

SEQ ID NO: 529500 - DNA, 342 bp, Stenotrophomonas maltophilia
atgaacagtctcgccgacgccctggctggcatccacactcctctggaccgcctccagcacgccttggatcaggatctgagcctgggcaagagcaagctggagatggatttccgccaggcttaccccgtgctggagcagtacctgatgcagcggacgcgcaagcgcttggcgatggagcgcttcaatgccgcctacgaccaccagctgagtctgccccagttccgtaagctgctgaacgcggagcgggtgcgccggcaggagacgggcgacatcgtggtctgctccggttgcgggcagcccgtcctgagctcacccgcggccgaacaggtggagtccgaatga

SEQ ID NO: 529501 - DNA, 1416 bp, Stenotrophomonas maltophilia
atggcaaaagtagacaagcagcagactcacatcaaacttgcggatttccatttctcatccggcgctgcggtcggaaccgcgaccttggcagacctgatcgacgcgctgaacatcgaactcgtgaaggagaatggagagctgatcacgaccaggtcactgaagcgcaccttggagttcgtcagatccacaatcggcgtggatgtgtcaggtcgagagcaatccctaccgcttccagtactgaagaccattcgcctgctctttctggccgaccacaaccactccaagaacgtactgagactactatcgcctccccaggtagaggactcggcttcgatggagttcagcaccgttactaccgtgccgcgtgacacagacgcctacgagctgatccagaccctgtgcgactcacttgcattggagatcgatccatccagattgagtacgcttaagcagatgctttcccgcagggataagcactccgtcgctgaagagctgctcctgcacgttgagcgaacgaacgatgaggtgtcccaaatcctgcatgacgccttcggcgtgaggcaggcgctactggtgcgtgcgtttgactcgatcaccgagcccctcgaccagttccgcgttgaactgatggaagagatgtccccatccgctgcagaggcgatgtacatctaccttcagacactgccattccggcacttcatccagcactaccccagacacttggaagagacacgcatccacggtgcgatcggagacatccaggatgacgccaatcgcttctgcgaattggcagcccatggagcccagtaccaccatgggccggcagaccgtgtcttctcaatcagtacgttcccctacctgctgcttgagcattcggaagcgatgtgtgagttggtccaaaaggccaccggcatccctacgaccgtccgacagcttcaggcgcaccgcgatcgcgtcagaccgctgcttgtctcgtacgcctatcgatcgttcgactgtacggatccggacgccacagtcctgactgtatacgacgtggtggccgcgttctgctccttccgctaccaacaggagcgtggacaggactataagccgtactggcacggccagacggatcagggcaagaacccccagcgtctcttcgataagggcctgagcgatgcccggccgtatcagcatcaaggcgtgatgcagatctatctgaatcgtttctacgagtaccaagccatctttacaggaacgatcggcagctatcaggcatggatgcgataccagatcgcggtactgggcgcgtaccgctccgtgctggatctgaagaacatcacggcgatcactaccgggctgaacacgctgaacttatactgtgtgaacctcgccaaagacctggccatcgaccactatcgaatgaatcggtaa

SEQ ID NO: 529502 - DNA, 1095 bp, Stenotrophomonas maltophilia
atgcgggagttgggggtggtcatcgaccagctttggccgaactacgagcgtgcggctttagaggcgggcatctccagtaccttgctccacaccgagctggtgcttggtggttggtcgccgcaaagccggcgattcgaggcgacggcatacgccaagagtgagtccggtgtacctgctgtggtgcagcggctagccggggggcttgcctcggcgatcggtcaggtgtgccgcaagataggctttgcgaaggcggcgctctatgtttggcggaagaagtacggcaggctggctcattccgagctcaagtggccgcataatagagcttctgcgagagattggaacgcgccgttcctccggagcgagcaagatgttgaacaaggaggtcaggtgtctgacgagctgctcatgggtcatcctgctttgcaggttatgaggccccacattacaaacgttctctgccggggcctgctggatatgcagggaggaagagccactgttggatctaccgccaaggagcacttcgcgcgatccgtgtatgaccgcgtaggagagttggacagcgctctggcgtcccttcgactggtcagcgcattccttcaggcggaggctgtcgcgtctgaccctgacccggaaaagtaccgctaccattatgaaaatttcgtcattcgcggaattggtgtcgtggatcgagcgttcttgcttgtagccgactcgctcatgttgcccaagagaccgcagcgctctctgaaggtgatcgagagcaaagctagatcgcatccattggtgcacaccgcgctctgccaagttaagaagctgcttcagccctaccgaagtctgcgcaatcgagttgcacacgaaagcgcctataggaaccgcgacctaacaacgctaggggcacttcggcagttgaatcttgatgtgggcaacatagatctgcctgccgctgctcggggatcatttgagcctcaagcggcagaggtcgctaaggtcatcaagagactgcgacctgcacttgagaatctgctggcttcgctcgctccgatatactcgaatgctatggagaattctccggcgaaccctcagggtgccgtctaa

SEQ ID NO: 529503 - DNA, 1056 bp, Stenotrophomonas maltophilia
atgaggaatccggaaggcctgaagcagctgcagtctcctcctgtgtcagcgagggagttcgcacgatggcttattgaaaactaccactcgccggataggccgttggcatcggtgcagctgctgttgtcagaggctgagccggcgatgttctgctacgagtggaaggagcagccccacgagagagagccgcagttggcagatatggcgacagtcaagagggcaattaaggactggtacaagcttgggaatcacaacccagatgacttgatgctgttttacttctgcggacatgggttgtctgagggcctaaacacgtccctgctgatgtcagactttgcgtgcgatgaaactgcgatcatggaaaatgccttggactttcgaaagttccatcatggcatggaccaatgtctagcacgtcatcagtgctacttcatcgatgcgtgtcgtgcgccgtcaaccttgcttaagagcgtggagttcgcaggtgacgcagtgctgaaccccgcgatgaatgctgccactgatgggcgcgctcggctgggccccaagttcatgtctactttgccgggtgacaagtcttacgcgattccaggcaagccgagcttcttcacgagtgcactgattagatcacttaacggcgcaggagcgggtgatgaagactatggcaagtgggtagtaaagacgaacaagctccatgcagcaatggagtacttggttaaggaggtcattgagctgaacggatggcccactatccagcaaaccatcaccgatgggatgctggaccttccgctcaatacgcttgctgagcccatagttccggtgcatctggtcgtggatccggataaggcacatgcagaagcagcgcttcagtgctcaagcaaagccgggttcaggcttcagcgtgaagctgatcccgctccgtggagctttagcgttcctgccgggagctatacgttccacgccagcttcacgtcaccggagtacgcatcaattagccaggatgagtttgtgcgaccgccctacatgcggagaaagcttgtggtggacccggcatga

SEQ ID NO: 529504 - DNA, 1581 bp, Stenotrophomonas maltophilia
atgagcaacgttagcttccgtattaatcagcgtggcggctacgaagtgggtgattctccgagtgtctttgcgcgcatctcgcttcttgatgactttgggcgcacggtgcgggatgagacattaagtgagcttgtaccgatctcgctgcgtgaacaggacgtgcttttgctcgatcttccgcaaggcgtctacgcgattgaagcgcgacttcctaatggcgagctgctagccgagtcaatagtggtgcgcgaaggcgttgatagcagcgtcgtactgcacgctcggagtgtttcagatgaatggctcggtgccgagttcctgccactcagctcagcatggaggcgtccccacaaggaagcctctcagatggacctggctacaagagaagctgtctatccggacctgtcggccggtcgttctgttgaagatagttcgaccacgccccggagttctagtgactcgaaaccctctaagaggcgtgcgaaacgtagtgcgagcgacgaggaagctgcgcccgcgcaagcgatgctggagatgccacggcccgccgtggtctttgagatttcaagttcctatcggagaattgatcgagatgaggggcatcgagatctactgggccgaatcggtctagagctatctgggcgaaggatccgcagtcttgaatcgccaaggaagcctgcggtgtggcggctaggtgagcccgccaaggtcaatccgctgcggtctattcacgtatttgagtactcagactatgcctacgagcctgacttccttcgaagtaatccttgggagactctgcccggtttgatgggatcgactgcaaacattctggcgggcttgaggttgggtgctcaacgtcagttgattcatcctgtagtgggggacgaatctcgtgcggcgtttgagtttgaagcgagtgcagtgaaagcatactccgcgcgacgtagcttcgcggcagtacctcggcgcatgggcgtagaactgatctgccttcctacccacgttgaaggtgccgaatcagcgcgctttgctgacctcgctctggccgtacgaacgcctcgatatgagcatgagttctcaacttctgtctttgtacgcgataggaagatggcaacgatgttggccttcctttcaaacggtgatctgtcaacagccactcagcttgcagagcatagtagcctcatgttgtttgagaagaacgcggatcctgtcgcagccgtagctggaggatatgccctggtaggcagtgttgtagacaacagcccgcaaccttggcatgcatggattgagaacctgatgaggcgcttcaagatgccagatggtgcaatccagtacggcacgatgcgccttcgtcttcgaactagcaggagcgatgtgactgcggctgcggaggcattcaagctagcctataggcaggggctgccgatcttcggtctaggtatgcggtggcttctcgatgggcttgagcagacggcattgatcgacgatgaggcaaacgagatggctgcggcagtgcgtcgactctccttccgactccacccgcaaagccccttcacgatgctgcgcctgggaaagcgctga

SEQ ID NO: 529505 - DNA, 1068 bp, Stenotrophomonas maltophilia
atgttccagattgagatgctgccagcacgtgagggcgattgcctgtgggttcgctacggagatgtgggcgcgccccatcagatcctcattgacggcgggaggcaggcaacctacgtcgatctaaaggcgaggctaatggagttgccggagtgtcagaggcagttcgagctgctcgtgatcactcacatcgatcgcgatcatatcgaaggtgcaattctgcttctcgaggattctgatctcaagttgaccttcaaggacatttggttcaacggctatggacacttgatgggcggcgatcttgagagtttcggtgcgaagcagggcgagaggctcagttctgcgttgctctctcatcgcgagcgctggaacgcggcattcgatggcggtccagtcaagattgctaccgatggaagcttgcctagctttcagttggatggtgggctggaattgacactgctttcgccggatggaggcaagctcaccagcctgctgccaaagtgggaggcagagtgcgcaaaggctgggctcgagccaggaatttccgttcttcgcgcggaaccagagggcttggagagctttggtggtactgtcaacgtggagaagctcgcagcacaaccgtttaggccggaccggactgctcccaatggcagctccatcgccttgctggccgagtttaacggggctcgtgtcctgcttgccggtgatgcccatgctgatcgattgattagttctctgaagctactgctgcgggatgagggtcgcttccggcttgacgcatttaagctgtcgcaccacggcagttcacgaaacacttcgcgcgagctccttgaattggtcgagtgctcccgctacctcgtttccacgaacggctcatacttcaggcacccggatgagcagacggtcgcgctggtactgaagtatggcggtagtgagaagtctctccacttcaactacggctctgactacaccagtgtatggatggatgcgattcttcagcagacctatcgctataccgtgcaagcaccgtcggaaggaatggaggggctggttgtttcgctacaggactag

SEQ ID NO: 529506 - DNA, 2256 bp, Stenotrophomonas maltophilia
atggatctagattttgagagcgcgattcgcgcaggcgagcgtaatctggaagccaagcaccttattgttaattggtgccgtcatgcgcgcgtgcagaaattcggtggtgttggtttaatcgaggcacagactggtctcccgatagggcttcactccatggcctgcgattttgcgccggcggccaccatggcgacatggttgcttgaggaggcagcactacagttccacgacgcaaactgcgtgggctgctcccaccgtgtctctgtcgacttgccgaatcttagtcagctcgtggctcggcgtgacgcggaccgtaagctgcaggaggagcgcacacggcgtgaccagatagccaagcaggaagcacttcaagcccgggccgctgcccgagcggaactgagagtaagccttccgcttctagctaagaccttcatggacgatctggataggcttgaccaagaccgcaacggagaggcagagacccggctgattgagagtgctcgacttgcgccggagattctcgttccagagcttgccgagtatcttttctcagccctggagggcgatgaacattggctggatcgggcagcactgaccatccttgagcattggcaggaccaagcgaggctggttcgttgcgcaatgaagtgcctaagtcaagggcgaacccttgagctggcggcagcgatagtgacacaccgcattgagaacattgaagcccccgacgtactgggggcggcctttggacttgggtacatcgcgtcaccaccgcgctgggagtttgattggcatgcacgcgacgacggtgaccctggcccgctgttgggagtggcggcacgctttcctgaggcactgcagaaggggctgattttggagctcgatctgcgggatgcatcgcgagtgggagtggcgtgtcgtgcgatgggcctgcttatggccaacgatgccgtttggatccgagctttcactcgtccattggccggccatctctctcggcttgaccgtctactcgacttcgagcgtgattctgaggtgagtgatcttgctggcgatattcagatcgcgttgagtcacgcattcctgaaagctcctgactttgctgacgatgagctgatgcgccagttcgagagtgcctccgaggatggagagggccgactagctggggtctacgagcgggttttgcgcgaagcgtctcgcgatgaaagcccagatcgtgcaattgatccgtcgatcacctccgcacttcgcgtggcgattcgacgtcttgcttcctgggctgttgactctgacaactcaggagtttcacagcatgttctgggcgcgctccaagggggaaggtgggtgccggaagttgccgcgaaggctgagatggacgttcttcttggcgcggctttgctgctggacaccaagctacaggtgccagatcaaagaccgagcgttcttaccccacccaaccctttggaggcaatggaaagacatggtcgacgtgccaggttgatgcatcaccgcgacgccctgctggaggtagctatccggggggcgctcgccgatgaagaggggctcgcctgtcttgaagggcttcttgctcagcgaggcaccttaacagagagctcggaggcagctctgattaggaaggttggaccacttcttaacaacagtagtggcttaagggcgatgctcccctacctatacaacgtgatggtcagtggtgaagttgcggggagagcggcggcggctgacgcgcttcgtgagattggcagtcgacgctttgccgaacttccaagcctggtcggtgaaggcctgatgctaatgattctcgacccctacgtcatggtgcatcaggctgctgtaagtgcgctggctcgaattagactcccggaggaattccacctaagagtcacagatgctcttgatgtgctcatcgcaacgtatagaggcggaaatgatccccggttcttgctggagtgtatcgacgcgagagtaacgaagtacttgagagatggcgaacttcctgcggtggatggccagatgctcctggctctgattggggaacttgatccatcgctgctgttgaacggcgggcaccgattcatgctcaagcggcttcagcacttgcatggttggagcgcgttgattctgagatgggttgggcaggcgaaggaagactaccaactcaggcatgcgcttgagttggccgccgacattcccgtaggggctagcgctccccacgtttcggccatcctggaggcggtgtga

SEQ ID NO: 529507 - DNA, 1527 bp, Stenotrophomonas maltophilia
atgaccatcgtccgcccagagatcggccgcgagattgccaccaccgccgatggcatcgacattacccgtggctacaccgggccgctgctgctgcccttcgatagcgtgctgcgcaatcggggcggctatgacctgcagatctacgagcaggtgctgtccgatccagaggtgaaaaccaccttcggctcgcgccaggactcggtggtggcctgcgaatggcaggtggagcccggtggcgagaagcgcatcgaccgccaggcggcagagtatctgcaggagcagctgcacggcatcggctgggacaacgtcacccgcaagatgctgtttggcgtgttctatggctatggcgtggccgagatcctgtacaaggtcgacggcacccgcatcggcctggaggcgatcaaggtccgcaatcgccgacgcttccgctacggcaaggaaggcgatctgcgcctgctcacccagacgcagatgacggagggcgtcccggcactcgcaccatacttctggaacttctgctccggtgccgaccatgacgacgagccctacggcctgggccttgcgcactggctgtactggccagtgctgttcaagcgcaatggcctcaaattctggctgatcttcctggagaagttcggcatgcccaccgcagtgggcaagtacgacagtgaggcgaccgatccggagaagtccaagctgctgcaggccacccgcgcgatccagaccgacagcggcatcatcatgcccaagggcatggagctggcgctgctggaggccgggcgcagtggcacggccgactacaaggccctgcaggactacatggatgccacgatccagaaggtcgtgctgggccagaccgccagcacccagggcacacccggcaagctgggcaacgaccagctgcagcgggaagtgcgccgcgacatcatcacctccgatgcagacctggtgtgtgagtccttcaacaaggggccggcgcgctggctcaccgaatggaacttccccggcgcagccatcccacgggtctaccgcgtcacggaagagccggaggatctggacgccactgccagtcgcgacaagaagatcctcgacctgggctacaagcccaagcaggtctacatggaccagacctatggggacaactacgagcctgtccaggcgctgccggagccacctgcggtaccgacagcgatcgatgggccgcagttcgccgatgccggcggtgcggtggtcagcttgctgcgccgacactatccggcggcctttgccgacagcaccccaaaggcgcctgatcctgccgtcggcctgggccggcagcttgatcggcagctatcgcccattggcagtggctgggtggagcagatccgccagctggtcgatgaggtcgattcgctggaggagctgcgcgaccggctgttcgagcttcatccgaacatgaccctggacgactacgcctcggtgatggccgatgcgatgacggcagcgacgctggccggccgtaccgacgtccagggcgcgggagactga

SEQ ID NO: 529508 - DNA, 639 bp, Stenotrophomonas maltophilia
gtggcgatcgctgaccaggctgcgcgggccgacgtggagatccacgcgccggcggtggagctggacgggctgcgcttctgcgacaccacctgcggcaacgccaagtgcgaggatgccgccgccgctcgctatgccatccgccaagcggtgcagtacatcgaggcgcgcggggacgtcttcccttggcgcctgaaacgtcatatctcccagccgggcctgctgcacttcgaagagcgtaccgacgttgaggtggccacctccggcccgcgcaacgcgtgcgtcaactgcgacatgcccaccggcttggcggaatcgccgatgtgcggtccgtgcgcccagcaggcggtaggtgcgatggcgtctaccacggctgacacgatccggcgcatggacgggctcgacttcgtgtgtggactgcgcgacccgcagacaaagcgggcggtggccacagccatagctcgccaggtcgggcatggcatggccgagaagtgcgaggcccaggccgaagcggccctcgacgccatcctggcgctgctgatccacccgccggtgcttgtgtggcaggggccttgcccacccggcctcatcgacctgttcaaaaacggtgccgagaaggagagccgccatgttcatgcgtaa

SEQ ID NO: 529509 - DNA, 507 bp, Stenotrophomonas maltophilia
atgattcgcgccctgatcgcaacggtcaccctgctgttggtgctcctgctggtggccattgccgcagcacttctctaccgcggcaatgccctggatgcgcaggctcgtgacgccacggcgcagcagcgtgtgaccacgcttgaatcgcaactggaagacgagcgcagcgctcgcaacaccgagcacacccaggccaaggcgatggcccagatcggagacgaacatgaaaatgatcggggggcgtccgcgtccatccctgctgctgttgtggctgacctgcgtgctggcaatctccagctgcgcgacgacctcgccacctgccacaccgcccgcctgtcccaagccgtctctggcgccgtcgaacgtgatgcgagcgcccaactacgtccagaggttgcaggcgctgctcttcaaatcgtcaccgaagccgaagaccacgtccgctcctgccagcgcgtcatcggtgtcctcaccggacagcaccctcccgtcgaggccaacccatga

SEQ ID NO: 529510 - DNA, 2760 bp, Stenotrophomonas maltophilia
gtggaccaagggatcatcgccagcctgctgcagcacccgcttgcgtcggcgctggtcatcgtcgaccgtacgggacgcccgttggcggccaatccggctgcgcgcgagcatggcctgccggccactgtggccgcctatgcgccgatgctggaagatctgcgcctgatggccgccgatggcggcatcgtggcctgtacgctgcccggcggcccgcgcggtcactacgacggccacctgcgcgccgtgcacgatggcgccggcaacctgctggcgttcacgctgagcgttcccgagccaacgccgatcgatggcggcgggcgctgggagctggcgctggacagtgccggccacagcctgtgggattgggatattcccagtgaccgcgtggcgcgaaccccggcgctcggcgatgagaccgccaccgagatgttgtcacgcgtccacagcgaggacatcggccaggtgcgtgcggcactggaccagcatctgcgcgggcagagcgagcagtacagcgcgcagttccgcttccgccaggccgatggccagtggcgctgggtcctggaccgggggcgcgtggtcgcgcgtacggccgatggccagccgctgcgcatggtcggcacgcataccgatatcgagcagcagaagcagctggaatcgctgctgcaggaacagcagctgcacctgagcgaggcgcagcgcatcgccagcatgggcagctggtcgtttgatccgaccaccggtcatttctggtggtcgccggaactgcgctcgctgctggcgctggagcagggcgccgtgcccggccagcggcgctggctcaagcagttgcacccgcgctcgcgcggcgccctgcgcgcggcctggcggcggttgtggcgcgatggtcgcgccgccaacctggagctggagctgacccgcggtaacgagccctcgcagcacctgcggctgtggatgcagccgctgatggacatggaggggcagcccaagcgactgctcggccaggtccagaacatcaccgaacagcaccagaccgatgcgctgatccgttggcgcactgaactgctgaaccgcgtttccgcactgggccgcatcggcggctgcgagatcgaggtgcagacccggcacatgcagtggaccgaggagtgctatcgcatccacggcctgcgcaaggagcccatcaccctcgaccaggcgctggcgctgtacaccgaggattcgcgcagcgccttcgaggcggcgttggtgcggatcgccaatggcgggctgcccgagcagctggacctgtgcttctaccgccagtccggcctgcgtgtctgggtgcaggtgctggtcgagctggaccgccgggatgggctgccgccgcgcttcgtggtgctgttccgtgacatcacccgcgagcgcgaagccaacgagcgcatcgagctgctggcgcattacgatctgctcaccggccttccaaaccgtgtgctgctcggcgagcagaccgccgaagccatcgaggaagcgcgcgaccgcggcacctcgctggcaatgctgttcatcgatctggacggcttcaagaccatcaacgacagcttcggccacgccactggcgatgcgctgctgaaggcggcggccacccggttgcaccagaacctgcgtaacaacgatctgttcgggcgcttcagcggtgatgagttcatcgtcgtactgcgcgacctggccgagccggaagacgccggccacgtggcacgcaagctgattgcctcgctggccgagccgctgcgccgtggcgagaccacgttgaaggtgggtgccagcgtcggcattgcgatgctgggtgatgcacagaccgacttcgattcgctgctgcgcgcggccgacgccgcgatgtacgcggccaaggaagccgggcgcaacacctaccagtactacagccaggacgcactggcccggatccagcgcaagcttgaactggagcatgcgctgcacggcgccatcgagcgcgaagagttcagcctggcctatcagccgctgctgcacgcgcaccagggcgaaccgccggcgatcgaggcgctgctgcgctggcatcgtccgggcatcggctattgcagcccggccgagttcatccccattgccgaaaaatgcggcgagatcgtgcgcatcggcgactgggtgctgaacgaggcctgccggcaggcgacagcctgggaccacgctggcctgcgtttcgatcgcatcgcagtcaatgtgtcggcggtgcagctgcgtgaccgtggtttcgccgagcgtgtgatcgaaatctgccacgcacacggctggccgccgcaacggctggagctggaactgaccgagtcggcgctgatccgtgacaccgacatcctgcgccactgcttcgacgtgctggaacggcacggcgtgcccctggcggtggatgacttcggcaccggcttctccaacctcaactacctcaaccgtttcccggtggggcgcctgaagatcgaccgcagcttcgtgcagggcatgctgcatgactcgggcacggccgaagtgacccaggccatcgtgcatctgggccacgcgctgggcatgaaggtggtggccgaaggcgtggaaacgcaccaggaagaagacatgctgcgccgccagggctgcgacgagatccagggctacctgtactcgcgcccgctcagcccgcgtgacctggcgcagtggctgcgccagcagcacccgtcaccgatgcgcaccgacgccagcggcgaagtggtgctggcgcgctga

SEQ ID NO: 529511 - DNA, 2103 bp, Stenotrophomonas maltophilia
atgcccgcagaccctaccggcaaggcccctgtttccgacccgcggatggcgcaggcgctgagccgcgaccggcggcgggtggtgctgagctacctggtgatggcgctggcctggatgatcgcgaccgacggcgcggtgcaggcactggtgcccgacccgcagcaggccgcgctgtggcagggcctgaagggtgcattcttcgccctggccagcgccgggctgctgtacctgctgttgcgcccgctggccgagcacgtgctgcagacccatgcccggcagcaggcgtcggaactgcggctgcggcagatgttcgagggcaatcccggcccgatcctggtctacgacctggatacgctggccatcctcgatgccaaccctgccgcctgcgtgaccttcggctgggaacgcgacgaattgctggagcagaccatcgatgcgctgtggccgccaggccaggaccaggccctgcagaccaagctggaagcaatccgcgaggcgccggaggaactgtgcatcctgcgcacgcagctgcagttgcgtgacggcagcctgcggcagatggaactgcgttccaatgcgatcagctacgacggccacaatgcccgcctgctgatcgccatcgaccgcaccgccgaggacctggcccagctgcgccgtgaccaggcactggcgcgggtggaagaggcgcacgagctggcccgcatcggtgcatgggaactggatccctccacggccctgggccgctattccaaccaggtctatcgcctgctcggccgccgcccgcccgaggcgcgccgctggcaccgtttcgacgaactgctggtgccggccgacccggccaccgccacccagaccgaacagctgctgtccgagctgtgctccggcgacccggtgcaggtggacgtgctgctgccgctgctgtcgatggacggccgtgcattgatggtgcacctgcgcgccgccagtggcattgatgaatccggccgcagccgcgtgctgggcactctgcaggacgtgaccgagcgcgaacaatcgcggcgcctgctgcgcgagcgcgaggaacagttccgcgagctggtgcgggttctgcccgatggcgtggtgattctgtccgacgagcacgtgctgtacgccaatgcgtgggccgccagcctgttcggctatggcagccacaccctgctgggcgagccgctgtcagcgctggtcgctgcaggtgacctggcgcgggtgcgcagccagctgcgcgccgggcagccgcacctgggccccgggcacagcagcgtggtggcgatgcagcgcgccgacggccgcagcttccatgccgggctggcggtgggtgaagtgcgctatggcggccgcgactgcaagctgttgatcgtgcgcgacctcagcgattccgagcgcacccgcagcgcactggaaaccagcaaccgcgagctgcaggcgatggccggccgcctgttctcgctgcaggaggacgagcgccgcgcgatctcgcgcgacctgcacgacgacatcggccaggcgatcaccgcgatcaagctgtcggcctatgcggcgcaggacgaagatgacccgcagcgccgcgccgaggacctggcgcagatcgtcagcctggccgacaccaccgtggccaagctgcgtgatatctccaccctgctgcgcccgccgcagctggacgcactggggctggaggccgcgctgagctggcaggcacgcgtgctgttccggtcctcgccggttgaactgctggccgagatcgagccgctgccgcatcgcccggacaacagcatcgaacaggcctgcttccgcatcgcgcaggagagcctgaccaacgtgctgcgccatgcgcgcgccagccaggtgcagctgcagctgcgtgacgtcgggcaacgcgggctgcatctgcagatccgcgatgacggcgaaggtttcgacccggatggaccgcgcgggcttggcctgatcgtgatgcgcgagcgcgcgcagagtgtcggtggccatgtacggatcgagtccgcgcatggcgaaggcaccctcgtcgacgtccacctcccctaccaggcggccggcatggccgccgtcgagtcaccggaatactga

SEQ ID NO: 529512 - DNA, 1773 bp, Stenotrophomonas maltophilia
atgtggaatcccaacctgcccccggtcagcatcgacgatgcacccgaccgccttggcgccggcaatcccgagctgctggcgatggtcgccgacgcggcttcgggcggtactgcgctgatgctgatgcatgtagacatcgaccacttcgcctcggtgaacgagaacatgagcgcggaagtgggcgaccaggccttggtgctggtggcgcagcgcctgcagtcctacctgcgcgggcgtggcaagttgtggcgccacggcagcgacgaattcctgatcgcggtaccgcgcaccgccgacgtgccgctgccggaagacttcgccgaggagatccggcagcagatggagctgccgctgtcggtgctgccgtacacgctgttcatgaccggcaagctgggcgtgagcctgtgccccgaacatgccagcagcacttcgcgcctgcttgaccacgccgaagacgcgctgtaccaggccgcgcgcgaaggcggcaacgcggtgcgcatccacgcggtggataccccgcccagcgcgcacagcgagagcatcatcgcgcggcagatcgtcgatgcgattcccaacggcgagctgaagctgcgctaccagccgctggtcagcgcccgcgacggccacgtggtgggcatggaggcgctgctgcgctggcagtcgcccacgctgggcatgctggtgcccgagcgcttcatgcgtaccgccgagcggctggggatcatcgtgcagatcggcacgtgggtgctggagggcgcgttgaagcaggcgcgcatgtggcgcgaccagggcttcgatgacttcaccatcgcggtgaacgtctccaccctgcagctgctgcggccgaacttcttcgccgaggtgatgtcgctgatgcaggctgccggtgttccggcgcacatgctgacgctggagatcaacgaaagcgcgctgaccaacaacgtcaatttcgtgcacgagacgctggccaacctgcgcaatgaaggcatcagcctgagcctggacaacttcggcaccggtgattccagcctgagcgcgctggtgcgctacccggtggacaagctgaagatcgaccgcagcttcatcaagagcgcgccggccggcaaccgcgaggccgccatcgcccgcgcgatcatcgccatgggccaccagctgggcatgaccgtgatcgccaatggcgtcgagtcgcaggcgcagctgggcttcctgcgccgcaacgactgcgacgtgttccagggctacctgttcggcgaaccgatgtcggccgatgccgccggcatgaccctgcgccgccgctacctgcgcccggaagcgttcgccgagacccgccccgaccgcaccctgctgctgctggacgacgaggagaacgtgctgcgctcgctggtgcggctgttccgccgcgatggctaccgcatcctagccgccggcaacgtgcgcgatgcgttcgacctgctggcgatcaacgacgtgcaggtgatcctgtccgaccagcgtatgagcgacatgagcggcaccgagttcctcggccgggtgaagatgctgtacccggatacgatccgcctggtgctgtccggctacaccgatctgaacacggtgaccgacgcgatcaaccgcggcgcgatctaccgtttcctgaccaagccatggaacgacgacgagttgcgcaagcacatccaccaggcgttccgcacctacgaggaacagcgtcgcagcaatgccgggccagcgccggttgaaaccggcgaaggtggcgaggatcgcccgcagcggtaa

SEQ ID NO: 529513 - DNA, 486 bp, Stenotrophomonas maltophilia
gtggccaagccccgcactgtgccgcccagcgcacccaagaccgtccaggacgacacgccggccgacgtgccggccgtgaaggaagagaagactacggacgcgcagccggcgacggacggctcggtaccggagcaaggccgaggtgagctggagtccgccgcgtcggttgtccctgcagccgatggcgctgccgtggaccagtcgcaggccgaccgttcggcagcggaccagggcgcggacgccgaagcgggtgtttcttcgcctgatgcagcgtctctcgacgctgtcactgcgcctgccacttccacagttgggggtgatgacgtaccgagcgcttggttcttcgaagtactcagcccgttcaagcacaacggcgcggtcgtcaagccgccggcgtggatcgagatgacgtgggaagaggcgcaggcctaccaggatgctggcgtcctcggtgacgaaccggccaccccggaagagctggagtaa

SEQ ID NO: 529514 - DNA, 1002 bp, Stenotrophomonas maltophilia
atggccgccgaccagggcgttggtctcctgcaccatcagcccgtactcgccggggaaggcactggcgtcgatgcggtagctcagttcgccggcatcgtggcgccgcgccatttcgcgctggccgccgatcaccgcgtgcagctgctgctgcatgcccgacatggcgtgcagcaggcggccgggttcgtcgtgcggctgcgggccgatgtggctgtccagcttgccgctggcaatgccttcggcgacggctgtggcctgcttcagcgggcgcgcgatgcggttgccgatgacccagctcagggccagcacgatcagcaccagcgcgccgccggagactgccatgatggcggtgaacaccagtgcctgcttctgcacgtcgtccatgtagacgccgctgctgaccacccagttccagggcgcgaacaggccggcgtaggccaccttcccgacgtcgcccttgctgccgggcttggcccagcggtagctgacgaagccgccgccggccctcgctgcttcgacctggtcgtagtagatgcgcacgccgtcgtcggtgcggaagtccttcatgtccttgccgaccaggtccttgcggaacggatgcatcagcaggtggtagccggtgtcgtagatgttgaagtagtacgtatcgttctcggcgcgcatcgattccagcgcctgcagcgcggcgctcctggcggcctcttcgctgagctcgccggtaccggccaggcggtggtagtgctggaggatgccgtagctcagttcgacctgggtcttcagcgcggtcttgcgggtctcggtgaggtccaggtactgcatgcgggcagcgatcaccgagagcgcgattacgccgagcgcgatgagcagcgtcagcaggttgagcttgcgccggacggagaggttgctgaagtagtgttgccagcgatgcaggagattcatcgagcaggaccaggtcgaaacgggcgggcggcgccgagccggtcacggcgggacatgcggtga

SEQ ID NO: 529515 - DNA, 921 bp, Stenotrophomonas maltophilia
atggcgggcactggcgccgggggcccgctttggcctgtcgcagcacccgcaggtgggcgaggacgcacagttcctgtgcctgtcggtgctgcaccaggcgcgcaacaacctcgatgccgacgtgttcgacgcactggaacagaccctgggtccgtccagcgtggccgtgccggcgctgccggacgcgctgtccgggctggcctatggccaggcgccgggcgaggtgtccaccgcattctacgacaaccgcttcgtcgccatcccggccgaagtgaactaccggccacagaccgaggacggccacggcgcgcacctgcatccgcggccgaccatcaccggcacgctcagcgcgatcgtggtcagcgacggcgacccgctgctgtccgaccgcgaccatcgcatcaaggtgcagttcccgtggcagcgcggcggcaacgccagcagcggcctggcccatcccggcggcgacgacaacgccccggccaacgggggcgcttggacctgggtgcgggtgatgaccccgtgggccggcgacaactggggcggcgtggtgctgccgaggcgtgggcaggaagtgctggtggcgttcctggaaggcgacatcgaccgcccggtggtggtcggtgcggtctacaacggccgtggccagcaggacgcacagcacaaccagatcaacggcgggggcgccaccgccaccggcaacgccgccgcctggttcgagggcaacgaccacgccgcggtgtacaccggcttcaagagccaggcgctggccgacagccagggcggcaccggcggctaccagcagctgcgcttcgacgacacgcccgggcagggccgcgcgcagctgtccaccacccagcacgagaccacgctgaccctgggccacctgaagggcggccaggacaatgtgcgcgagggtga

SEQ ID NO: 529516 - DNA, 1464 bp, Stenotrophomonas maltophilia
atgctccttctacacgttggcgggctggtggtcaggcgtatcactccagtggcagtgcccaggaccgggcgcggatcttccctgcaggcggtgctgcgccccggcgcattgctggccagcctggccctggcaggttgcatgtcggtgccggtgccggacctgcccggccgcacgcccagcgcctggacccagctgccacaggggcagggcgtggcggtggacgccaggcaatggtggaaggtgctggccgacccggcgctggatggcctggtggaccaggccattgccggcaacctcgacctgcagcaggccacgctgcgcctgcaggcggtgcggatcgtcgccggcacgtcggactcacgcttcctgccggagatctcggccagcgccaagcaggtgcaggacgccgccgccgtcgatacctatttccatgcgggcattgaagcgatctgggacctgggcctgttcggtgccgccgagagtgcgcagttgagcgcgcaggcttcggccggcaatgccgaggcgctgcgcagtgctgcgcaggttgcggtgatcgccgacgtggtgcgcagctacctggatctgaccgtggcgcaggcccagcaggacctgctggcccggcagcaggcggtggatgatcgcggcgagcagttggcgctggttcgccagcgcctgcgcctggatgagccgggcgaacttgatcggctgcgggctcgccaggcagccacccgcgcggccacggcgcaggccagcgagaatgcggacaatgccgcccgtgcattggccctgctgctgggccgcgatggcccggacccggcctggcgtgcgtatcgcacgccgccgaagctgggcgcattctcgctgcagcaggtgccggccgacctgctgcgtcgccgtcctcagatcctgctggccgaatcggaagtgatgcaggctgcggcaagcaagggttccgcgcgtgccgcgatgtatccgcgggtcagcctcggcggttcgatcctgtacgcctacaacctcacccagaacgcccgctccaattccgattccagtccctccatcggcccgtacatcgatattccgctgtgggattggggccagcgccgcgcgcggttccatgccgatgagaaacagctggatgccgcgctgctcggctaccgcaaggcggtgctggaaggggtgagcgaagtggaaggcgcactgggcagcctggcacgccaggacagcagcatccagtcgctgcgtgcggccaatgatgccgccggccagcaggtcaagcgccaggcacggcaggtgcagttgggcctgtccagcgaattcgatggcctcgacacccagcgcgctgcgttgtcttcgcaggccgatctgatcggtgcgcagggcgcgcgcgtgctggcattcgcctccctgtatcgcgcacttggcggggcgccgctgcccgtcgagggcgagggcgaaccgcaatga

SEQ ID NO: 529517 - DNA, 207 bp, Stenotrophomonas maltophilia
gtgggcgaatggtcggaatactttgaagatttcccggaagagaacccggcgaactggattaacggacgctttgaccctgaaggggcacggcgcgaacatcagcgggccgaagtgctggctcagtcacaagcggagttgaacagcactgtccgcaggatgattgaagaaggcaaccgccgcgcccgcgagaagcaggccaaagcgtag

SEQ ID NO: 529518 - DNA, 1392 bp, Stenotrophomonas maltophilia
gtggttgtagcggagcggaagccaccggcccacgggggcgcagcccccacgcgtcggagcgggagcggagatgcgacggcccggagcgtgagcgcagggacggcggagcgtgcgggagcacgcggagcggagcacggcgggagccgtgcgaccggtgcggcgaagcccaagccggcggccgtggccgacgcctgggcgcagacgcaccgcgtggcgctgggccagcgggagcggtcggcacggcttgcatcgcaacgcgatggcaagccgtggaccctccacgcagaccagcagacgcgcgacgtgctggccgagtgcggacggcgcgaggttggcgcggccacggcggccaagtatcggcgggcctacgacaacctgcgggcctccggcctgacagcgttggaggcggccagcacacgcgcgcactacgacttcctgcgcacggcctgccggttctgcatggcggaggacgtgcgggcgtggcgtgcggcgtcggaacgggcgatgaagcgggacgacatcgccagcgcccagcgcaggaccgaacgcgctttccggctggctgcggtgctggatgagatgttcctccagcccggacgcctgacgtggaaggacaagcccaaagccgaacgcgggccgtccaagtccaagcgctcgacgcacgcgcccgcgccggacgtggccgccggcttgctgctggggcagcaagagcgcgtccagcagcggcatgcggagcgcttggtggtgttggcgctgacaggctgccgtccggcggagctgcgcaacggcgtgcgtctggaagccctgcgcagcaagggcgggcggttggtgctccgggccacgctgctgggggcaaagtggaacggcgagaaccggggccaccatgaccgcgtgctgcaattcccggcaatcacgggggcggcgtctgtgctggcggcccaagcggaagcgaaaggtggccggtggacgctgacgacgacggaagcggacgtgcgtagcttgaaccgcgctctggccggtgcgggcatgagctgttacagcttccggcaccaagtcgccagcgagctgaaagagcaagtggccacgggcgagcggacggcggaagaagcagcagcggcgatgggtcacgccagcaccgccagcctcgcttactacggcaagcggtcgcacgctcggggtggtcggaagctgcgcgcggttgcgtcggacaaggtgcgctccgtgccggtcacgttcaccgccaaagcagcggcacgcgccgcgcgtgccgcaaaagcagggagtggggctgcgccccgtcctgccgcaccgtcggcatcgccgacgccacgggcggccatgtctaggccagtggggccgttggcgcgaggccccaaaccgccagggcggtag

SEQ ID NO: 529519 - DNA, 1518 bp, Stenotrophomonas maltophilia
atggctttccctcactatctcacccgcaccgcgtcgggccgtttcgtctttcgcattcgcgtccctgctgacctgcgcagcaccgtgggcagagacttcatcaagcgcccactgggtgccaccctgttgaccgcgcgccttgcggcgttggaactgtctgcccgctatgctgctgctttcgatgagctacgcgggcgcggcatggcggaaaagaaaatcacttgggacgaggtattggcgagcgtggccgccaacggctccaagaactacgaaatcgagttccccggcggcggccgattgcgagcgaatgacgccgcagaccatgcgagggcaatggaagcgctggaagctatcgggcgcttcgacctcacagcccgcccggttgttcagtcccctgccccagccgctcccactgtcgccgaagccatcacgctggctaaagcaggggaggcatggcttaagagcatggaagccaccacccggcccaagaccctgacaatcaagaaaaccgccgtcactgcgctggtggactacctcggggcaggccgccacgtccacacagtcggacggcccgacctcgcgcgcttctatcaacacctgcgcgacggcggcgcagcaaccccgaccattttcaataaacaaagctacctcggaggcactggcggcttcttcgcatggtcgcaggcatcgggtcactacccggccggtgacaatcctgcgcagggacatgtccgctacacgacgaaggagaagaggcagcgtaggaagctcggctttaaggcgttcgacctcgaacaggtgcgcacgctctacgcgccggagaacttcgcaaggttatcgccgggcgcgaagtgggcggcactgatcggcctctatacgggcgcacgagccagcgaagtcgggcaacttctgacacttgatgtcgccgaagtggatggcgtgccatcaatgcgcttctgcgacgagagcgaccaccagcacgtaaaaacagagaggtcgaaccgcgtggtgcctgtccacgccgacttgctggagctggggttcttggagtatgtcgatagcttgcgcggacgcggtgactggcgcgttttcccgcaagcgtctgcgaccgctaagaatggcgcgggcaactggataagtaagtcgttcggctattacctgggcacacaagcgagcgactggccgaaagccaagcgcggtttccacagcctaagaaagactgtcatccagcaaatgcagggtgctggtgtgccatcggagcttcgcgttcaaatcaccgggcacgaactcggcgacgaacatcatgcgacctacagccgcgacttcaccgccgccgagaaattggccggtgtcggccctgtgccgggcttgtcggtgctggcttacggcttggacttagacgcgctgcgcccgctgttgaccgaagccgtgagcaggcgacaggcaaggacgccgggacgcaagccttccgcagcagcaacggcacgcaaacgctcggcgacctctggcgacaggtag

SEQ ID NO: 529520 - DNA, 531 bp, Stenotrophomonas maltophilia
atgaagatgacgccggagcttgcgcaggatcttgtgcggctgcaacctttaatggataaggccaatgagccaggtgccgacgctcaaacagtggcggcggcgtttgcggccggtcaggtggttgtgcgcgcccacaaccagcagtttgctgagtatttcgccggacgtttgaatggtgttgcgctcaccttcaaccgtggcgagttcaactattcattcaaggacgcggcagacgcagcgcacgcgttcaccatgttgtcgatgcagcaagtcaatgacccgaagtccaaggcgatatcaggcggtgttgtcaacttgcttctcagggacatgaagtacaaatccagctttgagagcgatgaagcgtacctgtcggccatcttgatgattgcgcagtcgatgcactcatatcgtgtgtcgattttcaatcaatttgtggacgaaggcaggcaagcacagcgcgctacgttctggcgctacttcgttattggtgccgtcactgttggaattgcttatctcatcctgggatag

SEQ ID NO: 529521 - DNA, 231 bp, Stenotrophomonas maltophilia
atgatcgcgaaagacgcagcaaccagcgcgccagcaccaaggctcagtgccactgaggccgccgactggctgggattgagcaaaagcacgctcgacaagatgcgctgcgaaggaaggggcccgcgctacctgcgcgtgggcaagcgttgcttctaccggcctgccgacctggacgcctacctggaggccgcagttgtggagacggcggacagccgtgcgctgccccgctga

SEQ ID NO: 529522 - DNA, 345 bp, Stenotrophomonas maltophilia
atgacagccgaatatcaccaattcaagttgcgccttcccgtcgacctcatgcagaggattgaggcggaggctgagcgcgcgggtcgctcgttgtcggcagagatcgttttccggttgaacgaggcgtacgcatcgggcgctgaagaaagcgggggcgcggtgacggacattgccgccaagcttgtggcctatcagcggcaagtcgaccgcaatgcgcgacaggtgcaggagggcatggagagggtgcaaaaaagcatggaagacctcgagacgctcagggccctgctggagttgcgcctggcggaaacaaatgaagagttggatgccagtaagaaggcgaagtag

SEQ ID NO: 529523 - DNA, 285 bp, Stenotrophomonas maltophilia
atgaccagtccaagagccttcctgcgttgcccgcattgcgataccgccgccgtcgtgcgcaccagcgtgctgcattccaaactgctgcgcgaatcactgctccagtgtcgcaacgcgctttgcggccatacgttcagcgcctatacggagatcgtgcgcaccatctcgccaagcgcatgcccgagtggggatatctgcctgccgatcagcggccccgcagaacgggccgcgctcagtacagggaatgctgcaaagcccatgacccctaccaaggcgcggcgatga

SEQ ID NO: 529524 - DNA, 750 bp, Stenotrophomonas maltophilia
atgagcgagatccagacaatcaacaccaccacctctgaactggacattcaacccggcgaagtggccgaggcagcgccggtatcggagagaaggcagcggctgaacgagctggcccatcacttggccagtgcagtgcagcgcaagcgcgcactggtggccaaggtcgatacgatgcagcgcgccaagctggcagcacaaggcgatgccgccgctgctcgccagcaatggagcgccaagctgcgcgacgccgatggcaacctcacccgcgatgttcagaagttgcgcaccaacgagagttccgccctgtcgctggctgaggagtatggggcgatggcggacgagattgcggccgagttgccgaagctggagctggaattggctgagctggccgactgttacctcagcacggcagtgggtgtcaccagcgaagctgccagccaagcgtacgagcaattgcttgcacaagccggcaatagcctggcggtggccttcgcgctattcgcgaaggcggagaatgcgggcgttggctatcgtcagtcggccagtactgacgaattgtccagcacgttcttcggtcatctcggtgaagcagtgcgccatcgcctaaacgattccgcagtgaccgatcaggtggcgcaacagttggcattgccgtcgatggatttgagtgcagtggacatggatctggtgcgtagcccggcgcgccgttcacagttgcgtgcacagatcagtgccgggagcgcggtgtga

SEQ ID NO: 529525 - DNA, 477 bp, Stenotrophomonas maltophilia
atgaccactagagccccgattctgacgagactggccatatgggtagtcccgttcttcagcgccactctggctgcgccccttagcgcacagaatcccgttgggatccaactcatgaacgatttggcctggcatggcgtgtctgatcgtgtccaaattcatcagccgtctgtgcaaggaaagcctccccacatcgacgtgtgggaaagaattgccatagggaacacatacggcaactgggcttacgtgaagaacctcatcgattgccagcaatggactcaaattccattttcgacaatcgaccggggtggctacttcgtcctctggccgaaggctcctgcctctgtgaaggcagcttgggaggcccacggccaaggcaatgagagggttattacggggatctgtgccctgtacggactcaggaagccgcgtctagagacggccgcaccggacaaaagcggggacttcgtagagcgctag

SEQ ID NO: 529526 - DNA, 1338 bp, Stenotrophomonas maltophilia
atgttcaacttgaagacaaccccatacactttggatgcccctggggaggctgcagtgcgggagcggctagaggagatcgaaagccgggtagccctgcttcgctcagttggcaccctaacgagcgagactctgcagaactactatggtcaacggcgattcgaagaggttgcgcagtcgaatgcattggaggggagcaccctcagcgtgggcgagacccagctcgccgtgatgcgtggtgtcacgctcactggccacgacccggcatatgttcgcgatgctatcgccttaaataaggcccttgatcgtatttcggtgcttgccacggatagagagacgcctacggatattgaacaattgaggaccgttcatgagctggttttgggcggcaggccgagtgcaggaatgtttcgtcgtgaggaggtgataataagtggctccctacatcgcccgccgcgcgactgggctggagttatgtcaggtatggagtcctggcagacatggtcgaaggaaaatgccttcttgccagcgccaattcgggctgctgttctgcacgcttggctgacacatgtccatccataccttgacggaaacgggcgcaccgcacgagctatcgggaaccttgagctcattcgtgcaggttacccctcaatcatcattaagaagacagagcgagacctttacattgatgcgcttgcggaatcagacattggcggggatatatctgcattcttagagcttatccttcggaaggtcgatggcagtctgcgcgggcttgaacttgctgcaaatgcgaagcaaggttacgacgcggtcgcgcagaaggtgcgcgttagacagcagcgcctgctgcagatatgggaaacgagtgtcaaacttcttgcatctagtgtggagttgcacttgtcgcagtcgttggagtctgtaggcggaaaatgttcaattcgtctgtacgacacgcccctggatctggaggattatcttgaaatctgcgatggaaggcctgtgtcccagagttgggcttttgaagtccgagtagaagtgcctggcttgccacgcgtcgagcatctggcgtggatagggtatcggacagacctcctcaaggcgcggcttgggggtggggggccgtcactgttctggtctcatcgcaattccgaagcctatccaaaatggaaagcagatggaaaccgctcgccattcgctgtcgaaatcacatctgacgtaggcaagggcgatgcctggattgttcgtaggtgtgacggcaacctcgagcagctaagtctggtggagctatcgcagaaaattgcaggcgcgctagtggatgaggttctccaggattga

SEQ ID NO: 529527 - DNA, 264 bp, Stenotrophomonas maltophilia
atgggcgctgccgtgggctatgccgctgccgaccaggtcaatgaccgccgaggcgcgcgagtcgtcagtagcgtgttgggtggggcgacgggacgtgccatccagggtaagttctaccgccgtggcttggagatctatgttcaagagagcggaagcgggaagacctgggccatcgtccaggaagcagacgtgccagtacgggcgggcgatacggtggcgctcgtgggggcaaggcgtaatcttcgcgtcgtgcccttggactga

SEQ ID NO: 529528 - DNA, 861 bp, Stenotrophomonas maltophilia
atgcgcaatccccgtccggtctgcccaaaccccgtctgcgtgaaccaccggaagcctccggctgggttctatcgcaaaaacggctaccgtacgcctaagcacaaccaccagcccgttccacggtaccagtgccgggcgtgcggcaagaacttctgtgccacccaggtcaagcccattgccggccaacgccgtccggacgtgaaccggcagatctttgagttggccgtctctggtgcccccatgcggcggatcgctctgctgacgggctgctctcggcccaccatccaggccaagatcgtctacctggccaaggaggctaaacgcgtccaccaggaacacatggaagccctgtggcagtcggacggtacggggcacatcatgatggacgagctggagaccttcattcacgcccgatggcgtcaggtctccgtggccgtagtgttgcgtgcccgcacaggagaagttctgggcttcacggtctcccggctgtccagcaatatggccaaggggcaagccaatggctggacgacctccgatcgccatgtccacattccccacttgttgggttcgatccagccctacctgcgagtgggtgccaaaatcaccaccgatggcgacgcgtcttacggcaagtggatccgtcgcaacctgcccggaaccaagcacctggtggttcactcacccaagcaggatccgcaggcgttcgatccactttttccgatcaatgtcgtccacgccaagatgaggaatgacctggcccgcctgtcccggaagacctggacgaccagcaagacgatcgatgggctacggtgccacctgtggctgtgggtggcgtgggcgaatggctaccggttgcgttga

SEQ ID NO: 529529 - DNA, 2232 bp, Stenotrophomonas maltophilia
atgatcaagacgatcacaatctgcaatcacaagagctttcatccgaccacgccatatccggtgcgcttcgatccaacgaaggtcgcgacctacgtctatggtctcaatggcgcaggcaagtctgccatcggcgaagtcgtcgatggccttgcccgcaacgagccagccttcactcgttgctcaatcgaaacaaccgacaacgccaagtatcggtacatggtcttcaaccactacttcgtggcccgcgttatcggcgagccattgaagggaatttttacggtgggcgagacggacactgcccgtcagaagaagattcaggaggtcgaaacccaggtacaagcgctggagggggaggttgcagacgcccgacaacgaagccaggcgctggaagggcagatcaccaacgagttgacccgagccagaaacgagatctggaaggcgtatgagcgtggaaaggacacggcgcttgcggatttgttgcgggggtatggcaacagcaaagataggttcttccaagacctgcgcaccttcgcatcgccggaaggtggtcagctggacagtctcgatcggctggaaaagcgttgggctgacgtatcaggaaccgagaacgaacgcttccgtgtgagcctggacaccgatggattggccgccattgaggcagatcccctttgggaagaagccatcgaggtgtccaccaccagccgactggccgccttggtggcccaactgggcaacgccgattgggtggcgcgtggccagcagtacctgcaccaagaccagtgcccattctgtcagcaggggttgccgcgcgattttcgcgatgagctggcgcgtctgcttgaaggcgagcgcaaggccaaggtcgacaagatcgcctctctggttcaggcctaccaagcgaagatccaggcgctggaaggtcgggctcagaccattttagccgaccccgacgctgcagaggctggggtggatctggcgtgggcggaagtgcgcgggaagctgcacgacaccctcacgcgaatgcgagctaaggagacggagcccagcgccatcatcgatattgagccaacgaatgctcaagccctgcaggacgctttgggccggctcaatgttttcattgatgacttcaacgcacggatcagggatcgcaaaggtgagcgcgagcgtatccgggtcatgttctaccaggtgctgcacgcggacaggatcgaagcctatgcgcgccacgatgcgctgatggtgcccttgcgcgacgccaaggcgcaagccgatgccgacgctggcaccaagacgcaggaacggaacgtgctcagccaggagttgcgcgagctgcggcggcaacagaagggcgtggacgcgtccattgatgccatgaacgagcgcttgaagagcctggggattacggagttcagcattcaacccaaggagggggaggagcgtttgtactgtctccatcgtcctggcttacctgactgcagcccgcaatctctcagtgagggcgagaagaccttgatcgctttcctctacttcatggaggcgctgaaaggttcccacgacgaggaagagtacatcgatcccaagaagaccatcgcggtgatcgacgatccaatctccagcttgtcgcagaactacgtgtacgacatcgccacgatgatcaaacgcgaactatctgatccggagaaccggcctcaacgggtcaagcaggtcattgtgctgacccacaacctgtatttctttcatgagctgatccgtcagcacaccaagaacctgggaaaggcgcacaacaagtgcgggctgctgcgggtggtcaagaaccagtactcggaagtgaccgacctcaatccggcgctactcatgaatgactacgatgtttggtggcaattgttgaaggacgcacgggccggaaaggtccccactcaggtcgtacccaacgccatgcgcaatatcctggagcagttctttacgtttaccactggatcatccgagttcccggaagccgtcaagaggctggccgacgaggacacttccagcaagtatgtcgctcttgaccggttcgttgaccggggctcgcaccgggacgggatcaatggtccgcccatcgactggagcgagtacgacgtgccttatctgctgagcaagttcagagcaatgttcgcggccctgaaccaggaacagcactaccgcatgaaaatgggagtggacgccaccgagtcccaggttcaacatgcttga

SEQ ID NO: 529530 - DNA, 333 bp, Stenotrophomonas maltophilia
atggctgttcttgaactggcgatgctctcgccaatggcgaagctttgcctgcaatccactatccggcacggcgggttggtggttggcgctcgcggctacaccggccgtgacgccgaggccgaggccgaggccggcgaagcattcaccgctgcgcccgtgtggcagttgatggccttgggccttgtgcgctgcgcccccggcaatgaccgcctgctggaagcgactgatcgcggtatcgagttgaacgactgcggcgtggtcgaaatcaagacccggtccgaagggctgggcctgatcggtgccgagtcgaaccaaggcgaggccgccccatga

SEQ ID NO: 529531 - DNA, 363 bp, Stenotrophomonas maltophilia
atgaacaacaaagtgcagctgcacgattgggacgtcaccgaacacctgcgtgacgaacaggacatcgccttcttcatcgaagcggctctggaagaagcacccgacgatgcggcgttcatcgcatccgtcctgggcatcgttgcaaaggctcgcaacattgcggacctggcacgcaccactggcattgcccgcgaaacgctctacaagatgctgcgcggcgagggcaacccgaccatgggcaacctcagtaagttggccaactcgctgggcttccgcctgagcctggtaccgatcgacagcgatggcaagccggtcaagcgcaagccgaagccccggaagacggccgcgaagaaggtggcttga

SEQ ID NO: 529532 - DNA, 291 bp, Stenotrophomonas maltophilia
atggcgacgattaagaccaccaccgagttcaacgaatggttcaagggactgcgcgaccggcagggccggcagcgcatcgcagtccgtatcgaacggctcgcacagggcaaccccggccagcaccgcatgctgactggcggtgtcgccgaactgaagatcgattttggccccggctaccgcgtgtactacaccgagcgcgccggcatcacttacatcctgctgtgcggtggcgataaagacagccagccccgcgacatagagcaggctcgaaagctggccggtcaactctga

SEQ ID NO: 529533 - DNA, 240 bp, Stenotrophomonas maltophilia
atgtcccacgacacccaagttgcgcccgctcacgccgcgcgccaactcgcacacttcttcggccagatcgccgacaccaccgaatggaaccacgcctgctggcagggtctctttgcgcgcctgctcggcgctgggaagacgccggcagagttgacgctgggcgaaatccagaccgccatcgatcaggtagtgacccggtgggcagattgccagggcaccggcccgagggcgctgtcatga

SEQ ID NO: 529534 - DNA, 408 bp, Stenotrophomonas maltophilia
atgtatcagcaaactgagtcacccccagccgccgcatgttcgcagggggccgacaccggacccgccgcgcaggctaacacgcggccggaactcaccccgggagccgacaacaaggctgtgctgcagttcaccatcagccccgatgagatcgtcgtgaccgcgattctcgccatggggccgacgcgctgcatcgagcagcgctggacgcgccggacccgcagcagctttctgcttgctgcagggccggtactgtgggagatggagaaggacgccataggtcacgacctggccgacttcctcgaccgcgccggcgtgcccctggccgtcgccaacatgctgccgcggcctgccagtaccgccgcagccgcggctatcgctgcagcagcgctggaggtggcgaatgtctga

SEQ ID NO: 529535 - DNA, 1800 bp, Stenotrophomonas maltophilia
atggccgcgcgcatctatgaccgcccggacctggaccaggacgtctaccagccggcgctctacgtcaacggcaggttcgcccgagccaagccctcgcaggcctacgagggccgcctgcagatccgcaacagcattggcggctgcagcgtgctgcagatcggtggcgacaagctgcccgacggcacacagcttcgggtcgaccagaccactaaagaggtggtggtggcctggccggcctatcagaccgcgcaggcgccgatcgccaatcctgatttcgagcaaggcaagacgggttgggaactggggccgggctggaacatcaccaccgagaacccgccttccggccagtggtcggcgggctactggggcaactggggcacttcccggatctcgaacgctgcccgctacacggtccagcccggccagatcaccaccgcgaagtgcgacgtgcggcagggtgcgtcatcggagggcaacgccggtggctcggtaatgctcgagtaccgcaacgccgccggcgaagtgatccacaccgtcgaaggcaaccaggtcatgtcggccagcaagaaccgcgtgtacccgtcgtcggtgttcggtgctgcgccgcccggggctgcgaccatcaacgtggcaggcaacggcatccggtaccgcgagaacaagattctctttgtcgacaacttcgaatgggatcacacggtcccatcggcggggatcaacttcgaaacggtcctgaacgtcgttctacgggtcaacgactccacaggccgttccttcgtgtggagtgggccgatcactgtcgcgttgaggccgttggtctacaggctgttcatcaagctctatgcccccatcctgctatccatggggtacaaccacgcagccaacacagtgacccgattgggcagctcagatcatcctggccccggcaatgtgtaccgaatcggcgcaacactcgatgcaacgctggtggccgtcacctggacggccgatccaggcatcaggctctgccctgtgtcgccacaaggggtcatcggagatccactgccgattcttaccccagctctgcctgatgctggccgttgcgtagaattctcaccatctggggccgctatcctgataggccatagcggttcaccatacattcgcgcccatcgtgtgagccaacttggtttcggtgccgcctacgcgccgccgagcagtctgccacctgggcccgtcatcagtatggcgttcaaccccaagggcgacattgtctacaccctctctggcacatacccgttcttcgcggtctatcggtggagcgatgaaacaggtttcggtgagcgcctcccggccgctgtacctttgccggcttccggcccgtactcgcttgccatcaacgaatcgggcagtcacctggcggttctggcgtccacgcctgcgtgccatatctacaagatcggggtgaatggcatggaggaacggatagctgccattgggtccaatggcgctacttcgggcaagctcgcattctcagatgcggctggggcagtggcatggggcacgtcctccggtgacgacctgttccaagcattcctatgggatccaatccaaggggtgggtcaggccctcccagctccgcctggtctgccgtatcgagtcatcaatgcccagttctccaaggacggtatggttctctatgtaggtgtcacgaccaaccgcggtctgctgacctatgaatggtcgaagggggtcggaaccaccagagggcctgtggactacggtggaaccgcgtgcggcgatatcgtggtgatcgactga

SEQ ID NO: 529536 - DNA, 183 bp, Stenotrophomonas maltophilia
atgaccgctactgccaccaaaaccgtttcgcgcgacaacgaagaccagatcatgcttgatctcgccgagttcatcgcaaagagcgcgcaccccgaagatccacgacttgaagtggcagacgccatcgcgcgctacctgaagctggattggccgtcggcactggagaggggcactgatggctga

SEQ ID NO: 529537 - DNA, 858 bp, Stenotrophomonas maltophilia
gtgaaaaaatgggatttggacgggggtggggtcgcattcagtgatgcggtgaattatcttgaggccatggggcagcggctattttccgaggatctggacgagactgcattggttcttcgtgggctctacgaagatcgaacgttcttggtcaactatttggcggctcagttgcgaagtgagctggatgtgggtaacgagtactcatcgcaagtgtttgttctaaagaagtcaaaattcttcactctccgagctgtgctgtgggagccgccgcgcggagttgcgggcgaagagatgttcctctacgagatgccgcatgaccatgatttttcattctttaccttggggtactttggccctggttatgaaactgaagtgcggtcgtatgatcaaggttcagtagttggtcttgtgggtgaaaatgtctatccactgcagggggagcgttttacgcttaaggagcggagggtggttctatatgagggtggtagggatatacataatcaatatcctcctgaggcgctatcaataagctttaacgtaattcaggatatctcggctttcggcataaagcggcgccaatatgaatttgacgaggaattttcggaaattaagagggtcttgaatgtgaatcccattcctctgtttgtcagggcggcttgtgcggtgggtggtgaggcggtgaattatgttgaggaggtggcgagatttgcacccacagagtacgcaagggccgcagcgctgaaagcgctggtggatctggatgcgagatacgtcgatttggcattgcgtgacagtagttcatatgtacgccgtgaagtgctggagtctccatcctctccgaatggccctttgttctag

SEQ ID NO: 529538 - DNA, 819 bp, Stenotrophomonas maltophilia
atgaaaggcattgagcgcatcaagagtggtgaaattgagaactatcgtcagtggatgacgagcttttacaaatctggcgcgtatcgagagtgtatcgctctgtgggttcgacatttcgttcgtggcgacggattgccggtaaggggtggcgctggagatgagaacaccgccactgtgtttgaggacgatttcgttgtcgtccatcttagatatctggccaattcgattcgaaagaaatcactgaatggtactgtttcaacatctccagtatcgtctctcatgctgccggtggctggagggtcgctcgattttatcagatggactgttgacggcgattttgacagggataccttcaccagggatgctgctctcgttcccagcgaggaagggacatgcgggattggcgatattttggaaatatttcgagggttgcattgcttgcgtcttgaagcaaaccgcggcggggtattcgttctacaggtgtcaaataggagttcggaccgccttgtgtggacttttgacagggcaagcggaagggcgaagttcgcttcgtctgcttctattgccgctagcagagaccagcttgtatgtcgcgcgctggcggagatgggcagtgccgatttcacctctttgatctgcgaagttgcgcgaggtcatggatttcacttcgttcggatggaggcattgcggtctctattcattcttgggtatccagacttgttgcgcctgctgcgggaacgagcgttgtttgatcctcatccgcatgtgagggctgcgtgtgagaaaaatatttatgcaatacaggagggggagttgtga

SEQ ID NO: 529539 - DNA, 453 bp, Stenotrophomonas maltophilia
atgtccttcaaggatccgctcacgcagtgctataaccggcgttacctgcaccggctggatgaactgattgacgagcgctgggcctgcgtgatgttcgatctggaccatttcaagcacatcaacgacacccagggccaccgccgtggcgacgccgtgctggtcgagttcgccaccttcctgcgctcgccgctgggcaaggacgagaccgtggtacggctgggtggcgacgagttcatggtagtgctggtcgcgccagcgaatggccgcctgagcgaactcgagcactggtaccaggaccacgccgcgctttcgcccagcgcgttctcgatgggtgcggccatcaacacggccggtgagcccgtggccgacaccatccagaaggcggacagccgcctgtaccgaacccgcgcgcgcgtgcgtcgggagcgacgcgaagaccctgccgcgcgttga

SEQ ID NO: 529540 - DNA, 798 bp, Stenotrophomonas maltophilia
atggcgccagcggtggtctttctgggggtgtatgcctatgagcggggccgctaccacttcctcaagatgccttcagaattcatcgacctctcagcaaatcgattgctggcgggaggcgccgtaatcggtgcgcttgtgatcgcgctacttgggattggcatgtgggcatgggaaagcgcacgagttaaagaatcctggcgcgaattccttgctatgttgctcgttgccatcattttcgttggattgccgctagggctttggttaagcgaattgccgtcgctagaccactttcgggctcaaggcggagttcctgccaaagactgggcaacgctggtaacggggctggtaatcattgccagggtgattctgacctttctggcccacttgcctccatcgggccacgcggctgtctctgctgcaggtggcgcagtgaagaagggcgctgggcagagaatgactcgttaccaattggattcgaagttgtccgttgtgcgccagtttaattgggtcgtgatgaccgcaggagccgtcttggccatctggactgcctcggtcttcgctgggcttgggttcgccgtagagagagcaacttcgaatcgcctctgctatcaaaataagcttgtagcggatattcacggtgaatttctgcttgttaagccctttgacccggagagcggccaactgtctgacggtgtaagcatttttgagctgcaaggagcgagcctcactgcatgtgcgcctagactccaaggtgggaaaggtctcagtttttggggggatttgtggccagcgctttaa

SEQ ID NO: 529541 - DNA, 462 bp, Stenotrophomonas maltophilia
atgaaatcagcaaccccaagcgatttacttggcccagtgtacagctggatgagtgccgctcgcatcgacaagaattcaccagtgatggttgaagccgtgatgcagggcctcgggcgtattgagctgcctcctaggaactcagtcgtgggcgcgctggaaacactggtccagaccggtgtgctggatcgtcatgggacaaactacaaactaacgggggagggcgaattgatcgtctacccggggacgtcgcaggagaacatcgatagcgtcgcggccgacctgatgaactacatgtatcagaacgatccggaacgagtcttcagcttgcaggcctatcgcgctcagatccgccagcgcctcaacccaagggaagaagcggtcgtgaatcaagcagtcgagaagcttgttgaggacagtttctggacaccagcgggccgagattcctacgtcttggccgagtag

SEQ ID NO: 529542 - DNA, 276 bp, Stenotrophomonas maltophilia
atgggcgcagctgaaaagctggtaggtcagccgataatcggagcggtgatctttgaagggatcaccgtcaccgacggcgaaggccgcccagcccaactcgctgtgatcgacggtcgtgggcgggtcttggctgtcggtccggaagttgcaaaggcggcctggtcggcatcggtggaggcgtatcgcaatcacctacgtgggcacggccacctgcgcgcgattaaacacccaggtgcatcacaagtgatgcgaggagactactcggccaagacgtag

SEQ ID NO: 529543 - DNA, 318 bp, Stenotrophomonas maltophilia
atgacccaggaacatatcagccacccggaagggttgccgaactgcgccgccggccaccgcgcgcgccacatccacgacaagcgttgcgcctccgccggcggtggccacctggtcgagtgcgcctgcaggtcgaccagcaagcatgcagatcccgacaaggctatcgaggcatgggtgcggctcaaccggcgggctcgcagcgcgcgccagacagcagcgactgcggcggccgacaacgtgctgcagttcaagctcggtcttgcggaagagttaccgcagcgacagcgcgcggcaggaggcggccatgggcgcagctga

SEQ ID NO: 529544 - DNA, 228 bp, Stenotrophomonas maltophilia
atgactactcgtggcttccatcgaaccctgcgcggtttccacgatggctaccatttcgtgctgaccatcaccagcagcgaccacgaggtgttctcgtactcggccgccgttgacggagtcggagttgacctgcggcccgagggggcgatccgcagcaagggcgacgctatgcagctcggcatggccgcggttgagcgccacgtggccagcttccagaccaagcgttga

SEQ ID NO: 529545 - DNA, 882 bp, Stenotrophomonas maltophilia
atgagcaacgacaatgaaaagctgttggcacctgaccttgtgaaagggagcggcagggaatcaggacatcaacttcaggaagttcgagcggctccacgtcgcagacttcttcgcggatcagcggtatccaagacggtcaagtgccgcgaaaaacgcaaattactgcctttcgctcgccggccttgggtgaacagaccggctgctctcccactccagcttctcgcgcaaagctctagagcgcccgtcttgaacatagttctcaatctcagcagagaagtcctgcggctcacttttgatccacgcatgaagcacctgcctgagcttaagaatttgatccgcaatcagtccaaacactctcgcctcgtcaacgaaggtgtagaccttatgcacatccatctgcggcaggcgtggccttctcatctgtgcgtagaagaggctcgcttcacattgagcaacagcgtcggtgattactcggggaaggctcggagtgaacgcaacgaaatttgcaactggctgagaatcaagaacctccaacagctcgcaaatctccttgaattcccaaggagtaagctcttcggccccctcctttggaatgcgcattgcagttcgaaggtggacctcctggatcgacagcttgtcgaccaagatttgggcgagcacccgggcctgcctcctcctgccaatgcgctccattgccattggtgtaacaccaacaaacagcgcgacgatggcagcggccgcagttgcgacagcagagatcgcattccagttccagctagctgccctaccgacttccaccaccacgctcattgcctgcatcctttgttggcttccgagcattctgccatgcaggcgcgacaggcggagaccgtccatggctga

SEQ ID NO: 529546 - DNA, 195 bp, Stenotrophomonas maltophilia
atggacattttcgatgacgacccagcgcgcgaggccatcgcctggcgcgcgcaggcggaagagtcgcttaagcacttccagtttcccgaatcgatccgcctggaacggtacgcctactacctcagcatagccgaagcatttgaagccatggcgcgcggagcgtgctcaaccaacaacaaggacatgccggcatga

SEQ ID NO: 529547 - DNA, 714 bp, Stenotrophomonas maltophilia
atgagcgccaaggtggacaaccaatccagggcgctcgcgcgcttccgtgtggacaccgcccagcaccagatggaggtgctgcaggacaacgggctgcaccggcacctgaagttcagcaatgccgggagcggtgtgtaccgcttcgacatagtcacctggccgggatacctgaccatcagcggcgacatgggcacgtcagtgttcaggcgcatgcccgacatgctggagttcttccgcaatgaccagcgcaaagacgatgctccggacgttctccgcatcaatcccggctactgggcagagaagtgcgtggccaacgatggcgaggggaagaagttcgatgaaaacctgttcgagcaggtcgtacgggagcacttcgaccactacatggccgagcaggacgacgaggcggtgggcttcgctgcggcgcgtgacgcgctctgggatcacctgaaagctgaggtggtggacggagccgatgacacagccagtgctctggagcgctgggccggtttcagcgtcggcgaggacaacaccagctactgcaccgacatggtgaatcccgataggtacgcgggctggttcgaggatttccgggttcaggacgcctgggaatggtccacctccgtcgaggattacaccttccacttctactggcgcctctacgcgattgcctacgccgtccgggcgtatgacagccggagcgtgacggcatga

SEQ ID NO: 529548 - DNA, 207 bp, Stenotrophomonas maltophilia
atggtgaacgacatgaacgctaccgatcggttgcacgccctgcaggcgcggctgcaggaaagcggagtcgtggacgtaaagttcttcttcagcaagaacgacgcctctccgaccaaggtcgtgaacgatgtcgtcaacgtattggacgcgatgttgaacggtcgtactcttccgttcaatggcgttggcgactccgttcgcgcgtaa

SEQ ID NO: 529549 - DNA, 681 bp, Stenotrophomonas maltophilia
atgggacgaatcgtttttcaggaagctgacatcactgcatgtctcgagcacgtgctcgatatcatcgagcagtacgaactctacgtgctccacgggaaaggcgacgtccgatccgtagatgatctgctttggatctgcacacagtacctcaacaagaagatcgtgatcgagtacgttgacatccctgtggatggcagctcgatcaaagcgacgttctttgccaatgctgacggcagctatcgtatcggccttctgtctggcatgtcggacgaggaggagcgatttgtcctctgcaaggagcttttccatgtgatcttcgacgaggagagtcgtcggagcctggatctggcagcccacttggaggaatacacctccaacattgcgttggacgaaggtgagccgaattgccccgctgcgtgggagactctggccgagatcgctgcaactgagttcctctttccctacgagcgtcgagtgcaatcagttgcaaacggcagtgccgctgactatggcaagttggcgactcgcttccagattcctcgtctccacgttgagatcgcctgtggcgtcggcaacctggcgtacatcggcgcgcgcttggacgctatcatgaagcgtcgcaacggcacgccgccggacgcgtcgaacgacgatgaccctgagttggacgaagttgtctga

SEQ ID NO: 529550 - DNA, 204 bp, Stenotrophomonas maltophilia
atgaagaagacgaaggccatggcgccgaggatcaacccccagcgtgtgcctcgcgagcggcgcatggaccacaacaccgtttcccgacccaagcgggcgaaggcaggaaccgccttccgtggcccagccgagacggtggaggagttcaaggcacgtggaggccaggtgcagcacctcccggccagctgggaccgcgcggcgtga

SEQ ID NO: 529551 - DNA, 192 bp, Stenotrophomonas maltophilia
atgttctttgagtatcaagggagtttcttcaatccgcagtacgcggtaaaggttgggggcatcggagctatggggcacgggagcttcatgttcactgttgtgttcgtcgatattggcaagcagaacttcgtctaccccagccatgctgaagctgaagcggcacttcgtcgctttgttaacgggaagtcctga

SEQ ID NO: 529552 - DNA, 162 bp, Stenotrophomonas maltophilia
atgttctttcccagcatgcgcctgaacttcacgactgatttcactgcggtttccgacatcggaagtactgcctatcagttgattattgggcgaaccttcctgcagcacggcctgctgatcatggactaccccaacagaatctttgagtggcggcttccttag

SEQ ID NO: 529553 - DNA, 1413 bp, Stenotrophomonas maltophilia
atggcggtggcactctcccaagcgttcgacgcgctgcgtcaaggggagccgatggctgacgacttgttgaaaaaggcgctaggcgcactcgttgacgggaggatcaggccgtgggaagtcgagatcaacggccaccgggtgaatgtgcccgaccacccggacccggataccaactaccggcggatgaccgagacaatggcgcggctggaagcgctgccgcctagggccgctgcggccgacccgataaagcctctgcgcgccgtgctgacgctcaaagaggcggccgagaaacacctggccgacctacgggccgtcggtcgcaagccgcgcacggtcatggacagtgaacactccctgcgattgatggcgggcctactcggcgaggataagcccgtggccgaaatcgacacggatgacatccgtgctgtgcgagacgggattgcccggtggccctccaacgcctcgaagcggaaagagttcagggggttgtcggtgaagggcgtcattctgctagcggcggcgatggaggagccggggccggaagcgcggacgatgaagaaacacaaacagcgcctatcgaagtttttcaacgacctgcgcaaacaggacaagatcgaccgcaatccacttcacggcgtcgatttcgcgccggatggcgataccgaagagagcggcgggcgtccgttcactgccgacgagttgcgcacgattttcgagccaatacggttcaagtcatgggccagcaagtacccgcaccgctggttcggccccatgctgggcctgtattccggcgcacgcgtgaacgaagtggcgcaacttctggcgaaggatatcgagcaggtcgagggcgtctggggtttccatgtgcgcgcagtcgccgccgagaaccagagcataaagaaccccaaaaccaagcgatttgttccaatcgcacgggcggtactggacgccggtttgctggactacatcgaggatttgaaggcgtcaggtcatcgccgcctgtttccaaatcttccgttcaagacggatggcggctatggcgcggccctgtccaagcagttctccgcctacatcaagaacaaatgcggcattgaggagcggggcttggggttccatgcgttccgccactatgttgccagcgagttggcgcggcttgacgccgatctggtcgagattgcgcccctgacgggccacgccttgcccgaaagcattctggcgaagttctacattcacaagcacctcgccgacaaggtgaagaccgttgcgaaactggctccgccggtgaagttgccgggctacgagcgcgaccagttccgccgcgcattccgggccgcaccagtggagcaaccaccctccaaggcaacgaagaaagcggccaagaaggtgggtgcgaagaaggcagccacagagtag

SEQ ID NO: 529554 - DNA, 747 bp, Stenotrophomonas maltophilia
atggctccgcacgccgtggggcataagtcctacaccttcgacttcctcgccactgtgtccgagcagttggtgaaggacttggaggcgctgccggtgtcgccgctggacgcgggaaccttggcggcgttggttcagtaccagaacgccaacaacgccaaacaaggcgtttacctgctccacctgggcggcgttcctgtttatctaggaaaggcggacgacgtagctgaccggctgggccagcacctgcgaaaaatgagcggacgcaagaacctgattcttgccgatgtgggctacaaggcgctattactcgacaagagcatgagcacggcggcgaatgagtcagtgctaatcgctatcttccgccagtcccatgcggcgatgtggaatggcaagggattcggcccgaaagatcccggccaagaacgcgacaccacgcgcccgagtttcttcgaccgaacttatcccattgtcgacgcttggccggtggacttcccagataatgcgacaacagccgggcatttgctggacacgatcaagcaagcggttccctacactttccgattcgatctgggaggcgcaggcggcaccgtcgtcgatctaacaggcgtcccgcgcaacgcaaaagcgctactcggcgcaacggtcaaagcactcggcaccgggtggaaaggtgccgtgctggcttacggcatggttctttatcgaactgataagcaataccgcttcggcgaggaacttctgccttag

SEQ ID NO: 529555 - DNA, 1218 bp, Stenotrophomonas maltophilia
gtgatccacccggaacctgcgcgcgtgcccttcaagtccatcgaactgttcactggtgccggcgggctggctctggccacccatggcgcagggtttcaccatgccggtctgttcgagtggaaccgagacgcttgcgagaccttgcggcacaacgccgcccggaaggccatcccgaggatggccaactggcaaagccgggtacatgagggcgacgtgtccggcgttgatttctccacattcgagggcgttgacctcgtagccggcggccctccttgccagccgttctcacttggcgggaaacatggcggaatggaagaccgccgcgacatgatccctcagttcattcgcgcggtacgtgaggcgcagccgcgtgcgttcatcatggagaacgtccgcggcctcactcggcaatcgttcgcgacctacctgaacttttcggttcttcaacttacgtacccagagatcacacgcaagcgcggcgagtgctgggaaaagcacttagcccgcctccaacaacaccacacttccagcccccgccgctcgggcctctcctacaacgtggttcagcaggttctcaatgccgccgactacggtgtgccgcagtgccgtgagcgcatttttctggttgggttccgctgcgatattgacgcgcactggtcgttccctgagccgacacactcgcaagaatcgctccttcatgagcagtggatttcaggcgactactggcgccgtgtcggtgccaagcaaccaaccgagcggccggggatggttgtacgtcgttggaagtcgctacaagaacgccctgcgactgcgccatggcgcacgattcgggaggctgtggccggcttgccgaagccatccaagagcgacgccccgctgggcgagattcacaaccaccggctgcaaccgggcgcacgtccctatcccggccacactggctctccattcgattctccctcgaagacgttgaaggccggcgcccatggcgtgccgggcggggagaacatgattgccttcccggatggctcctaccgctacctgaccattcgcgaggctgcgcgcgtccagaccttcccggacgcttggcgattcgagggcgcatggtcggaggctatgcggcaacttggcaacgccgttccggtcgatttggctgcggcagttgccaagagcgtagccgcgacgctcaaacaacatggctccgcacgccgtggggcataa

SEQ ID NO: 529556 - DNA, 804 bp, Stenotrophomonas maltophilia
atgaccatcgcccgcattccgttcgcgttcgcacgctccgcgctgttctcggtttcccccgtcctccgccagcattccggccctgtgatggctgcgcaggattaccggctaagcgtggaatacaccggccccaccttggagcaacaccacgccaccgcatggcaggcggctactgccttggcctacaaggcgaacggcggccaagcctgtgatttgcgactggtggacatgctccgcgccatgggcgcgcagtccgtccagacgcacgctaagcgccgcctgttgcgtgtccttgccgaactgaccgccggccacctaaccatcaagacgccccgccacgactacggcggcccattgctggccttgcgcgacattggcggcgggcgtatcgcgttccactggccgcgcggattgctggaactgctggaagacgaaaccgtccacttgccactgaatgggcgcgcgaccctgcgccgctatccgctagcgtcgtggcttcatgactacgccgccacccatcgcaaggtgtacgaaatcgaactggacaccctgcgcggcctgtgcggctccacgctggcccggccgcagttcaaggcccgcctagtgccagcactggaaaaggtcgcgaaggcgtcgagtttcctcactggccacccgctggccggggacacgctcacgctccacaagcaggcgacgcgggtcgtcctgctggatcgcgccgcccgcgcgtccaagtcggcgcagtcgcgccacctggacgccgcacaacgagcggcctcggcccgtgcccgtgtggcgttgtag

SEQ ID NO: 529557 - DNA, 249 bp, Stenotrophomonas maltophilia
atgactgacgaaaccaccaagacgacgcaggcgcttttacgcgcactcatgaaggaaatggaaaagacgctaaccaagcaggagccggcaccgccaccggagccgggtacgcgcaagacgcgcgtgaacgccaaggagttcaacaagacgcaggaaagtgagtcatggtgggacgacggcggcgatgaggacgagtttatgggcctgcgtccgcgccccaagccacgcggcaagcgtcgcctgcgttga

SEQ ID NO: 529558 - DNA, 1233 bp, Stenotrophomonas maltophilia
atggaaagcaacagcacgccagccacgacgacgacacgccccggccccggcgatgggctgcccgctggcctgcgcgcgcgacacgcggacaggctggcgcaggcccacgccctcgcctgcgccgaagggctgcggctgcgcgtgccggccggggtggccatggatcgcatgacgcaaaccgtgctggacgaggcggcgaccagcggggccaacccctcgcctgccacactggccgcctaccggcgcgaccatacccggctatgggcggcaggggctacgccgctggacgtggccagcacgcgcgcccatttcgaccgcctgcgttcggcatcccgtttcatcgaggcgcaggaaatcgcccggctgcgttccctggccgaagcggcgcgaaaggccaagaaaccagacgccatgcgcgaatacacccggcaggcattcgagcgggcgatggtcttacgcgccctgtacctcgacgccgaccgcccgacatgggcgcacaaggccgcagcgctgcgggccagtgggcaacgcccggccagcaagtccaagcgcagggccgggcggcacgcgccgaccccggatcagttacttgtagcgctggcccgccagccgaagcgctacgcgcgggtggagttactggcctgcgtgttcgcggtgttcggcgtgcgccctgctgaactggtgcgcggtgtggtgctggacaccacaccgaacggtctacgcctcgccgtggctggcgcgaaggttgacgccgtgcgcggccagccggtgcgcgtgctggaagtggagacgacacggcgcggcctgtcggcgctggcggtgtcgctgctgcgtgcgcatgttgccgaaaccgggggcgacttgtcagccacgcctgcggatatcgtcgcggtgcgccgcgccatgcgggaagtccagccggggctatcgccctacgcctaccgccacgcgcgggccagcgacgcaaaagcggcgcagggccgcgcaggcgcggcggcgtggctgggccactcgaacgaccggacgcaatcgcactatggccacgcgcgaagcgctcgcggcgcggtggcgatcacatcggccacagcctcgcgcacggtgcggcaatcgaagactctgccggcaacactagcgcaacggttcgctgagatggttacacggctggccgaacgcctacctgagaacaggcccgagcctgcgcccgcgccacgccgtccgcgtccgcgccggtaa

SEQ ID NO: 529559 - DNA, 228 bp, Stenotrophomonas maltophilia
atgaacagcagcgaactcacgcccattgacgccgaccgcgtgcaggtcggcgactgtgtcattaccttgtcctcgcgtgaggtcgaggttgaaggcgcgcgccgtccgcggcggctgacgccgaaagcgctgggcgtacttcgcgtgttgatgcggcagcctgggcgcgtggtcacccgtgaagagctgtttgccgaggtctggcccgagtacgttgccgaccaatga

SEQ ID NO: 529560 - DNA, 5121 bp, Stenotrophomonas maltophilia
atgaaccgtatctacagacgtgtgtggaatcgaacccgccaatgctgggttgtcgccagcgaactggcgtcgaccgcaggtaagccgcggtcaacggctgcgggcgcagtgttgcttgggcttgttcttgcggttccctctgcggaagccagcgacatcatcgcggctgatgagtgcgatgagtccatctggcaggcgctttgcctgaacgcgggggggcgcgcaggatcctcttccgcatactcgctgttctcagctacgccacgtgcgggcatcaatgcgctggaacttggctatcaagcgaaagccaatggctatggcagttcggccgtaggtccggaagcgaagtccgaaaacttctactccgctgcgttcggctggagggcgcttgccggtgcatcctacagtgttgccgcgggtgccaacgctcaggcgaccgagtccttcgccatagcgatgggcagggattcaaaggcatccgccatgagtgcagttgctattggtggtcaggccgccgccagtggacgatcatcggtcgcacttggaagttctgcagttgcctcagccgagaccgcacacgcgcttggctacctcagccaagcaacctcacagtacgcgaccgcggtgggggccgtctccaaggcattcggtgcatactcaatcgcagtgggcaaccacgcgacggccattggcgatgacgccatcgcaattggacgaagcgcaaggaccgtggacagttccgctggcatctcgcgaattgccatcggtggtggagcgtttgccgggacaggtggctacacgggagccatcgctattggcggttctgccagttcggagtacgacgggatttcagtgggctacggtgcgaaagcaacagtctccggaagcatcgcgttgggatctcattcactggccaacgaggccaattccatctctgttggcaatggttcgatcaagcggcgcatcgtgaatctggccgacgcacgactgtcgacaaccagtactgatgcggtaacgggcaagcagctcaatgccaccaacggtaatgtggccagtgctcaggccgcagccgacgctgcaagggcgacggccaatacggccaataccaatgccaatacagcgttggccaaggccaatgcggtcagcggcctggtcagccaggtctcggccagtggcaacgtgcgcctgggcggcgagaacactggcaccgtgctggatgtccgcaacaagtccaacgctgttcgcagcatcaccggcctgaaggatggggcgctttctacatccagcactgaggccgtgacgggtaagcaactcaatgcaaccaacgccaatgtcagcaaggcgcaggcagcagccgacgcaacggctgcacggctgaatgccattgcggtggcactgggcgcgggagctgtcgcggagcaggccagctacggcatcagtacggcgctgggcaacaacgccaaagcctacaacggcaagagcgtcgccatgggcgcagacgctcgcgcgacggtggatgacgcgggtaacaagatcagtggcaacgcgggtgtgtccatcggtgctggaacccgcagtggcaacggtgcggtggcacttggactggacgctgtggcaacgggtgatcgtggtattgccgtcggtcatgaggcatccggcaaaggcacgcacgcaatggcactaggcttccagagcaacgcgtcggccaaccaggccacggccgttgggcgcggggccgtagccagcagcctgtatgcctcggcactgggcaatcaggccactgccacggcgcagagcgcattggccctcggtgatcgcgccagtgcgacacatgcgggcgcggttgcgctgggcaatggctcagccacgactgcaaccaatcaggtctcggtgggcaacggctcgttgaagcgcaaggtggtgaacgtggcggacggcgccttgagtacgtccagcagtgaagcggtgaccggcaagcagctgcatgccaccaacactagcgtggctgctgtgaaggcgaccgcagacggtgcgcaggcgcggctggcggtactggatggcctggtggggcaggtgtcggcaaccggcaacatgcgcctgggcgccgacaacaccggcaccgtcatcgacgtggctaacaagaccggggccaagcgcaagctgcagaatctggccaatggcgtgctcagtacgtccagcacggatgcagtgaccgggcagcagctcaatgccaccaatagcgaagtgaccagcgtgcgcacggcggcaaccgcggcgaagacggcggccgacgctgcccgtgacgtagccgacggcgctgttctgaaggctgatgccttgggcggactggtgggccaggtgtctgccagtggcaacgtgcgcctgggtgcggagaacactgggactatcgtggatgttgcgaacaagagcggtggcaagcggcgcatctacaacatcgccaacggcacgctgagtacgggcagcacggatgcggtgaccggacagcagctgtttgcgaccaatgccacggtggagacacagcgacaggatttggctgggcatgcgcagcagctggcggatcaggatgggcgtatcaccgacaaccgggtcgagttggatacgctgcgtgcggacttcgataacttcgatccggatctggatggtgtggtgaagttcagtgctgatcgtcttctggtggatatggagggtgcccgcgtatccggtgtggcggcgggtgatatcagctcttcggccagtacggatgcggtgaatggcgggcagctgtttgcgaccaactctcggataggagcgcttgagttgaaggatcgcttggttgacttcggcaaggagcttggagctatggaggcagaatccgggctgtttggcgtcgcccttggaaatggtgcgcaggcgtcgctccgtacagaggggggaactgcagttggcagctactccactgcattgggcaaaaattcggttgcattaggtcgtggctcgctagtcgaggaaattgctgaagcgggtttcgcgttgggtgctggcgcttcagttgctcaggaccacggcgtcgccttggggtcatactcagaggtgagggctggtgcgtttaactcggttgcactaggtgcaaattcgatcgccgaggaggagcgagtggtatccatagggagctcaaccctgaagcgcaggcttacgaatgttgcgcggggtacctccggtgacaacgccgcaaccatcgcgcagttgagcgagtctgtctctgccctcggtggaggtgccggtgtcgattcaaatggtagcgttgtagcccctgtctatggcatgcagggcggaactcagaataacgtcggggacgctttggccgtcctggacggcgcggtggtcagagctgatggccgcgtagagaacatcgaaagccagttgcgtgcgacgttccaacaatcatcctcgaccggggtggatggagttggtcagctgaatctggccggtgcgcaaggcatggttctttcgaatctggccgatggacgcattgctgcaggcagccgtgatgcggtgactggcaatcagctgcatgccacggagcagaagatcgagcgcaacagacgcgaccttgatgcaatgcagcgcgattggagctcggatcagaagaatcttctgactgagactagcgatggaaacctcatcgatttcggcggcgcacgcctgaccggtgttgccgatgcgcacctctccgctgatagttcggatgtggtgcgtgggagccagctttacagcacgaacctacgactgagctccattgaagaaatgggcagcaacttcgcatttggctggatccctgaggattggcagtatccagctcaagcaggcccagctgggttggcgattggcaagaacgcaaaggcatcattgcattcagaaggcggcgtggctgtaggtgcatgggcaacggcccaaggaaaaaattcggtggcattggggcgcgcgtcctacgtccatgagcaagcagaagatggcttcgctgtgggtggcaggacccaagtggctgctagagggggcatcgctctcggtgcagggagtgaggtccgttctaatgccagcaattcggttgccatcggctatcaatctatcgccgatgatgcagacactgtgtccttcggcaatgactggctgaagcgccgtctcacgggcgtagccaacggccgcaacgccaacgacgcagccaccatcggccagctccgcggcgccctgtccaccctcggcggcaacatcgacgccaacggcaacgtcaccacccccggcttcaccgtccagggccagcaccagaacaccgtcaacgacgctctcaccacgctggactccgccgtagtcaccaccggctcccgcatggaccgcgtcgaaacccagctccgctcggtcttccaggaaaccccgtccacccgcagcgacggcaccgcccagctcaccctggcgggcgccaacggcatggtcatctccaacgtggccaacggcctgatcgcggccggcagccgcgaggcggtcaacggtggccagctacacgccgtgcagcagcagctcaatggccgcatggatggtctggagcagcgcgtagatggccagccgcagtcgcgtgcgctggctacggcttcggccgcgcccaccgaacaggtcacgccgacgccggaagccagcgattcgccgcaggtggcctcggcaggcgagggcacttcgcctacgccgcagccgaagtcgaagcaggacgacacgccgtcgcccacgccgcaggtcgataccgctgaactggagaagatgctggcccgcgccaacgagtacaccgatggcgccatcagcaacttcgagcgtcgcctggacaagatggacaaacgcttcaaccgcatggccgcgatgagcagtgcgcagacggccatggccatgaacaccgccggcctggccacctacaaccgtctcggcgcgggcgtgggctatgccgagggtgagtccgccatggcggtgggctaccagcgcgtgctcaacgaaaagggctcggccaccttcagcctcaatggtgcgttcaccaacagcggtgaacgcagcatgggcgtgggtgtgggcatcggctggtaa

SEQ ID NO: 529561 - DNA, 324 bp, Stenotrophomonas maltophilia
atgaacaagatccccgttttgatcggcagcaccctgctcgccctggtcgtcgcgctgcctgttggcgcacgcccgcaggggttgctgggcggattgtcaccgcaggcaactgatgcggaatgcaggcaggccttccagcagtcgtcagccgcacgcagttgcagccttcaatacatggtggcggtgggtgcaaacctgtgcgagttcagggccgaatgcctgcgcgacgatggccggacgatttctgccacctactcgctgccgctgagttcactgccgtcctaccggaactgcaacggctggctgcagcaggcgccctgctga

SEQ ID NO: 529562 - DNA, 471 bp, Stenotrophomonas maltophilia
atgaagacttctgccctgatgcttgccctgctctgcaccgccagtcttccggcgatggcgcagtcgtcgctgacccagcgcgtgacgtccgatacgtcccgaacggaatacagcgacggctccacggcgacaagcaggcgtgacatctccgggaacgtacaccgccgctacagtgatggcagatcgtcttcgacgagacagatcgacatttcggggaacacccgcaccgagtacagcgatggcagttattcgacctcgagcaaggacagctccggcaacgtccgtacccgctacagcgacggcagcacctcgtactcgcgcaccgatatcggtggaaggacccgcaccgagtacagtgacggcagctattccacctcctataccgacataggcggccgggtccacacgacccactgcggctatggcatggccgctcgcaatccggagcgcggtgtcggcaggaagcgctga

SEQ ID NO: 529563 - DNA, 657 bp, Stenotrophomonas maltophilia
atggcggtacagctcgccccaatgttgagcggagcggccatcatcgccttcagcctggcgttggcctgcgggcaccgatgctgggactggactgctacgctggccactgcgcatgaacgcctgcgggtacgcgagatgttgatccggccactgcaaaacgacgacgcggacacgctgtgggcggcccgcttgcaggcactgcgcgagtcgcctgctgcgttcctgtccacgctggccgaagccgtcggtgataccgcacaagtgatgcggacacagctcgatgaccctcatacccgttacttcggtgcctttgaccaggcaacactggttggcttcctgcgctatgtgcgtccggtgcggttggcgcgccggcacacggcggagatccacagtgtccatgttggcgcaggccatcgtggtcagggtatcgcccgtcaactgttccttgcggcgttcgcggcggcacacgcagatggcatcgaatcgctcacgcttacggtgctggcagacaacgccgccgcacgtgcactgtacgtgtcgttgggattcatcgaatccggcatcgagccgcgtgcggtgaaacgcgatggccgctatgtggacacggtgtcgtactggatttcagtgatcagccacccaccatcgccggagccttga

SEQ ID NO: 529564 - DNA, 552 bp, Stenotrophomonas maltophilia
gtgaagtcgaagcgaaacgatcgcagaactgcccgctcagtcattcgcccgatactgctgggcgtatccctttgcctgatgtcagccggcctcgcccaaactgccttcgccggccagtgggttcaaactggccgcgtattgctggtagatacggaaggtgtggccccttacattctgtcgtggaccaacacgtgccaaggcggcgtggaagggccctctggtttctacacctacggagattgggggccggagggtctcggctcgtgcccgtctgacgcgaacacgggatgggcggcaaatatgatgggcagcgttggctactgccgacccgagcccgaaagtctcggcgggggctactcgtgcactgagtactcgcacacgtttggtggtcaaagttacaccggagcaattccggcaacatgcaacgttccagggacctacgccatcagctacatgcggcgcgcagagctcgtttacgccggcaacggcaacatgcccaacgactactacgacaggatcaacgaagtctctgccgagttctactgccagtaa

SEQ ID NO: 529565 - DNA, 834 bp, Stenotrophomonas maltophilia
atgttcttctcgcaacgaatgggcttaaccccggtgagggttgagatccagctcaatgaaatggacagggacctgagagttgcgttgtggaacgcgtatcaaccaaacgtaatcggcctaggcagaagggatgcgttcacgcacaactcgccattgatgccgtacttccgcgcgctctgggatgaaatcctgcacgagccggtggataaaattcacctggcatacgatcgggcagcagatgaaattcgggcgtatttcttcgagattgagtggcataaagtttacgaattccttgagttctcgttgacgccggtgctacacaggcatttccaagagaggttactcccaagcatcaaccttgctctcgaaagggaaatgtcaggctacaggttgatcgacaacgttttctgtcccatcacagattctcaggaaatatccaacattgaagaagcgataaatcgtgcggacacacctgccggcgcgacttcgcatctacgcgcagcgcttatcctgatgtcggatcgaatcaaacccgattatagaaattcgatcaaggagtcgatatcagccgtagaatctatagccaagcatctcaccaacaacccaaaggccagcttgggcgacgccctctcggctctcgagagaaaaggcgagatgcacagtgcacttcgtagaggtctctccgcactctacggatacacatcagacgcccaaggaattcgccatgcattgatggatgaagcgaacctgacttttgtggatgcgaagttcatgcttgtcgcatgcagcgggttcgtgaatttcatggttggaaaatcatcgctccaaggctga

SEQ ID NO: 529566 - DNA, 615 bp, Stenotrophomonas maltophilia
atgagcatcctcaacgttttgctgcgtgctgaccagctcctcgttgccgttgacaccctggcggaggacgcccagaccggggcccattcctctggcgcaaagctgctgctgatcccgcagcacaatctggtgatggctgcgcgcgggtccacccagttctttcttcgcatctatgagttggcactgcaggcgagcttcagggcagatttcaccatggagcagttgtccgccgagctggggctggtagtggaccaactgtggccgaactatgtgagggcagccgccgaggcgcgcttgccgatcgaaaagctcgggaccgaactggttttgggtgggtggtcgccgaagaatggccgaatggtggcaaccgcgtatgccaagagcgacagctccaagccaaccgtcgtgcagcccctcgatgggggcttggcttctcctggggaaccgctggccggcaggctggatagcttcgcgccagccgacgttctcgctgctggcaagctgcaggctgcatggctaaatgtgcggactggacgccaagtggctggcgggcgtctgctgatgggtttccttcagcaggggcaggcgtccatcatggatcttggggatctctga

SEQ ID NO: 529567 - DNA, 300 bp, Stenotrophomonas maltophilia
atgacactcaccctggagcaaattgctgaacgactgcgctcgtgcgaggtcgatctggaagcccatcgggcctacctcaaggcgatggagtacgcgcttggcgctgccatcgccacccacaacgatccgcgatcactggcccgagtgtgggaacttatgctggtagaagcggcggacgttcatgccggcaccgacggcccggttttcaccgctgcccttcagcagtctcttcgcatgctcaccgagcagatttcctcgatcgacccaagggctaccaatcagcgcccagtagaccagtaa

SEQ ID NO: 529568 - DNA, 435 bp, Stenotrophomonas maltophilia
atgcttaagtgttcagttgtgtttgtaagctctgctgtcgaagaagtgggtgaaagccagcttgccgacctaatggctgccggggccaggttcaacgaggcgtgcggatcgcgagcggttgtgtgcttcgatggacaccgcttctttacctaccttgagggaaccgctagttcggtagctgcgactttggtctacatcgagtcattggccatccactcagagcttgtgcagctcgctcgagggactgttcagcagctccgctttccggaagagccattgctcttcatgcgggtgaccgcctctcagcttaagtccttggtccgcgccgactggaccaacttctcacagcgcctgaaaggccggtttgatcccgttacgggcatggagcaactcgcaaatctggttgcgcaatgccgcgaggcggtggcggcctga

SEQ ID NO: 529569 - DNA, 360 bp, Stenotrophomonas maltophilia
atgtcaccgattctttccgagagcaacaacaaccgggtcgagatgttggcgacccggatcgaggttcagtgggatttccgaaacaacgacggtccggtgctgttcaacttcgaccgggtggactgggaccccgtcgcgaaccacgtgaacagccgggaatacgaccgcaccatcccggcgcgaatccagaccttgatcgatcgcgagtacaccatcacccacccggcaactggtgagcaggaggtggtgcctggctggaagctgatggcgctgatcaaggccgcgacggaccgggtctgggaggcggcgacttcgcccgcagcgatggtcacagcgctgccggatgaaggcgggagctga

SEQ ID NO: 529570 - DNA, 5070 bp, Stenotrophomonas maltophilia
gtgggcctgatggatgagagggtggtagaaccgggcaggctgatcgtcaccccgcacccgctgttggtcgacggccagcgcaacgtggcctgggagctgacgccgggccaaagcctttacatgctgctgatgcgaaacatcccggacctggacgggcagcgctgggaggtgagcatcggtggccgcccggtggaacgccacctgtggcaccacgtgttccccaagcacggccaggtgatcgaggtgcgcggcggcgttggtagggcggcgctgtccattgtggcgatggtggcgctgacctacttcaccttcggcattgccggagccggcggcgctgtggcgggtttgatgggcggtgggttcgcaggcacggcgctggcgacgggtgcattcatggccggcagcctgcttatcaacaaggtgctggcgcccaaggcgccgcggcttgccaaccagcagcaggattcggtgtatgccatcaccggggcgcgcaaccaggcacgcttcaacgagccactgccgctgctctttggccgcagcctgctcaccccggatctattgagcaagccctacagctggtatgagggcaacgaccagtacgtgggtctgttgctgtgttcgggtatcaacgtcggccgcatcgacgctctgcgcatcggggatacgccgctgggcagcttcgacaacgtgcaggttttccatgccggttacagccagatgcccgaacaggtcatcccgctgtacggcaacgcggacaccatcgacggcggcgagttgcccaaggaccatggatgggtcgagcgcactaccagtaccgacaccatccgggtgcagatcggcctggagtacgtgctgggtggcactggcactagcggcaagtcgtaccccgtcaccgagcgcatcgaggtccaatacaaggccgtcggcaccagttcgtgggtgatgctggcgaacgagtcttaccgctcggaccgcttcgacgtgcgccgcgccaccatcagtcgcgacgtgccacaggggcagtacgacattcgcgtgcgcaaggtcggacagggcgactacgaaggtaagaacacccagaagaacgacttccaatggacgatgctgaccagcatccgtcctgacccgggcaactatgccggtatctcgcgtaccggcttgcagatcaaggcgaccggccagctcaacgggaccccgaaccagatccgtggcgtaggcgtggctgatccgatcccggaatgggatggcacggcctatgtggtgaaggagtccagcaacccgggcgcgcaatgcgtggcctacgcccgcggaatctaccgcgctggccgactgctgggcggcatggcctttgacgacagccagattgacctggagtcgtggaaggcgttcaccctgcactgtgcggccaatggctacacctacgactactgcgtccgcgatacccgtaaccaccacggcgtgctgtctgcgatcgcgcgggctggctttggggagatcaccctggcgggtggccggctgggcgtggtgtgggcggcgcaggagcagccactgggtggtgtagtcaacatgggtaccatcaagaaggggcaattccaggtcgactacaacctggccagcgccgccgatggcattgagttcacctatgccgatccggagacgtgggaggccaagcccctggaagtggctgcgcctggtgtaacgaccatgctcaaccctgcgcagatcagcggcgagggcgttacgtcggagcagcacgcggctcggctggcgcgctggcatctggcccagtcgctgtaccagtacaaggacattggctacagcaccgatatcgagcacatgagctatcagcgcttgtcgctgctggcactgcagcacgacatgacgcaatggggctttggcggtcgagtcgtggccgcggtgcgcgatggcacgcagatacggctcaccctggacgagccggtcccagggcgctccggcgcagatgcattcattggcctgcgcattcccggcgagcgcgtctatcgcgtactgcgcgtgcgggcgttcacaggcgagagccgcgagctggtgctggctgacaaatggccggcagatgcggcgctcccgggggacagcgactctaacccggcccacgacaccctttggatctacgacttcaagcagaccccgggctaccgggtacgagtgaccagcatcgagccggaggacgggctcaagggtgccgcagtgcgcgtggtgccggaggggccggagttctggcactacgtactgaccggtgactatgtgccgccgccggatggttcatcgctgcagacgcggccggtggctagcaacctgcggatcaccgagcatcaggtagtgcagggcgatacagtgttcaccgaactgacggccacattcgatatcagtggccccgtgggcaatgtgctggtgcgctcgtccgaggtcggcgccgagctggtcgacgtggcccagaccaccacccgcacggccacctggcgcatcccgggcccgggccggtactcggtggtagtgcggccgttctcgcccgagggcgacgctggcggggcggtgcagggcacttacaccaccgccggtgccggcttgcccccagtgctggtggacctgttcgacgtggaggaacgcagcggcggtgtacgtttgtacacctggggctggctggaggattccctgcgctcgccagacttcgcgggcgtggagattcgctacatgcccggccttgtggcagacccggactgggcggcaatggccccggtcggccaggccggttaccacactgcgcccttcgagatcgtcgttcctgatgctggcgaatggacttttgcgtgccgcagcgtcaatacctcgggtgagctttccaccggcatgcgcgtggtagccaagaagctgggaaagaacctcggccagcagctggatgagacctgggaagaagccgagcgcgccaatcagcgtatcggccaggagatcatcgatcgactggccggcgatctggctgcgatcaacgaggccgtgggcaaggcacgtcagtacaccgacgagcaggtggccgcgctcaacggcatcctcgaggacatcgtcggcgccgacgaatgggcggccggtacgacctacccggcgggtgacttcgtgcgccgcgctgggacgctgtatcggtcgctggccgagaacgtggacgtggagccgggcactgatccggcggtgtgggaggccatcggcgattacacctcggtgggcgatgcgctggcggcggccatcagcatgtccaccaagaacgccagcgacattgaagctgaggccagtcgcgtggacgccgtggttgcgcggatgccggcgggtgctggcacgctggccacatctgcacaggtggccagcgagcagcaggcacgcgccgatgctgactcggccttgggccagcgcctcgacagcaccaatgcggccttgggcgacaaggcgagcacggccagcgttacggccgtcgagcgagctagcgtcgctcgcgatcaggctctgggcgagcggatcaacacgaccaatgcggccttggaaggaaaggcctcgtccgacgccctgcagcagctgcgcagcgaggtcatcgagctggacggagttgttgatgccaacagccagctgatcaaccaggtgcgtgcatcgcagtccggtggcgtgaattcgctgcgcaatgctgacttcggtatgggcacgtccggctggcagttcgcggtcaatccctggcaggtggctttgcagaagaacttcgcagggcttgactggacacctgtcggtggcgcccaagccggcttcagcgtcgggggaacgccaggcggtggtgttgcgctggaccacgatgcaaggccagtggtgatcgccggggagaactggatcgcctcggcatatctggcaagccaccgatgctattcgtacctgcagctgatcgcgcttgatgtgacggggcgcgtcatcgatttcgtcagttcaccggtgtcgcgggcgtttggcggcaagctgctcgggcagtgggcacgtgtgcatgcgcgtttccccaacggcctgcccgaaggcaccgttaccgtgattcagcgctggtggacggagggcgcgaatggcgattcgcccttctcatggattacgcagcccatgcttgagaaggcggctcctgggcagacagggccctcgtcctggtccgtgagtgctgccggcatggccgaagcgacgcaggccctgtcggtgcgtgcgacgacgctggaaaacggtcaaagccagctgcaggcgtcctatacctgggcgctggacgtcaacggtcgggccatcggcatgacgtcggtcaacaacggcaccatcggtcagatcaactttgttgctgatcgagtcggcatcgttgatccgaacaacaccggtagcacgacgttcgagggcggccgctggatcacccggtccggggcctacatgatggttcacggcaagccgttcggcgtttccaacgacctgatgatgtggttcggtattggttccaacccggccaatgcgagcaaggcaaacgccctgttctggatagacaaccagggcagtggctacttcggtggcagcctgtcggccggcgtgctcaagaacgccgtgcagaccacctcgaccagcggcaacgccgagatcatcaacgggccgttctccactttgggacgtgccaagaacgtcgtggtcagctacgacatgaccaagaccgacacggccaacacgggtcgttggaccggcgtctccggcccggtgaacgcaaccatcgcgatctaccggagggtcggaaacggcggcgagcagttcatcacgaacttcaacgtcacgggcaactacgaggtgctgaacgagcagggtggcccatcgcagctgatctcgcgcatgggtggctcgcacaccttcaccgacaacacgccgggcaccgagcaattcacctaccgcgccatcatcgtcacccgcaacgtggccaccggcacgccgagcggcggcccggtcggtgtggctatcaatcagacgctgggcatcatttccgtggagcaatga

SEQ ID NO: 529571 - DNA, 1491 bp, Stenotrophomonas maltophilia
gtggctatatcgttgctcgatcgagcgatcgctgcggtggcccccagctatgcgctgcaccgccaccgcgcccgtgtgatgctcgatgcggcaagggcctatgaaggcgcgtcccgcggcgacggctggcgggtgcggcgtgctggtgccagtgccaacaccgatcacatggcagatgcacgtgagctgcgcaatcgtgcgcgctctctggtgcaaaacgtcccgtactgcgcccggtccctccaggtactggtgagcgcaaccattggcacgggcatcaccccaaaggctgagggtccagacgctgcgcggctggacaagctgtggttgcggtgggcggatgttgctgacgccgacggcaagtccgatatctatggtctgatggcaaccgcttatcgagcgatggaacaggacggtgaagtcctgatccgtcgtcgcactcgtcgtatgtcggatggtctggcggttccgctgcagctgcaggtcctggagatcgactggctcgacgggagcaagaatggctcgctgcgcggcggtggccagatcatcaacgggatcgagtatgacgtgctcggccgtgtcagggcgtattggttgtttgctgcccatccgggtgaggcggtacgtggttccgtgcgtctgaccagtgcggcagttcccgctgccgacatcatccatctgttcaaccccgttcgccctggtcaggggcgtggcatcagccggttcgcgccggtcattgcgcgcgtgcgggacctgatgctgtacgaggacgccgaactggcacgcaagaatcttgaggctcgcctgggcgtcattgtcagtggcgatccagaggtcatggcgaacagcgaagacgacggtccttctcagctgagcggggaccgtgagtcgatgacggaccttgggcctctgcccagtggcggtatcacacacgtgtccggtgccaccggcttccagaccatcgagccgaagccggccggtggttacgtggagtactgcaagtacaacgcgcacatcatcactgcgggtatcggggttccctacgagtccgcaacgggcgacatgcgtgaggtcaacttctccagcgcacgtatccgtcagatggagttccgccgtgacactgagcagcttcagtggttggttctgattccgcagatgtgcaagcccatctggcgctggttcgatgaagctgcggcgctgggtggcgaagtacgcaaagtcggtagctcggctgactggagtaccccgcgctgggattacgtgaatccaaagcaggacattgattccgaaattgcgggaatgggcgccggcctcctgtcgccgagcgaatccctgcggcggcgcggctatgacgccgacgcggtctttgtcgagatgggcaaggactacgcccgcatggagcaaaccggcgcgctcaagctcatgagcttcttgcaatccagtgctgcgcgctcgatgccggccgcagccccatcacccaacgaggaatag

SEQ ID NO: 529572 - DNA, 213 bp, Stenotrophomonas maltophilia
atgagctggacccacgacgatgtgaagcgcctcaaggcggccatcgccagcggacagctgtcggtgcgccacggggatcgtcaggtcacgtatcagtctgtcgaggcaatgctgacagcgctggatcgtatggaggctgagcttgccgccgcaacgcctgcgcggaagccggccacgcgtcgctatcggttcaccacgttgagaggtttctga

SEQ ID NO: 529573 - DNA, 318 bp, Stenotrophomonas maltophilia
gtgagtcggaacaccattcgtcatcgcatccgcatcaacgaactgaccgatgagctaagtattggcgcggcgctgcgcctgcgctgcgatagcgacgacatccgcgaggtggtggcagcggtcgtggcctacctggtcgaggagtacccagcccaggacctgtacatcccggccagcctccagacatccacatacccggtgggtgaaatcaggaagggtctggagcggcaggagtcagttcgctccctctgcaagcgcttccgaattgatcgacggaccctgtaccgactgttggacgagccctcggcgaacgggtga

SEQ ID NO: 529574 - DNA, 870 bp, Stenotrophomonas maltophilia
atgaagggtgacaaaacagagcgagcgcgcctaaacaatttcattacggcgtggagcggccaagttaacaatgagccagctaatgcgacaacgcttctacttcggatcaatgccacccactgcgatcctaataccggccgcttctcctgcgcgcacgcactcggcagagacttcggagacatccagttccattgcctggagtcgcactatcaaaaggaaaaaatgagcctccctgtcttctggtctgccttgcgcgtagtcgaattcgaaagagttcaatgttcggccaataccgatcgctcgcacaagcttgctcgcaaagggctgcccgagcagatgtattctgtctttgtaactttcgcaaacagggaagctgaagtactttgccgattcgaacgcccatcgttgcatattcgtgctcttggagaatttgggccatccccaaatttgcaaagtatcgattgcacggcgcgccttagtctctgcaaaagagatttccggcgtgatcgcggagagaatcataagtcgctcgttttcctccgcgacctgcctcgcagtcgcttcaccctcagcaacggccagcgccgcagcagtggcccgattcgcagcctgtcccaatttgagggtcatcagtccgagaaaaactgtcgctccgattgccagatacgcgacctcaacggccaccacagcaactacgacagcccaggcttcccatcgtggaacacagttctggcccaacgaccagcaaggactcagcgcgtcaagaaactccatactccgccctctcccgccctcatcaatcggcattctgccacgcccccgcggcagcggaccagcagtcgaactcgcagcaatccggtacttgtatga

SEQ ID NO: 529575 - DNA, 693 bp, Stenotrophomonas maltophilia
atgtctgaagccactgtcgcgcagttgcgtcaacttgccgctcactgccctgccaaaaagttaagccttgtggcgttgatgtgggaccttgatcctccagcctatgaagagtgggtgtctatggtggagcaagctttgctcattcagatcgataagatttctgagaaaagaaattatctttctgattttggtgaggatgcattgactacggttttgcagatcgggctcgatagtttgcacctgagctgcagtgctgcggttgtgaacggaaatgtagatcttctaattgagtataggggttataaatggctgggggaggccaagattgcgacgggctccacggtcatctaccacggttataaccagctcactaccaggtatgcgacggggcagccaaatcagactgctggcggtatgctgctctactgtaaggacgacactgctgacggaattctcgcggggtggagggcggctttggagatccaaaggcccgacgctgaaatagttgacggtccagttcctttgtcgttccgctcagttgattgtaggaatggcgccgggcaaaaattttctattattcacctggctgtctctctgcatcattctcctcaggaagatacggacctcctgtccaaagatgcgcagaacgcatataggcgggtgaaggctagcgtgaaagccggtagagcataa

SEQ ID NO: 529576 - DNA, 183 bp, Stenotrophomonas maltophilia
atgcattttctatactactcccctgtgaaggatactaacggcgagccgattgatgactcttcggtagcggatgcctacaagtctggctttatcgttgacccatacaatggggaagaaatagcaaattttgaagagtatctggtcccgtacttccaagttcggcaggggctggatcatgtctga

SEQ ID NO: 529577 - DNA, 1059 bp, Stenotrophomonas maltophilia
atggatttcgagatgatgctcgctggccttgcacgtgcgccctggcgcgacgtcgcgagaattatgctgatcggcgctggctatgacgttacgcgcggctacccacagaccgttgatcagttgcgtcgccagcagcccgatcctatcaagatggcaaaattgagtgcctcgatggtcgagcacttggtggcgggcgaaaagtaccttcagttcatccaattgcagcctggcgaacgcgcagttattgatcagtggattcgttcgaagcgacgtcacaataatgatctgacagcggcattcccgggcgttgcgcccgagtccaaaatcacgccattcagacatcaggatccgacgtcagcaggatttgctgtgcttgaagagggcgtcgctgcgctgtatacggcggcgcgttggtatacaaagactgagaaaatcgcatccagtagcctcttgccttccgccgctgctggctatgagcgcatcgtcgggtacaagaccgtcgtggtgcaaacatatgacgcgatctggctccctcccgctggagatgtcctcgtcctgtgcgtggactacccggatgaggggacgactcagggctttcctctggcaggggcggatttcctgcgtgccctcgtcaggcaggcgcttgggagaccaattctcaaagccaatttctggcacgctatcgagtctctatacaactcaactgaaggaaaactcgttgcctacggattttccgctggcggtcagtcggtaaatcaccacaacgcgcgccgacagacctctgtctgtttgcgcaaggctgtgtatgacgctggaggtgcggcggcaattcatgcttctgggaaagtgctggaactattcagagcggcatttgcctggcaggtgtcgcatagcggctctgtggtgtcgaagccggaggttctgatccctggtgtggcgaaggacttaaacaaggggtcgccggtagtcgacaactgcgttgtccgtgactgtctcacgaccggagacttgaacttggtagtctccaagttgctgccactaataaaaagctgggtatga

SEQ ID NO: 529578 - DNA, 3753 bp, Stenotrophomonas maltophilia
atggcttcgcgcaaattccgcttcatggccgcaggcggcgccgcactggcgctggggggaggctatttcatctacagcctgatggccgcccaggcccagggcacgctggcacaggcgccgctgaacatccaggtgcagacgccgccagcgttcctgatggcgctggacgattccggttcgatgctttgggaagtgctgaacaatacccgcgacggggtttaccgctggggcggcaagagcttctacacgggcagcgaggccaacggctacgttgatcgcgggctgttgtaccactatgtgtttccaagctacggtcgggactccaatctggcacttccgccgttggatgcttacggtttcgcacgctctccggacatcaatgcctcctacttcgatccacgcgaaacatactcttactggaagacgggccttccggaacccaatgccgacttcccgaaacagggcatcgatcccaagagcgcgccgctggatcctcggccgagcggcgccttctctctgaagacgggtacgctgaacctgaccgccgattcgacgagtaatgccatcgtggtcaatggcagcaacgtggcctggcgattccagttctacagcggcatggtgctgccgtccggcacgcgtatcgaacgcgaccgctgtggtgatctgaaccgcaacaacagctcgaccgacggtggtttcagcgtggtcggctccaaggccgtgaccctcaccgggaactgcagtgcggccatggtgttcttcccggccacgttctatctggtggatcgggctacgttgcctgaagactatggctataccgcgtcaccggtcgcggtgaccaatcctgtcggtggtcgcccgggcacactgtacaagtacgaaatcaagctcgccaatttcggcaacaatacggccaagtacaaccaggccatgggcaacttcgcccgatggttcagcctgtatcggacgcgtcgcgaatcgctgatcggcgcagccaccactgcgctgcatgaccagaccaacctgcgagtcggctggttccgcatcaacaaccggcgtaacgtcacgatgtacaacatgaccaatgatgatgagaagtcgacgcttctcgatgacatcatgaaggacatgcgggccagtagcagtacgcccaatcgatcggccgccgattacctggggcagcagttcaagcgtaccgacgcgaaagcgccggtgctgctgtcgtgccagaagaacgccggcatgctgtttaccgacggctacatcaatgagaccgaaaacaggacattgatgaaggacctggtggcgccgtactacgaaaagtccttggtggataccaaggagaccaattccgttccagtgccttccgagtgcaagggcgccaatccagacccggcgctggactgcaagacgcacctgcacatgaatttctatggcgtgaccctgggtacgctgggcaaggagttcggcgtcaagtacctgccggatccgaaacggccgtgggtactcagccccaatccctatgtgaacaagccgagcttccccacgtcgacgcaggatctcaagccggaagcggtcgatgagctgtggaacgcggtgtatgacacccgcggcgaaatggtcaatgccacccgtccgggcgatatcaccgctgcgatgcgccgcatcatcagcaacgtcgcccagggcgccacgccgtccggctcgcgttcgctgaccggcgcgcgcatcggcgtaggctcgttgtcggtggagccattctacgaagcgaccaacaacggcaccgactggtacggcaaactgcacgccttcaacctgaaggtggaagaatccacccgcaaggtcatttcggaggaggcgtgggaagcctccgcgcagatgccggcggccgattcacgccgcatccgtttctggcgcaacggcgcgctggtggatttctccggtggcaacgtcagtctggccaatctgtgcgacaagtcgggctcgctgtatccgggcatgaggatctgctctgaatccgagatcaccacgctggccaccgactcggctacggcggtggcctatctgcgaggtgctaccggcaacgagaaacgcaatggcggcaagctgcgtgaccgcaccaccgtgctgggcgacatcatcacctccacaccggtgctgagctcacccctggacgactacggtttccgccgtctgccgggtgcgatcggcagcagctacgccgagtacatgaccaccaagcgggatgatcgtcgttacatggtctatgccggtgccaatgacggcatgctgcatgccttcgatggcggcatgggcgcggatggcgaaatggacagtgacggcggcaaggaactgttcgcctacattccgtccaccgcgctgggccatatgggcaatctgttgctgccctacgatccgaccaatgagaacacccagcgcttccagcatcgctactacgtcgatggcccgataacggtcagcgacacctatggcagcaatggctggaccacctcgctggtgggtactgccggcgcgggtggtcgcagcgtgttcgcactggatgtgtccgatccgggcagcttcgggggcaccggttccctgctgtgggagatcagcgatctgaactcggcgctggacagcgaagtacgggccaacatcggccacgtgctgggcaagccggtgatcgtgccgatgaagaacgcagacggttcggtgagtttccgtgcgatcttcggcaatggttatgaaagcagcagcggcaaggcggtcctgttcgtggtcgacatggtggccggcagcacgccgaccatccgcatgatcgaagccgtcgagtctggtaccaacctgccggcaggcagcaatgggctgggcaacattgtcgtggtcgatcgctggggtggagcggggcagaacgaacaggtgcgcgatggcctggctgatactgtctatgcggccgacaagcgcggcgcggtctggaagttcgacctgcgtaacgatgctgcaccgacggtgccgttgttcaccaccgatacgcatgtcgatgcgagtgatcgcctgacctatcgtcagccgatcaccggcggcatgaccgtgaccacggggccgtccggcggtgtgatgctgatcttcggcaccggcagtttctcctactacggcgacgagaacgattcggcgcttcaggcgctgtacggcatcaacgacaccgaggccggcctgtcgaccgcgacactgacttcggccaacctgcgttcatatgcggccggcatcagtgacaacctgcgcacgctgagtgcaggcagcattcccacggtcagtcgtggctggacagtgacgctcgccaacaaggagcgggccgtgggcaatccgcgcatcgtctccggcgtggtgttcttcccgacctacattccttctgaggcccagggctgttcggtggatggctcgaactggttgttcggcctccaggccagcagtggcgaggcatcgatgtcgcaggttcgctttggcgcgccggacggaaagtcgcagggcgcagggacggcgggtgttgcgctcaacactggcggcaacgcgcctgtacgggatgtcaccacctcggtggtgccgcggctggcgccgccggacgcgggcaagcctggcagcccgccgccgaagcctccgggtgatgcctgcatgatgcagatttcggtggctggcgcggagccgatgtacctgccgtacccctgcggtcgccagtcgtggaggcagatccagtga

SEQ ID NO: 529579 - DNA, 600 bp, Stenotrophomonas maltophilia
atgcgatattcccgaggtgatgacatcgaatcaatcaagggtgaggtgaggtcgctccttccagtgcgcgagaagatgagcaaactctgcgatctactggagaccggtgagagaagttaccgtttccagttcgaggacatccggcaagatcacttcgtgcaatggctatggtggctggctttcgcgctctcgctggatatggggcgagagtacattcaacgaagcttgaagttgctgcggatcgccggaaaagacaagctcttcgacgcgatcgcagttgcgctgggggatgcgggccggcccgtttccactgaggtgttgtatcgccaatacctcccgctcatggaagcaatcgcctcaccgtcgggccggcccgggctcgtaaaggagttcctggacggctggtatgcaggcagccgcaacgtgtactggcacgggaatcaccgtgacgacgacagcggctacatgggctactgggccttcgaggccgcgctggtcgtgatgctgttcgacatcgacgattcgagcttccgcgaccacgagtactacccggccgatctggtagcccattacaggcgtcgtgccggtgacaggacgtag

SEQ ID NO: 529580 - DNA, 972 bp, Stenotrophomonas maltophilia
atggagctgaaccgcatcgaaggccagacgaagggggcatgggactgggtcagtggcagcgtggaaacggtgtggcaactggcggtgctgcgcttcaaggccgatgcggaactgcgcgaactgagcggactgctgctggcaggtgactggaacgggctggatgcacgcattgcagggcatcgtgcagcaggcgagcaggtgctggacaaggccagtacgatcaaggagcagctgatcctgctgttcgacgacggcccgacctggcagctgttggcgacgttccccgcgtactgggcgaaggcggtaccgccagacgagctgcaggagttgacccagcgttacggtagccagtttgcgctcgatgtcgttatcagcgtgctgctgggcgcgttcagcgcaggcacggccggaaccgcctatggcggcgcagcctgggcggcccggatcgggcggctgggacagcgtctggcagcgctgctggacgagctgggtgaggcgttcacggcattggcgcgggcattgcgcgcgcgcaagcgtcggcacacggaaagccgggcgccggatgccgatggggtggtggaaacccggttgccgcgcacgcgcgccgcaggtgctgcgttcggcgaggcgagagcgcatcaggcgatgctggacaagggactgacgccagtggggaagaccgatggcgtgtatcgtccgggagagaatggcatcgatggggtctacagccacccggatccgccgcctgactatgtgatcactgaagcgaagtacaacacgggccgtttgggtgggccgtacagggacggtacgcggcagatggatgatgagtggattggaaagcgtctagaggcgaaagttggtaaggatgaggcagagaagattgtagaagctctggaagaggggcgcgtcgagaagcttgttgtcagagtggccgaagacggaacggttgggactgtcagaatcgattga

SEQ ID NO: 529581 - DNA, 660 bp, Stenotrophomonas maltophilia
atggcacggatgtggatcgtggtcggcgacgccaccacgggcggcgggcgggtgctgaccggatcgtcgaatacggatatcgaaggcaaggccgtggcctgcgtgggtgacaaggcgacgtgtccaaagcatgggggcgcgttcgagatcgtcaccggggacccgacgctgatcgtcgatggcaagccgatcgcgcgcgaaggcgattcgctggcctgtggctgcaggttgctcggaggcgctcagtcgctggtgtatgtggttgacggcggtggccgtgcgtcggtctccgcggcgcctaccgcgccggcggaggtgaacctgtggagcgccaggccaccgtccagcggtttcgttgcccgcgatgtggcagctacgcgcgaggtcgtgctgcattgccattacggcgacctggactgtacgcccgcgcgcggtgtcagttaccgggcgaccctgtccgatggccgcgtgttcagcggccatctcgatgacgaaggccgtgcacgtctgccgcaggtgagcgtggggccggtgcaggtgatctaccagcacgaggccggcagcaccgactcggctgagattgaggcctgccgcgaacgacttcgcgccgccctgcagcgcatcgtgcagcagacccggcaggattttgctgcggactag

SEQ ID NO: 529582 - DNA, 474 bp, Stenotrophomonas maltophilia
atggccgatgaggctgcacgatcgtacaagagggttgcaggcaagatccggatgcttgtgtttccaaccagatcgcaggcccatgtaatgaattccctgatccgcccctccgtttgccagccggtcaacctcgcagaaaaatttgccgcgctgaaggactcatggatgcccagagtcgttgctgagctcaacgactatcagttcaaaatcgtgcggctgcagggtgagttcatctggcatgcccatgccacgaccgatgaggcgttcatcgtcattacgggagagctccgcattgagctgcgggataggcacgtcgcgttgcgcgcgggagagctcttcgtggtgccgcgaggcgtcgagcatcgaacgtgtgctgaccgtgaggtggaattgatgcttatcgagccgcgcggggtacccaatacaggcagcgcagggggagcgcgtacggcgccgaacgacgtgtgggcatga

SEQ ID NO: 529583 - DNA, 825 bp, Stenotrophomonas maltophilia
atgattccatcgaagccttctctggactgggtgcggcagggtgaaggggcggagggggtagagcgtcttgaggcctttttcggcggccatggatatgcgccgcatcggcacgacacttacgccgtcgggtacaccgtgtcgggggttcagagcttcaagtatcggcgtacccagcagcacgggctgcccggcaccgtgttggtgctgcatcctgatgaacttcacgacggccaggcgggtacggcggagggtttccggtatcgaatggcctacgtatcaccgtggcacatccaacagatgctcggcgggacgtcgctcccttttatcgacggaggcgtgtcgcgcgatccccggttgagggcggcgatcgccctcctgctgcagcgcctgcatgcccgcccggacccgctgcagcacctggatgcgctccatgatcttgcccggagcctggtggctgcagcgggacgtccacagacaaagacgcgtccggatttctttgcggtcgctcgtgcgcgtgagtacatgcttgatcggttgaaccagggggtgaccttggacgacctggcatcagttgccggtacggaccgctggcagttgagccgggattttcgcgcagtgctgggtacgagcccctatcgcttcctcaccatgcgccgtctggaccgggtaagggccctgttggtcaagggcgcgcccatcgctctcgcggcgcttgaggctgggttctatgaccagagccacatggcaaggcatttcgcttcggtctacggctctccgccggcccggtggttacagcgtttggggaggggtcctcatggccgatga

SEQ ID NO: 529584 - DNA, 615 bp, Stenotrophomonas maltophilia
atgcctgcaggcccgatgttcgtgcgtggatgggcggcgctgaccgccctggtcgctgccacctcgctgctgctgcagtacctgttgctgctgggcgggcccggcggcgaggcgggcgtggtcgcggcgaccctgcgcttcttcggttacttcaccatcctcagcaatctgggcgtgtgcctggggtgtgcatggctggcacgcggccgcgcgctgggcgcgaccgtggccgcggccatggcgctgtgcatcggcgtgacctgtctggtctacatgctggccttgcaggcgctttggcgacccactggcctgcagtggtgggtggatatggggctgcactacgccgtgccactgttgtacctgggcggctggctgctgctgttgccgcacggcggccttcgctggcgtgcattggcggtggtgctgtggctgccgttggcctatctcggttgggcgatgaccctggcctggctgctgggacaggcgccgtacccgttccttgaggtgcaacggatcggcgcggtggccttcgcgatcaacgtgctgcgcgtggccgcagtgttcgtgctgggctggacgatgctgtgggcgctggatcgctggcgccgtcgatga

SEQ ID NO: 529585 - DNA, 213 bp, Stenotrophomonas maltophilia
atggatgtccaggagcgcatctttcaggagcatgcttactcttgggtgtcagtgattggaaccttcagggatagagaaaagactggaacaaccgaggatctattgctcggggaaatcttcgcgcctcttgacgtgcatccgttggggttgcccttcgaagttaagcgccaaactttcggagacgtgttgcttaatcttgaggacatcaagtaa

SEQ ID NO: 529586 - DNA, 534 bp, Stenotrophomonas maltophilia
atgtgcaccttcgtcaccctgttcctgcccacctcgtttgcgcacgttgaatccgccgcgatcatggagcgcagcggccggcgcttgttcgcccaggcatcgcccagcctccaggcggcggtcgggcccagctggcagccgtggctgagtgccgcgcactgcgattgcggcacggccctgggggcggcgcgggccgagccggcatggaagggcgatgcggagcgctggcggaagaaaggctggagcgaggcgaagatcgcccgcgccctggccgagcagttggcgcatttccagcaggagcggcaggcacgccggagcgaaggcctgggcgatgccggccagtggctgcaacgcatcgacgcgctgctgcaggccggtgcggcgcgcatcggcctgctggtgcgtgactacgatggcgcggtgggtgcccggcagccgaagccaccggaatgtcgctgggtacgtgcgcagctgacagccgcggatctgctggggttcgagcctggcacgttgcattggatcgaacgcgggtga

SEQ ID NO: 529587 - DNA, 804 bp, Stenotrophomonas maltophilia
atgcgtatcttcacttccctgttgcgcctgttggcgctggctgcggcgctgtctgtcgcctcccctgtctgcgccacgcccatcgtgagcgtgggtccggcgctggaggatgcctttgagggctccgatgtggtgcccggcctgaagcagttgctcggaccggaatacggcgcgttcctgcgcaacttcgatgagtcggcggtaccggtgccgctgaaagagggagggttgctgcttgatgggtggcggttggggttccccgggcatcatgctgcggcggtcgtggtctaccccgatggcaccctgcacgcggcgtactacaacgctgaagaccgagcggtgcgttacttctcgacctccggtgagcttcaacagcgcgtgctgctgatctgggcgaagcgatttgagctgtctcctggtcattcgcgttccaccgagcgttcgctggaagagcgcgcccccgcatcgatcctggcattgccaggcgtggaagagcaggccgccatgcggtcggtggcagccgcgatctggtctgccgaactggcatcaggttggaacatgaacaccgaggtggggcacgttctgggtgaggcaaccaaacacatcatggactgctctgctgctttcagcctcgtgccgaagccggtgggatgggtacctggctggtcctatgtcgcccagatgtcagtccagatcgttgcttatgtcacgggtgtctccgggcatcgggtctatcgctcctgcgtcatcaccgccgccagtcgccagcgttcgttcatcgaattggcatcgggtgagttctga

SEQ ID NO: 529588 - DNA, 147 bp, Stenotrophomonas maltophilia
atgtgggaactgctgggccagatcatttccgttgcgctgaaccctgctggccacgcccttggccgatccagtgggtggatcctgctggcgctgatactggtcatcgcgatcagctgcgccgcgctggtcacctgcgaagcaggatga

SEQ ID NO: 529589 - DNA, 768 bp, Stenotrophomonas maltophilia
atgacccctgtgaccgtgatcggttgccagaacgatggagcgggaattgaatccgtgcctgcagtcgctttgacctccgaacgtcccatggacgtacaggcgagcgcgaaacccggagcctacgcgctgttcgacggtgcaaaggactcaggcacagcaagttgggacctgtacctgcggagcttgcatcaggatgaccgaaggtacttggaggacatatcagatcgttactttggaacggtgcatttttcgggcgcggaagatcgcgaagcgttgctccggctgggtttcccacttcctgaggagtggctggcagcaaaaggtatgagtgaagccgagctgagagcaatgagcgatcgcggagaccataaagccgagatatttcttgttgatcggctgctggcaaaaatggccgcagttaccgcgcaagccggcgcggaaaactacctggaggtggtgaaagccctgccagaggcagagcgatcctccgtggacaaggatcggctggaggtactcaatcgctctgcagatgttttctcggaggggccaacgcccttcaccgcctatcagtacggagtcgccttctccgccgcgacgggaagcccggaacccattcccgctgccatggcgatggctgcagaactgggggatcggcgggcagagacgttgatggctgactacgaagcgaaatcacctgctggcaatccgaagctggtgtcacagctgcacgccaccatgaggaaaatggcgaagcggccagcgccttag

SEQ ID NO: 529590 - DNA, 1392 bp, Stenotrophomonas maltophilia
atgcctggctcgacccgcgaccgccgttcgtttccagccgtccagcttcccggccaggaaggagccagtcccaccgaagtcacgctgatcgcacaattggggatcggtgccggtgatgccctgatcaccgacgccagccagcgccaacgccaccacccggccttcatcgatgcgctggatgagccctccgcacggctgggcagcatgcatctgcagcaaggcgacccatcctcgctgtacagcttcgctgtcggagctggcggccatccattccatcgccatgccggtccgcgcatgttcacggccatcgccggaagcggtggcaccgagctgcgctttgccagcgcttccgacgcgcagctggcgcgggaccccggctgcatcccacgcacgctgcggcgcatccgcatcccaccggactgcctgttcacggtgcgcttcggtggcgggacctggcaccagttcgcgtcgacccacccccagcacccggcgctgtttgcgctgtcgtgccatagcaatgaactggccggtgcgatgagcgagcacacccgtgcgcaggtactgctcaatgccgccgacattcccagcctgaccgatgtgctgccggaagcatgctggcccaccgccgccgcgctggcggccacaccactggtacagctgtcactgcaggccgcgccacccagcctgcgcgcacggctgtgcacgcgcacccgagcggtgttcggcccgctgcggcggatcgcattgcagcgacatcgcgggttcgtcgaacgcgctacgcccgcctatcccctccattcgcaggtgccacccagcgatggcctgctggccgcagcattgccgctcagccattaccaggacctggccacagtgcggctggacagcatgcaggcagtccaccgttccgcgtcggcactgctggccgacgtactggaaggcttcctccgcaatcgccccagcggcgtgggccggttgatggcgctgcgcaaccgcctggttgcaccgatgcggctgcgcacctccccgctgggctgcccggtatcgtcgctgctgtccaatgaccgcagccggctcttcgccggccgctatccggtgctggattcacgggtcgatgcagatgaccagtgcgcggaagtactgctcggtgccgatgatcgccacctgcgtttccgcagcagcgtgcgcgtgcagctgcgtgccggcggccacatcgagatcagccttggttcgcgcgtgcagacccacaatgcgttcggccgcgtctacatggcgttgatcgatagcacgcaccgccactatgtcgcgccggcgctgctgcgccgtgcggtcgagcatgcgctggcgccggaactggccgacctcgatgagtgcgcggcgggcgcagtgcattga

SEQ ID NO: 529591 - DNA, 1728 bp, Stenotrophomonas maltophilia
atgagcgctactggaaagtcatgcataggattgctcctgcttttggtcatacaggaaccgatttgggcgcagagtggaatcgaaccctatatcgagtaccggaagcgcgttgaaaccgcacagaacatttcaccactagacgatggactattcggcgatcaggtaagcctgtacaacggcgctaccgaattcaacatcaccgatattgatgttcgtgggaacaattcgctaccagttcaagttggcaggcgcctatctatcgaactccaaccccagaatactattgagccgtatgacacacggctacttggcattggcaattgggattccgccgtgccttatcttgcagcagtgtatccctccacctcaggatggcccaccacacgctgctccggcgggagcgtcccagcaaacctcgtgagcagattctacagagccgagttttggcagggcatcacagcgtacatcccaggacgagggagtacgaacatcatgggtatgctgactgctacaccacggcctccgactggaacgtatcgattcactacatcggaacgtgatgtccttgactgcatcccgatgaagagcggccttgcgggcgaaggcttccgcatgacgacaagctctggagtgcgctatttttttgatgtagcagtgacgcgaacagcttcaaaactgatgaagtacgtcaagcctgcgcgcgatgagttccctattgaagtttacatgggtcggactaagtactacctactggccagcaaggtggaggaccgcttcggcaacacggtggagtaccagtacaacgcttcagggcagccaacccgtatctgggcaaacgacgggagagagatcgttctgtcatacacctcggggcggctgagcaatgcgacaagccatggcaggacatggcagtaccaataccacgtaaatggcgatctcgcgcaagtcgtttaccctgatggaagtcgctggggatattcctactctggctcgctgacacctcccccagacgtcgcagaactaccttccatgccctggtgcagccaaactcccttggtgctgtcagctgaatactcagtgacgatcaatagcccgtcgggcgccacaggtatgtttgctttcgccaatcagcgacacttccgcagtggagtacatgctaccgaatgcgccaagggcggcgaccaccttgatccagactacacgctactggtaccgcattatttcgacgtaatgagtattgccagcaagaccttctctgggtcagggctcgccacgccactgacatggacatatgggtacaccagtccagtggcctttctttggggcttgcccacacaagctcccgcctatccctgcacaacatgcgaaatagcgaaaagcacccttgtcaccaatcctgatggcaccaaggtgcgtcattcctttggaatgcgctattacgacaacgacgggcggctgttgaaggtcgaggcactggatgcagccaacgccgtcctgcgtacggaaaccaggacatacatgaatgaaatcagcgccgccagccagcctttctatggggaatatggctccattcttggcagcatgaatgacccggcaagtgcgaggattcgaccgatcattaatcgcagcatattgcagcaaggcgtcaactttatctggcaggctaatgctttcgactcttctgcccgcccaataaatgttacgcaatctagcgccccaactccttaa

SEQ ID NO: 529592 - DNA, 1008 bp, Stenotrophomonas maltophilia
ttgcccagcgttttcttttcctactgccatgcagacgaggagctccgcgaccagctcgagaagcagctcgccatgctcaagcgccaaggcatcattgaaacctggcacgaccggcgcatcattgcgggtcaggagatagataagacgatcaacgggcacgttaacaacgatgacatcattctcctgcttgtaagtcctgacttcattgcgtcggactattgctacgaaagggagatgatgcgagcactggagcggcatgagtccggggaagccactgtcatccctgtcattctacgagcgtgcgactggcaccacgctcccttcggaaagctgatggccacccccaaggatggcaaaccggtgaagaagtgggccgatgctgacgaagcgttcttagaagtggcccaagccgtgcgcgctgcagcccaacatcacggtgccaagcaaaccgtaccaggcccctctagtagaacctcctccgaggaatttcctgcaacgccccgtccgacgggctcggacagcagcacccgccccgtaccgggccggaggtctagcaatttgcgtctcgccaaggccttcactcagcgggacaaagatcagttcaaggctgacactttcgattacatcgcgaagcacttcgagaactcgctcaacgagcttggagcacgtaaccccggctacgaaggatcgtttcgaagagtcgacgcaaaccgcttcttctgcacgatctatcacgatgggaacgacgtcgctcgtgcaacggtctacctaggcggaatgctcaagggcatcaattacagccaaggggagacgttggatagcaactcctacaacgagtccctatcggttgactgcgatgatcaagccctgttcctcaccagcatgggcatgtccgcgtatggttcaaaccgaggacgaaagctaacgccagaaggagctgcggagttgctctgggaacagctcattggtccccttcaaagtcgcagcaaccatccaagcaggcgctga

SEQ ID NO: 529593 - DNA, 333 bp, Stenotrophomonas maltophilia
atgaaggacggcatttaccatgttcgtttctcgtcgaacatgcagggagtgggcgaggggatagcagtgttcaaggcgggagcggtcaatggtggcgattccgggtacacgtattcaggaacgttggcgaccgctgatggagggttcagtgcgaggttgaccatcaagcgatgggaccccagctctgaatccatttttggtggccttgaccagttcgagctggagtttcggggcagtgatacaacgtttggctttagcgccaagggaagcattgtcggtcaccccgaagccaccctggccgtggacgggcgctacctgaccccggcggcctga

SEQ ID NO: 529594 - DNA, 306 bp, Stenotrophomonas maltophilia
atggaacgctcggaatttgctgttgaccgtgaactgtattcggacgatatggccgctcgggccgcgcatcgctatggtggcgagcttggtgtcgaggtgcgcagccaaggcgccaaccttactgtcatcttttggactttggatggctccgagttgccagagaatctctgggcacggttttcccgagacttgctagatgaacgcctgcgggcggccgtccgagcggaaacgagcgggctgcagcaggagctgcttcgcgcagcgctgaaccaagcagagccggtggtttcccgtgtcgaggtttag

SEQ ID NO: 529595 - DNA, 495 bp, Stenotrophomonas maltophilia
ttgcacttcccggtcgaattgccacagcgcgacgtgtggatccgtgcagcatggggcgaggttcccgcctcctactttcagggcgatgaggatctcaacaacagcagctttcttggcctgaaggtcaacaagtggaagatcggaagcgatgagtgggcgggaatgatcgagcccttcatcaatatagagattcttcgagcccacgcactcgcggaatacctgggcgaaaccatacatcgcccacccgtggatgccgcccaggagattattcttgttctggagttggacgacggtggcaatgaactggacgaagggttgttcaaacgtctggtgtcgatcctggcagagggcaacaggttgtattgctggaaggatggcttccggttggcaggcagggagtttgcgcaggctgtcccgacattgaaggacgttcagctgcgacttcagcagaaaggctgggacgtttcgaaagtcgtgatggttgtgggtgagtga

SEQ ID NO: 529596 - DNA, 270 bp, Stenotrophomonas maltophilia
atgccggcggcgcactgccgcattgacctcgccatcgcccctgcgcaactgcgtgtcgcgcccgcgctgcccgacctcgatggcgctgatgacgaagcactgctgcgcaatcacgtcgaggtcgcacgtcggtaccacgaactcgccgaccagttgcgggcgctgttgtgcagccttggcaaccagaccggtttcaccatcaacggtgcgttgccggtcgcgcctgccagctgcggcactgcagccggcgccagcaagaccctgccctga

SEQ ID NO: 529597 - DNA, 390 bp, Stenotrophomonas maltophilia
gtgaacgatacccgccggcccgctgatgcggtgctggctgccgaactggaggcgctggagcgcgcgctgcacgcaccgcaggtgcggggtgatcgtgagcgcctggctgcattgctggacgaggatttcagcgagatcggcagttccggccaatgctacggccgtgcggccgcgctggcggaaattccgctggagcgggcgcagctgttgatcgagtcggaacagttcgcggtgcggctgttggccggtggcctggcccaggtgcgctaccgcagccgctatcacgtggatggccaggcgcaacgctgggtgctgcgtagttcgctgtggcgctggcacgggcaacggtggcggatgctgttccatcagggaacgcccgaagcacggtag

SEQ ID NO: 529598 - DNA, 561 bp, Stenotrophomonas maltophilia
atgaagaagttcctgaagtgggcgatcattgcgatcgtcggtctgttcgtcgctctgatggtgcttggcatggtgatcaatgccaacaagtcgccggagcagcgtgaagccgaggccgctgcgcgtgaacagcagcgtactgaagctgccgccgccaaggagcaggccaaggccgacgccgaggcttccaaggagcgcgccaaggccgaagccgagcagaagaagctcgatgaagagcgcgcggcgctcgatgcgttgccgcaggtgactgctgcagagctggccaaggcctacgaagaaaacacggttgccgccgaccagcagttcaagggcaagcgtttccgtgtttcgggcacggtggactcgatcaacaccgatctgatgggcaatccgtacgtgaccctgcgcgcgggcctgttcctggatccgcagttctcgttcagccaggcccagctggacgtaatcggcggcctgaagaagggccaggcggtgaatctggtctgcaccggtggcggtgatgtcgccaagacgccgatgtccaaggactgccaggtgctctga

SEQ ID NO: 529599 - DNA, 354 bp, Stenotrophomonas maltophilia
atggacaacgcaaccctgctggtgacgctgctgagcatggtgggcgtgcgcctgccgatactgattgcgctgtgcgttggcctggtctgggtggtgggtgcaccgcgcgacgccacccggaccggcgccctggtcggcctgctgctgttgctgctgtccagcctcggtgggatggcggcgggcatcctgccgatgtggatcatccgcagcggtgatttcagtgccgtgtcgggcctgagcacccttctgggcgtgctgcacttcgcgctggcgatggtcgaggccatcggcgtggtgctgctggtatgggcgctggtgcgcctgctgcggctgcgcggcaatccggtgcagtga

SEQ ID NO: 529600 - DNA, 1005 bp, Stenotrophomonas maltophilia
gtgcttacaggatggcagccacgcttccccgttgggcgacggttgaaccacccggagcgcagttcggagttgaggcatgacattccgtcgcagttctcgcccgacgatgcattcggtctgattgcgatgaattcgcagtacatcgatttcgtcgacaggtctttcaaagtaaagggtatggccgcgacgctgtccgcctcgctgatggtcatcttctttactggcgtaaacgtgaatttgtttatccagtcctctgaaatgagagaggggatagcgggcctatggccacatctgttggtcatcaccgtagtcgtttttgcggcaaacttcgtatgctggtggatggttctcagaaaagacatcttccagtacacgcactatccggttcgcttcaatcgcatcacccgcaagatctacttcttcaggcacaacggccctggcggcgtgaccgtcgtgccttggggttcgccttacgccttcttccatatcggccggggcgcgcaaaatcgtgagctgcgtgatctcaggtgccacctgcttgatcgcaatcagcagatacagcagaccttcaccgtcggacacttctggcatcacgacgatcacattctcgaggaatgggcactgatctgccgctacatgcaggacggcccggaaaactgttacgacgacccacgtgacagggttatcacgctctcgtcggacccaacgatccgcaactgctggctgatggtcatcctgatgatgggcacggcactgatgccgctgcgtaccaacctgatgttcccggtctatggcgcactcacgctctgccggtggctgaccttcaagacctgccgcaggccggtcttcccacctgagatcgaggcggaatgccagattgatcctgaggatccctatcgacttccagagccaaggttcatggctgaatttgccagcgatccggacatctatgcgcgggcgatggaacgccacaaggagcggatgatgtggcgcccagaggagtag

SEQ ID NO: 529601 - DNA, 333 bp, Stenotrophomonas maltophilia
atgcggtcgcagaagggccatccggttcatcagatggtttcggacccggtccggtacgtcactctcaagcagggtgcagaacagcggccggccgcgatcacgcagctgggcatcggcccgctcaagcagttcaagccgcgtctgccaaggcagtgcatgcagtggcaccagcaaggggggattgtgcagtcgcctgcacagcagcggtgggttcagcggttcgacgggaagatcggcgaactgtgcggcagcaacctgcgtcggatcgacgatgccatgcgtctgcgcgaggaaggtgcggtgtcccatgtcgacaggggccgcgtctggtga

SEQ ID NO: 529602 - DNA, 885 bp, Stenotrophomonas maltophilia
gtgagcctggcctcgcccgcgaatgctttgcccgcaagggtgctgatcctcgggctgggctggagcgggcgcgtgctggccgcgcagctgcaggcgcggggcgtgcatgtggctggcacggtgcgtgatccggcgtcggcaccgcacgacggcgtgcggcgccatcaactgcgggccgacgcgacactgtcaccggctctgctcgacgaagtcgcgcaggccgacgccgtgctgtgcagcgtgccacccgacgctgaaggcgatcctgcactgcgcctggtgctgccggcactgcaggccagccccgcgttgcgctgggtcggctatctgtcgtcaacctcggtgtacgccgaccgggccggcggctggatcgacgaaaccagcgtggcggatgccaccgagaccgccggtgtgcagcgccggctggcggaagcacagtggcgtgcgctggccggacaacgcggcatcgcattggcggtgctgcgcctgcccggcctgtacggaccgggtcgcaatgcgctggtgcagttggcgcaggggcgcgcccgccacgtggtgcggcctgggctggtgttcaaccgcctgcatgtgcaggacctggccgcggtcatcatcgccgcgatgcagcgaccggtgcagcaggcgctgtacctgcccagcgatgacgaaccggcaccaccgcaggaggtgctggccttcgccgcgcggttgggtggctttgcgattccgcctgcggtgccatgggatgatacggggctgagcccgacgctgcggcgcttctaccagagcagcaagcgcatcgacagccgtgccacgcgtgaagcgctgggctgggagccgcagtttccgacctatcgggaagggctgcgcgacctgctccggtag

SEQ ID NO: 529603 - DNA, 216 bp, Stenotrophomonas maltophilia
gtgagccaatcgactgaccctcgcgatgccgatgcgcgcgtgctgtcgcaggcgctgcgcgagcaggaacaacggcacgccgtgcctgatgtgagcgaggcgctgcagcagcggctgcacgcggaaacgcgcgacagcggtgtgctgtacgtggtggtgcaggtgttgttgttcggggcgctgctggctgccgcggcctggtatttctggctctga

SEQ ID NO: 529604 - DNA, 351 bp, Stenotrophomonas maltophilia
gtgaaggatgccggaccaggcggcatcaccaatgcctcgggcgaccgcttcgccaacgcaccacgcaacaaagtgggcctgtggacgcgctatgacctgccctcgatcaactcagcgattggcttcggcgtggatcatgtcggagaacgtgtcagcctggacgggcagacggtgaaggcctacaccgtgttcgatgtgagctggaagaccacgtggaagcagtggcagttccaggccaacgtcaagaacctgttcgacaaggtgtacgccgccagcggcttcatcgagcgcaacgggcacttcccgggtgaaccgcggcgggtgtatgtgcaggcggcctacagcttctga

SEQ ID NO: 529605 - DNA, 1437 bp, Stenotrophomonas maltophilia
atgtaccgcacccttgctgctgcattgctctgcgctctctttgccgctcccgtcgctttcgcgcgtaacgtccccggcgagctccctgcccggctcgacgcccaactgcaggccaaccgcgaacgctacggtattgccggccaggcagtgctggtcgcgcacaacgggaacgtgctctaccaaggcgccagcggtgagcgcgacccggccacgcatgcgcctgccaccgtcgataccatcttcgccgcgcagtcgatggccaaactgctgaccagcacgctggtgatgcagctggtggaacaaggcatggtggacctggatgcacccgccagccgctatgtgccggacttgccctctgcatggcaggcgatccccgtgcgcgattatctcaaccacagttccggcattgccgagtactacgaccgggtggacaaccgctgggtcagcaaaggctacagcggcgtggcacccacccttgccgccgctctgaaggtggcggctgctgcaccgatgcagttcgctaccggcagccgcgtgcagtacacgcaggccaactacctggtgctgacggcgctgctggaagcgcactaccgcaagccctacccggccatcgctcgcgaacgcatcctgcaaccgctgaagatgaccagcagttcatggggagcagccagcgtgccggcgcagcgcgcaacggtgccgtacatcggcaaggacggcacattgcagcccgccaacgaagatccgtggccggactacggctggggccatgccgatctgcagactaccgtgggcgacatgaaccgcttcctgcaggcattggcgaccggcaagctggtacgcacggcgacgctggaaaaactatggcagccacagaaactgagcggtggcagcagcaatttcttctccaccggctgggacaccacccgcagcgatggctacacccaggtcggccacgatggtggcacccgtgtgcgtgcgcggctggcctacaaggactcgctggccagcggctactgggtattcgtgtacctgaccaatggcagcgcgcgcaatgtgtggtccagcacgctggtggaaagcacgatggcggtggcggctccggatcagttccctcacaccatgctgtccgaacgactgatcagctatgcactggacgatgctgcgggagcgccacaggcgatgcgccgctggctgcgcgacgagaaccgtgttcgcaccgacgagttggaacgcgccatcaatgcggacggctacgccattcgcgaaagcctcggcgcaggcaaggcgttgaaggtattcgcgctcaactccgagctttatccggagtcggccaatgcctgggacagcctcgccgagtgccacgcggcactgggtgacgcggagactgccaaggcgctctacgcgaaatcgaaggcgctcgcacaatccaagccgtag

SEQ ID NO: 529606 - DNA, 1542 bp, Stenotrophomonas maltophilia
gtgccgatccggcaggacggctatgcacagatgcgggtggtcgcctacattcccgaaggaagtgacggaacgacgtttgacgcatgcccgcagaagtccgtgtgggacttgaatcttaaggatgtgctcaagggcgaccgggtacacctgctcggtgtttctgttgcgccgcctacatcgtcggggttgccggcgttcactgcggcgcccctgcgtctggaaacacgcaataagttcttcggcagcagctgcacattgaacctgcgaaagttcgagtacctttcgccgcgcttccacgtaggccgcaatgcgcacagccggttccaggtggttcctgcaatcttgaccagtacccaggtgaatgtcgaagcttgggatcaggcaatgcaggcgatccagacgctcactacctatgcgggactaaccgcgccgctggtgactacccagttggctgggctcaagggccagctgctgcagggaatgaagacatcggtggaacggccggatgagatattcacgatcagcgagggcgtgacacggaagccaaaggtctggagcttttccggagaacagacccgcgcaggcggggctatcgagggtctcgctgtcacggtgatcgcacagctcgttcctgccgatgatctggttcgccggtctttgccagacgccccctggcttcctgccaccattttgaagacgcagatgaacggtaccttgggaggggaatcggatctggatggccatatccgcaggattgccagcggcgagatcgtcaatctgatctcggcgcggggcagtgaagccgccgctgtgcgatgtgaccagctggcagagaagatccatgggttgcgcctgtcgcagcacgatgcgggcctggcgctctgggcctatgcccacaagcgcgccgagatgaaactggcgacagccgacgaggtcgtgcggatgccatgcctgcagggcttccgccatgtgctggtaaaggcggggctgctgcctgagaacgtgcccttggtcgcatcgccgcccacccatcaggacatgttggccgccacccagatccagaatgcactgtggcagttcttcacccggcctgcgtggcaggatcgcaaatcgttcgccgagcggttgtttgcctatcctgttggttatggccagcgtgtggagatgctgcaatccactgcgaccatcgacaacaaggatgcctgggtcagcaatgcacatgcaggcagcaacgcattggcacagtcctttggctgtccggtgttctttccgggcagaacagaccatcctttcccgaactgggcggggcattcggtgatggtggctttcgcaacgctgcccgtcgctggcggagacccacgggacgcggtggtggcactgcggttcgcgcaacaacttcccggggaggcagcaaagatcgatgccgtggaagtcgatccacatccggcagccgaagttgcgaggtcggtcgcctcgtcgctgcaagcgtcaggaggctgtgttgatcactacgccttggcgccggcgttgttgcagcagtag

SEQ ID NO: 529607 - DNA, 768 bp, Stenotrophomonas maltophilia
atgaagactggattgctggcactggctgcgctgttggtctctccggttgccatggcggtcccgccaccgatgagcgtgcacgtgacgtacgactggtctggctggggttcggtgtcggagcgctggctcatccagcgcgatgcctatggcatgaccacccgtgtgcaggtggtggatgcgcctgacgtgaaggcgcgcctgcctgagctgctgccggtcgacgccatggcggcgctcgaggccgcgctgcaggcagcaccactgacccgggaagccacagtgaatctgatcagttcgcggctcgaccgggccgcgatactggggctggacccggggctgcgcagcctgcagccgggcgcatgctcgttcgtccagcagcgtgcattcgcccgccaggcgctggccacctcgagcatgcaggcacgcgtcgcacgccattttgaaggtttctggaccgacgattacccgatgatgaccgtggtggtgacccggccgggacgcccggatgtcgtactggtatcgacgtcgcaggcgacgatgatgctgccctggaagcgcctgccgtcggcggagttcaatcaacaggtgttggccggcgcgcaggaagagtggcgcccggcattgagcgaagcggtgaatgcgctgttgccggacggcgaagcgtcgcgcaaccgattccagatggggtggctgcaggaccggttgcgcagtgacctcgcactggagtcgctggattgtggtgcctggcgcagacggcgcgcagggtga

SEQ ID NO: 529608 - DNA, 885 bp, Stenotrophomonas maltophilia
atgcgtcgttcgcttttcccaagagccttacagcttctcgcattgctggggctgagcgcgctgatctcacccgtggcacatgctgcaggcgtgctggtctgcgacaactgcgcggacccacgcgcgctcgcgctcacatccggcacgggtctgaccatcgtcgcggacttcagccaacgcaggcttcacggctacgaagtggagtacgaccgcgaacttcacagataccgggcggtccagacacaggtgccggatccgatcatcgcgtcgttcaaccgcatcatggggatgcttgaccgccgcggcatccgcgctggccagaggggcgcacagttcgaaatccaccccgatgacccggcagcggccaatggcatcacctttccagaagaattcaaaagccacaacgcgcatgacatcgcgcagatggcaaccgcccgcttccggcttgaggcccagatcggcgaggcgttcgccggcgcgaccacccactcgacggcctggaacagcatggcgacgtttctctcgtccattggcctgagcttcgtcagcaaggcgctgggcatcgatggagcgatatatgtcatcacatggcgggatggctcacagaccaccctcctcatccgtcccgactcggtcagggaagcgaggtatgtacaagggggaagcagggatgcacagggcaaccgcattgccgatggcgctgccagcgatccggacaccgcacagggcttcgcgggtgtctatcagtttggagacggggaagcgatgcagcgctggatcgataccgctcgactgtacggtgtaaccgttgtcgaaggcagcggcatcgcaggccagttggattgccgctgggacgggcggacgttgacctgcgaaggcagctga

SEQ ID NO: 529609 - DNA, 1038 bp, Stenotrophomonas maltophilia
gtgtccggattcaaggtacttccagaacagaacgggtcttgggggcatttcctgcaggaggtgggtctgccgggacgcgcatccacgggcccgggtcgcgcggttcaatggattggcgagagctgcttggcgttcgcagcctggaagcgaccctcgaatcgcggctttctgttcgtgctgtcactggtggccctgctaccgctgtttagcatggcgatggatgtcgcgctgaagatcagaagctggacgcacggctggccgcatttgttgctgctggtcgcgctgtttgttgccggcatgatcggctgcctggcatcggtgtttcatctgtatcgcaagcctgctgagccgccgatggtactcagccgccggcttagaaagttcttttactgggtggacaaaaaaagtggctgggtaagtctggattacgatgctgcggtacccatcagtaggtgggacctcgtccgtggcaagtatgtctccgcgccagtccaggtgctcgctgttgttgagttgacgccaggcagtcgccagatcgacaaattcctgcccctgtcggagccggagctcaacgacgcaggtcccgaagagctttgggaattccttcggcactatatgaacggggacttgcgaacgcttcctccggttgccttcgctctgtcgccggctggggtgcaggcggatctggcacgaatggagcggctcgtcttcggtccctggattgatcgtgaccatcgtgtcaaagggctatctgcctggttgcctatcctgttcctgggcagcctcatcttctggttcgaactggcgggattctggctgctgcgtcgtgcccctcgtgttgcttggcccgatgcgctggccgaggagttggactccctggcgacgaaggcattgctcagcccgagcgcgcacccacaacagcggacaggtggcgcgctatgggctcgctggttgctgccggcactgcttaatgcagtgatcgtgctcgcgccgatggttctgctgacgcttctgccatggaccaccggcagctcatga

SEQ ID NO: 529610 - DNA, 1056 bp, Stenotrophomonas maltophilia
atgccgcagatgagtcagttcgccggctggcttgcccagcgctatcgcaacaaccgccccctctcccaatatgaagaaggtgccgatgtgcgccagttcgactcttcggcgtttacgccgatcaacaagggcgtcatcggattggatgctgactccatggagtatgtggatcggcatttcttataccgcggatgggctctgatgggtggcagcgtctttgtggtgctgggtgcaatcttcatcattgcgatgctgcacgcggctatctccaccgagaacaaagctcagtcacttgatgccatctatgctgccgtcggcgttagcaccctggctctcgcgtttgtcggatttgtcttctggatgctgatactgcgggacatcttccgctaccagtactaccccatccgctttgaccgaacaacgcaccaggtgcatgtcttcacaggcggacgcaacaaggtgatttcagcggcctggtcggatgtccgcttcatcattggcagggacaagcccgctgggcccggtgaggactacacctacgatctcaggggcctggtgatgcgcggcgatcaggtcgtgcacacctttgcggtaggctcggattgcggttcgaaccctgccgtcgtgctcgcgcactgggaaatgatccggcgcttcatggagcaggggcgttccgcgcttccgttcccgccgttgcagctctacacctcagtggtgccgagcttccgcaatgcgttcatcattcatgtctcttctgcgggcgcagggctgatgtggattgcactgccgctcaccttgccctgggcgctgttccgcttccttgcgatgaagctgtgccgcaagccggtctggccggcggccgtgacccgacgcggaacatccgagccttccggtacgccgccgctgcgtgcgccggccgtatacgggcgagtggatcatgcgggcggccgggcggatcagatggagcgattctggaaggaatcgatcgctgctgcgaaggcccgcaacgatgaagtgcggcagcagttgaaggaacgtgcggctgaggggaggtga

SEQ ID NO: 529611 - DNA, 192 bp, Stenotrophomonas maltophilia
atggacgactttgtccccgtgcacaacgaagacaagctgccctactgcggtgcaatgaatgatgacgtcctccggaggatcacgctggacagcttctcgatcatggcccacaaagtgtcgattgaggattttgatgccttcacagaggctactggccgatcgtggggtgcgcacgtcgaaaatcgacgctga

SEQ ID NO: 529612 - DNA, 852 bp, Stenotrophomonas maltophilia
atgcaactcgatcatcggctattcgaagcccatcagtacgcattgatcaatccgctccagatcgataagcgaattgccctgttgtggccatgcgaacctatcgtgcccaaggagctcctcgggcaggagcatctccttccctacctgctcaaaccaggagaaatcacgcccgatgcgcgactggcggcacttgatgaaacagtgcaatacgcgcgcgaccatggccgattacctttttcggctctgttgaagtgcgatgccggaagcgatcaagtgcgaaatcatctggcccgtatgatggtgagaaaatttgaaggtgagcagatgctgttcagatactacgatcctcgtgtctggaatgcgctgaagtggatactttcgccatcgcaactggatgcgctgctcgggcctgtcaagtcctggaccgcactcgcgggccagggcgggcgatggcaatcgtatgaaagcaagggccacaacaaggatgggctgcaacctacctccgatcagctgcacgcgatctcctcattggcatctgtcaacagggtgatcgaaaggttgcgccaagagggcgagggaaccgacgacaccgcgctttcgaagcgtgtctttgatgagattgagagggctcgtgagcacggtctgacggatcctgacgacaaagaagcctatgcgttcgcctcagtacatcaatcacccgaaattcacagtacacataggtatcaagaggctcttcggattgcccgactagagcctggcgcgttccgtagcgccatcagtgacccctccgacgaagaggcggatgaaccttcattggagcaggaagaacaaggagccaggcagcatggataa

SEQ ID NO: 529613 - DNA, 972 bp, Stenotrophomonas maltophilia
atgccgcctcttcgacccgtccttctgaaatcccttgtgccaacagcacttctgctgacggcgtgccaaggttcgaccgtcaaaacgccccagaagcactcacctgagctcacagcgcgcatcgaagcactgtcgcaaaagaccaaaaaagaccttgtggaggtggaaggcggcaccttcatcatgggtgatttcggccccatcgatccgcgtgcaaagatgccttacagcggtgagcgcgacgacgacgtactgcgtgaggtaacactgagcagctacgcgatcggtgcgaagaagatcacctacgccgacttcgatgtgtacactgatgcgacggggcaacctcgtaccgcacagtatccgatggatctggagtaccggaacctaccggacgatctaccggtcggcgtgagttgggaggccgcgcagcagtactgtggatgggtcggaaagctgattgggcgaaagatggagcttccgacggaggcgcagtgggagtacgcggcacgtaaccggggccagttcgtgatctggcccaccgatgatggcagcgtggacgatggaaggaatgtgggggacttcgagacaatcggtcgctacgcctctcagcatggctacacgatcggcccaaccccgctgggccagtacccgcccaccccgctgggtctgtacgacatgatcgatcatggatttgaatggatctttgactggtatcaggatccctacgacatttccgacacacaggaccctcgtggacctgcacatggggaggagaaggtccagcgcagtcacagcaaccgcggtggagattctctattcatcgtgtcgatgacgttcactcgtttcaaaaacgaacctgcccctggccccgacccccttctctctgaggaagggaggcgactgttcaatcccaacggctttaaccgattccgctgcgcagcagccgattctcccagttcagagaacagctga

SEQ ID NO: 529614 - DNA, 1434 bp, Stenotrophomonas maltophilia
atgagagatttgaacgacgccatcgccgacgttgtggccgatatccggcaggtgcaggcacggatggcggagcgtggcgatcagtgccgaagcctgatcgaggaacaggaatccctgcacgggcaggtgcgcgaggagttcaacgcactggcgcgcctgcaggccgaggcggccgtggatttgccaccggtggtggcccgcgacctgctgcagcagtccaacgccgacctgaagcgccgcgatcgcaaagcagcggtgctggccgacgagctgcgcgtactgctggacatcgagcagtcgctgcaacagcgttcgcaggaggccattgccacacgcaatgcagccggtgagcggttgcaggccctgcaggagcaggtggacaccacgctggacgcagagctgggttatcgggcgctgcagagcgacctgcaattggccgaagcgcgcgccgatacggtcgagcgcatggccgcttcggcgcaggcggagcatgacgccaaggccggcgcctaccaggctgacccgatcttcatgtacctgcatggccgcggcttcggcagcacggcctatcgcggctggccagtggtacgcactgtcgatggctggctggccgagctgtgcggcttcgaccgggcgcgtcgggagtacgcaacgctggtcgagcttccaccttacctgcagctgcatgccggacgtgcccgcgacgaggtcgatgccgtgcgtgagccggtgcagcaggcgcgcgacgccgcgcttgcccacgcaggtggcgacccgttgcggcagcagttgcaggtcgctcagggtgaggtggcacaggcgctgctggccgagcagctgcatcggcaggccgtggatgccaagcaggcacagatcgatggcttccgcagctggaccgatgccgaaggcagcgctctgctcgtcgcgctggcacgcaggctgtcggccaccagcatggacgacctgtaccggcgcgtgagcgtcaccgcctctggcgaagacgatgccgtgcttgaacgcatccatcgcactcgtcttcgcctggacgagatcgaaggcctggtcggtgagcacacccgtgaaatggccgtactgaagaagcgcctggacaacctgcaggccgcccgcaacagctaccaggccgctaccgacatcgagcgccaggcctacaaggcgtcgacctaccgggcggccgcctcgtccacggtcgccgcgtccttcttcagcacaaccagcagccgaagcaccacccgctcctctggcagcctgttcgacctgcttgcgggcggatccagtagttcaagctcccgttcaagctccagctccagctcgagttcgagttcgagttcaagctccagttccagcggcagcagcttccagagcggtggtggcatcagtggtggcggtggcttcaagaccggcggcgggttctag

SEQ ID NO: 529615 - DNA, 1800 bp, Stenotrophomonas maltophilia
atgaagatcaccccgacaacactcacgcttcagcagttcttctcggtgggaaacgaacagttcctgataccggcctatcagcgtcggtacgcctgggggcagcgccagcaacgggaactgttcgacgatatccgcctgctgcccgccgctgatgcacacctgctgggcactgtgctgctgttgtcggatacgcacaagcccggcgtgaatcatcttgagctggtggacggccaacagcgcgtcaccaccctcaccatcctgatgcgcgtgcttgcacgcagatacgaaaaggacggtgacaaggaggccgcccaggagcttgagaagctgctgcattgtcgaggcatcgatcgcaagacccagcccaagcttcatcttggcgacctggatcactccgattacgcggccatcatggattcgacggatgtgtccgaagtcgataacgaacggctgaagggcgcccatctcaacttcactgcctgggtcgaacagctgaagaccgatgagctcaacgagttcttccacaagctgctcaacaacgcctccatcatccggctggatgtgggcgcggcgaaggatgcctacaagctcttcgagaccatcaacaaccgcggcctgcgcctgaagccaaccgacatcatcaagaatttcctgctcggccacgcctcatcgctttcgcaggccacgctggacaaggtgaaggatgactggcggaagctgattgtggccctcgacgggctggacagcgacgacttcttccgccagtggctggctggaaagctccatcgcaaggtctcaaagaccaagctggtgggcgacttcaagtggtactacctgcgcagcgtggtcgaggccgaatccatgaccgagtttctctcttcggtcatcaaggacgaagaggacgacgacgagacggaggatggaatccttgtcgcgtcggacgaggacgatacagcggatgcgggccccaagtctggcaaggcccggaaggtcaagctgatcgcattcgcgaaagcccttcggcaatccgccgaactctattcgaagctgctctggtgcgagaccggctttgaaaagctggaccgtcatatcggcaatctctgggatatcaaggcgttccaggcattcacctggctgctggacatgttcggcagggacagcctcgacgagaaggccaggatccggctgctcagaacgctggagtccttcatgatgcgcaggcatatctgcgagaagcgctccaacgaacttgagacgatcttcgcaatgctgacaggcctggatgacgtcgactacgagaagaccgccataggcatcctgcgcgagcacacgcccgacgacgacgagttcagcgccgccttcgccgccttcccgttcgtgccggcagtgatcaatcgtgccaggtatgcgctgcaggtcctcgagtacgatgcgatcggccacaagaacgagtactaccttgccgacccggatgagctcgaactcgaacacatcattcccaaggctgcagacaaggcgagcaccaagaaggaacttggcgattggccgagttatctgggcgatggatggaaaaccaagcactcccggatgctgcatcgaatcggcaacatgacgctcatcgcggacgagctgaatgtggtggcgtcgaacaatcccttccagtccaagaagaaggaatacgccagttccaacatccagttgacccgggatgttgccggactgccgcatttcaggttcaagcaggtggaggagcgctgccagcacttcgcaagccgcgccgttgtgctgtggaaggtctga

SEQ ID NO: 529616 - DNA, 1146 bp, Stenotrophomonas maltophilia
ttgcagaaacgagataatcccaatgcactctggcccggtcttttcaagggccgccgatctgcgttgaacccctacgagttcggtccgctgcagcaacgtgatcgtgtggccgccatcgcgacgcttaaagtgagtggttgcgcaccactgagcgcgacgagcgtgcttcccccggttttcctggtggagggcaaagcgcaggatgggatggagatcgtcaaggccgcattcgctgccgtgcgccagggtttcgggggcgcgatccatgccttccggcccggaagactatgcggattcgtgacggattccccgtacgccaatggcatggcctggcccatacatccgggtgagcccgtctatggcctgtcagtcacggcaggcagccttctggagaccgttgtcgcagcctatcgggtgctgagtgttccggggctggagcccgcgctccccatggaaggcacgctggaggcgacgatggagtggccgcgttccgaaacctttcgcattcccgccagccagcagagaagggatcgaggcatccgctacgcgcattgtggattcctggcgatcttcatgcatgagttcgcgcatgtggtgagaggccatctcgggtacgaaaccgccacttgcggcagtctctacatggatgagcgtcctctgatgccggcggcaggcgattcgaagatgcgcctgtacatggagtcggacgcggatgaaatggcgggacggctgctggcgacctggctgctgagatcccggccggacggcagcccgatggacgaggcgaagaagctctcgatcacctttgatttcctggtgggtactacgcttgccttctcggcgtttcccagggtgcagaacgcctatcacaccgggacgctgcgtgcctgggcgctgatcggcgcgatgcttcagcatgccggggtgggcggggcgatggccgatcagtggatcgagtccaatatgcgcgaggtcctgctgtgcatgcaggcggcgggatatcctgcggaaagctacctttattccgcggcggaggcgaaggaactcatgacgaccacgcggagcggcatgcgcaagcatcagcgggactggttgcagcgcgctccgttccaacaggtgaagccgagcgccacgcggtccaagtga

SEQ ID NO: 529617 - DNA, 849 bp, Stenotrophomonas maltophilia
atgtcgttgatgcccgaattgcggtacctcccggagagcaaagacgagctgctgtatcactactgctccgcagataccctcctggcgattctcagccacggaacccttcgtctttgtgatctcacaacgatgaacgactcaatggaactgagttggggaacgaagctgctgggagagattctggccagcgatgaagtgaccagggtggtcaagaccaggactcccattgatgagtacctggcgtcgggccgcaacatgttcaaggtgctcgcctgctgcttctccacaagaagagaccagctcagccagtggcgtgcctatgcgaacaacggggcagggttctgcgttggtttctctgcgaaatccatcgccgcgatgaaaggtagcaagattcgcgtttgttatgacgttgatgcgcagcgcagaatgctggggaatgcgttcgagcagattctgatcagttccgcaacgccggcaggacttgatccggaaaaagtgaggtgggccatcatggggctgcttatagaaacggctggcatgaagaatcccgcattcagtgaggaatccgaggttcggctgtccaatcctatcgtcgtggacggtgtggggcccatgctgaagcttgcctacccctcgcgacagaaggcggcttcagagctgaaattcctcatgcgcggtacaaatcctaccccgtactcggacctgcggttgcccgacagggtcgaggcaatccgcgaagtctggatcgggccgcgagccgaagccagcgaggtgcagatgcagatcatgctggggacgatgggttatacgtcgacgcgcgttttgaaatctgcagcgtcgtacagatag

SEQ ID NO: 529618 - DNA, 2766 bp, Stenotrophomonas maltophilia
atgctcaactcccccgagagcatgtacctggtctggggcccggagctggtgttcctgttcaatgatgcctatgcgccgatcctgggtccgcggctgccgcaggcgatgggcgcgccgctccgcaccctgtgggcggacgcctggcctgcggtacgcgagccgatcgagcgcgcgttcgccgggcaggggtcgcgtttcgagaacgtgccggtggcgatgaaccgctacgggcaaccggaagatacctggtggacgttctcgttctcgcccctgtacggcggcgacgagcaggtggcgggcgccttctgcgtgaccaaggaagtgaccgggatgatcgtggcccagcagaagctggcccgcgagaatgagcggttgatcgcgctgttcgagaagtcgcccatgttcatggccttcctgaccggccccgagcaccgcattgcactggtcaacccgggctatgagaaactgatcggccaccgcgaggtggttggccggccgttggtcgaggcccttcccgaagctctggaccagggctacgtggatctgctggatgaggtgtaccgtaccggcgagccgtatatcgggcgcaaggtggcctacgacagcggggtgccgcagcccgggtttggcccacggcatatcgttgatgtggtgttccagccgtgcaaggacgaagccgggcaggtcaacggcatcttcgtgcagggcctggatctgacgccgcaggtcgcgctggaacagcatctttcgctgaccgaggcacgccaccggcagatcatggacagcgcccgcgactacgccatgatcgccaccgacatggacggtctgatcacgctgtggaaccgcggcgcggaagagacgctgggctggcacgaaagcgaggtgctgggccagcatgccgggctgctgtatctgcaggacgatctgcaggcgaaccgtttccagcacaacatgcagcatgcgctgctgcacggcgggctgagtggcgaacgctggctgcgccgccgcgatggcgggcgcttctgggcgcagggctcgatgacgctgctgcgcggcggggaaggcgaggcggtgggattcgtggtggtgttccgcgatcgcacctccgaacgcaccgccgccgatgcattggcgcagagcgaacggcgcctggcggcgctggtctcggccgcgacccagtcgctgtattccatttccgccgattggcagcagatgagcctgatctaccggcagggcgacgcggcggagctgcacgatgcgcagggttcctggcgcgagcagctggttcacccgggcgaccgcctggccgtggatgcggccatcgacgaggcgctgcaggctacgtccgcgctggaggtggaacaccgcacgctgctgccggacgcctcggtgcgctgggtgcagctacgcgcggtgcctttgctggatgaccatgggcgggtgaaggaatggttcggcgcggcctcggacattaccgaccgtcgcattgcccagcagcgcctgcagcagctgacgttgacgctggaagaacgggtgcaggccaggacggccgaactgatggcgatggaggagcggctgcggcagggccagaagatggagtcgctggggcagttgaccggcggcatcgcgcacgacttcaacaacatgctgaccgcggtatcgatggggttggagctgctcgaaatgcgcgtggagcagggccgcgtggatgggctggagcgctacctggagatggcgcgctccggtgccgaccgtgccgctgcgctgacccagcgcctgctggcgttttcccggcggcagacgctggcgccgtcgtcggtgcgcgttgccgcattggtgagcggtatgctggatatcctgaaccgttccatcggcccttcgatcaacattgaaacccgtttcgaggatttcgaggatgcggtacgggtcgatgcaccgcagctggaaaacgcgctgctgaatctgtgcatcaacgcgcgcgatgccatgccggggggcggcacgatcatcatttccagcagcaccgaagcgctggcaggaacgcgcagcgagcggttgggactgccggctggtgactacgtgcgcctgtccgtgcgcgataccggtacgggcatggatgccagcgtcctggaaaaagtcttcgagccattcttcaccaccaagccgatcgggcagggaaccgggctgggcctgtcgatgatctatggctttacccgccagtcgggcggccaggtggacgtggaatcggcaccgggtgcgggtacgaccatgcatctgtacctgccgaaatccgatccggcgcaggcggtcgatgtcgccctgccgagtgcgatgccactgaagccggcctcggccagccgatcggtgctgctggtggaggacgaggatgcaatccgtgggctggtgcgcgatgtgctttcgggactgggccacgcggtgaccgaggcggccaatggcagtgaggcgttggccttgctggacagtgggcagcactttgatctgctggtgacggacgtgggcctgaccggcacgttgaacggccggcaggttgccgacgccggacgacagcggcgccgcgacctgcccgtgctgttcatcaccggctatgccgcgagtgctgcggtgggcggcgagcatctggagcctggcatggagatcctgaccaagccgttcaaggccgtggagctggaacggcgggttgatcagctgctgtcccgatcgggcagggaatggagcgttgacgcgcaggatctgcccgccgcgtaa

SEQ ID NO: 529619 - DNA, 1215 bp, Stenotrophomonas maltophilia
gtgaatctagccaagcgaagaaattctatcctttcactacccgaatattcacttcgaagtagcgagtccaacaaatttacggcctctgacgacgagctcgataatcttagatttggcttctttggagaaatcggcagcttgctttcttcagtcaagcgaagcattcgagaccaagttaccgagagtcagagcgagctggcgagcgaagagcttggagatgcgctctggtacttattcggggtggctcgcaccctaggtatcgctcccgactcgcttggcgaggcttgcatcagcactcttcgcactcgtgcaaacgagattgccaaattgccagcggccccgatcacttttgcgaacattgatggtgtgttggactcccgccacggtcaatgggatatcacgcgcacccagcaattgggctcaatcgcgaacgcagcagggatgttagcagcgacagctaaggagcaactgaaggcaatggccttacccgccgcgactacgtatctcggtaaaatattctctgagtgggccctagcgtgcagtgcatttgaactccgaactgaagatgtcgctcgcgagaaccttgcaaagatcgcggaccgctggccagccaaactgatttttcatccactatttgatcctgaatcaatctacgaggagcatgagagatttccgagagagttcagcattgaatttattgaacgccaaagttcaacctacccctacgtagttcaacgactgcgccaggttaacatcggggatagattaactgataatagcaatgaaccggacggctatcgtttccacgatatcttccatctcgcttatgtcgcctatcttggctggtcccctgtacttcgcggacttttgaaactgaagagaaaatccaatcccgtaattgatgagaatcaggacggcgcgcgcgccatgattattgaagagggaattgcaacatggatcttcaatcatgccaaagatcgtgacttctacgatggcattaaaccgggaaagcttgactttagcctgctgaaacaaattcgcagcatggttgatggctatgaagtgggctcatgcccactatggcagtgggaactagccattttatctggatttgaagttttcagggagctaattcggaataaagggggaaccgtgacagttaacatgattgatcacacgctagaattcaccgctccaaccgaccaacgaaaatga

SEQ ID NO: 529620 - DNA, 678 bp, Stenotrophomonas maltophilia
atgacaccaacaagctttgtccgtgaaatcgcgtctctgaagatgagtggcgtcttcaacccctattccgacatctgccctgtccacgacctctctgacgcagcggctatacgacgcaagaatcttcgagcctacctagcctcgacaaaggaactcggtgttgacaccatctggatgggcagggatttgggccatcgaggaggtcggcgaacaggaattgcgctcacggatgaagtgcatctgatcgcgatgaacgatctgtatccaggtcatgcctataagcgttcaacgcgaggacctgctgtcgcggagagaacggcggatgaaatatggtccattctaaagcaactctccgttccgccatttctgtggaatgtattccccctgcatccacatgagattgataatcagcttagcaaccgtcgttttaccgcaaaggagcttcgagaagttgaggacctcaacgcgaccctaatttcttggttaggagttcgccaaattatcgcaatcgggcaagacgccggcgcatattcctccagatttgacgtaaaagtcaccaccattcgacacccaagctatggcgggatcagggcttttcgcgcggggatgcatgatgcatatgggcgagagtggaagtctccatctcatatatatcagggcacactgagcctatcgtaa

SEQ ID NO: 529621 - DNA, 798 bp, Stenotrophomonas maltophilia
atggcaaagctatttaccggcgacaggatcgcaccagtttggctcacagcgtgccgctcattgcatgctgagaatgatcgtactgcgttaaattacgtgctagagataaccaatccgagcgaactgttgccgccggaccagattatctatgacactgtcgacttggctctacaaacccacacgcaggatctggctttggcgactgtggcgggcacaatctttccggatcgaatgtaccggaagcatggtcgaccgggattctatgagcactacttggacgcgattcggcgagggaagaagaaggggacctgggggacatacgcttggagattaatggagcgtcgggatcctaggacggatcaaatgttcaatccccttgagagggtagtgagaaaactccgagccgctcagaatggcgcggagtggaaggctgtttatgaacttggcgtcctgcagccggaggatatggtcgcatctgaggcgggtggcccatggtgcgaagtgcctatatctgggccggcatctaggccgaacagaaacttgccttgcatgagtcatcttagtgtcaagttgttcgaccagcgtgtgcacgtaacagcattttaccgcgcccattcgtacgcggcgcgggctcttgggaaccttgttggcataagtcgcctgcagtctttcctggctcgcgaatcagggttcggggttgggacgctaacgtgcatcagttcacttgcaaatctcgatgtcgaagcatttggtggtgctcgggcaacgacggcgctgcttaatggtttgccgccttaa

SEQ ID NO: 529622 - DNA, 624 bp, Stenotrophomonas maltophilia
atgatcgtcacgcaggaagtttcggcgctgcttgcgttggatgccagggatcagggacggcgtcgtacgtgcctcgccttctctctctgcgcactgggccactctgcttccccacatccagaggggctcagtccagagtatctatatctaaatgccgcgagatcaatgcccaattggttccctgggttaggcttaagtctccacgcggccctggctgcctctggaagtgtggcgcttgatagagattgcccctatcagcccgaagatccgatgctccctcttccgccgttgcctaaccccctagactgctatgggcatcaggccggggaattatcaaccgatgtaggggtcctttcggctgaactccaacaaggtagggcagttggattgggattaatgttgactgagaacttctaccgtccagtggaaggtcgcatcaaggatggcgggaatgttgttccagactctgggcatgcggttgttgcggtggccttgggggtcgaaggaggtcagacccactttcttatcaggaacagctggggtggggggtgggggactgaaggaaaggcgtggatatcttcgtcatacatcgcgcagcacacgatttgtgcatttggagtgtag

SEQ ID NO: 529623 - DNA, 996 bp, Stenotrophomonas maltophilia
atgctcagctatcagaagaattcagcgctacgtgctgcaggcgtaatcaaagagttcggtgctgactcgaggatcgccgaacagggttacacccgggttgatccggaatggattgctgctcaggcaggcgttgttgtcatccgtcgaccgatgaagaccctccttggtgccttcgttcgggaaagtgcgccggggattattctgaattcacagaggccgtcagggcagacgcatcttacgtgcgcgcatgagttggggcatttctttcatgggcactcttctgcggctgatgatcggattcaatacgggcagggtgcgtccaagtctgagcttgaagcggactggtttgcatacagcctcttgacttctaggtcgactatatcgctcgctatgcggcgaaaaggttggaccgtgagttcattgaaaaagccagaaaatctctaccagctttcactcagggttggagtgagttacacggcaatggcgtggagcttggtccgcttgagtatctggaatcgatcagatgctgagcgtacccaggcagtagagccaattgatataaagagaacaattttggcgcgacaggactttgatcctagggctgacgtctggcttcttgatgacggtgatcgcgatttggttctggaacccgcgatgggtgatcaggtggttctttcgctaccgaatcatgctccttccggctatctctggtcagttgaagaagcccgcagcgaggggttctgtctggagcagaaagtggaatgtagcagcaatgagctcattggctcgcatgaaacccaatctctccttctcgggccagaaaatcgctgtagatcggccggccgcaggctaccatttgagctgagtgagcggcgcccttgggaagctgctgcggcgccgatatcgacctatgcttcgtcattgagcttcgaggcaactggagatgggctttcctctgcagccaagctggctctagctaaaggcatatcggcataa

SEQ ID NO: 529624 - DNA, 276 bp, Stenotrophomonas maltophilia
atggatgagaaaagggctgagctggttcgaattcttggggagttctgggatgagaatgaaatccctggcgacgggggttgttcgggcgtcggcggtcttggtgcctcgatggattctctcaccgctgtcgaggtgctcgtcgagcttgataagctctacggcaagaagattccagtagattcggttattcagcggggcggatacaaggataaagatgagtttgtgcagaagctcgcggaaagtgtggaagaggctgtgaggagtgctaaagcatga

SEQ ID NO: 529625 - DNA, 771 bp, Stenotrophomonas maltophilia
atgtctcgcatcttcatttccggctcatccactggcctcggcctgatggctgcagagctactggtggaacaaggtcacaaggtggtgctccacgcccgcaacagcaaccgtgcggaagatgccttgcgtgctttgccacaagctgaggctttggtcatcggcgacgtggaaacagtcgctggctccaaagacctcgcggcacaagtcaacgccctaggctactttgatgccatcatccacaacgccgcagttggctaccgggaagggcaccgagtgacgagcgatgggctaccacacgtcttcgcgataaatacgctatcgccctacatccttacggcgctgatccaacgcccatcgcgtctagtctatctcagttccgggatgcatcacggggcgcactctaacctggacgacgtcctttggcgcaaacgtcgctggaatggttcggatgcttatgccgaaagcaagttgcacgatgccatgctcgcattcgccatcgcgcggcgttggcctgatgtgcgtgctaactctttagagcctggttgggtgccgacaaagatgggcggaccgggggcaccggacgacatggatcaagcgcaccgaactcaagcttggcttgcggccagcagggattccaaaaccgaagtctcagggaaatacttctatcacttgaagcgcaaggcagcgaaccccaaagcgctagatccaatgctccaagaccgcctcatccgcatctgcgaggagatctctggagtagcgttgcctgattga

SEQ ID NO: 529626 - DNA, 1200 bp, Stenotrophomonas maltophilia
atgcaagctcccgccatgaagcgggcggcgcaggccgatgccgctcttgcacactcgtcccgcccggcaacaggcgtcatcgccgcactgttttgcggctacttggccgtcggtctgccgctcccggttatccccctgttcgtccacgaccatctcggttacagcgacctcatcgtcggactggtgattggtatccagttcttggcggcagtgctgacgcgcggctacgccggccggttgaccgatcagcaagggggaaagcgttccgccctccaaggcgcgaccgtgtcggttctcgctggactgttctactgggttgcttccatgcccggcatatcgcctgcggccagcttggcgattgtcattgcgggccgcctgattgccggcttcggcgaaagtcaattcgtgaccggctgcgtttcctggtcgattgcctccgtaggcccacagcgtgccggcatgtcgatgtcgtggacaggtattgcgatgtttgctgcgctgtcgatcggggcgccgttcggcatggccttataccagagctacggtgctgctgcctccatgatcgcttgcatcgtcgctcccgcgctggccttgctgatcgcgtggagggcagcgtcctatctgtcgcctggcggtgcgcggctaccgttctaccgcgtggtcggccggatctggcgcgaaggcataggcctgatgcttcaaggggttggcctgtccgggcttacggcttttgcttcgctgttcttcgcaacgcgtcactggagcaacgccgggcttgtgatgacggcctttggtgtgggcttcatcttcgtgcgtgcagcgttggggaatctgccggatcgcatgggcggctaccgagtcgctgtgtggtcgttggcggtcgaagcacttggccaagccatgttgtggctcgcgccgaacgcttctgtggcgcttgccggcgcactggtgactggtctcggctgcgcgctggtgttcccggcgctaggcgtcgaagcactcaaacgagtcccaccggccaaccgcggcagcgcgatgggcgcattcgttgcctttctcgacatcacctacggcatctcgggaccagccgcaggcgccatcgccggacatttcggctacgcctccgtctacctgttcggcgccgcctgcgcgctgctaggagtcctactagtagctgcatctcgaaatcagcaatcttga

SEQ ID NO: 529627 - DNA, 1326 bp, Stenotrophomonas maltophilia
atgaatacgcatctcaccctcttcaagggcggcaccatcttgacgctggatgccaaggttcccaatctcaccgtcggcgatgttctggttcaggatggccgtatcgctgcggtcggcccggccttgcaggccgacgacgcccagatcatcgacgccgccggccacatcgtcatgccgggtctggtcgatgcccaccatcacatgtggctcggcgtaatgcgtcgcatgatgccgaacgtggacgatctgttcgcctacatcgatgtggtcgccgaacagttgggcgcccactaccgtccgctcgacatgtacctgagcacaaagctcacggccgccgcgtcgctggacgccggcatcaccacaatcatcgacgcctgccacaactcgcgcagccccgagcacaccgatgccgcgctcgatgcgctgaaaacgaccggcattcgtgcgctgcacatggtcggggcggcgatggacaagaaggcctccgccacccacctgcctggcgaccttcaccgactggcgcacaactggaacagcgcgggcagcctcgtgcatgtgggcctgttcggccagctcaatctggactggtggaaggtcgcgcgaggcctcgacatgcgcatcctgaccgagttcattggcgatctggccaagctcggcccggagttctctaagccgggcgtgttgggcacgcacaacatcttcaaccattgcacccgcgtgccgcacgagacgtggcagctgctggccgatgcaggcgtgaacatcacggtcaacccgcgctccgatgcactgttcggcttcgacgacgagacctttgcctatcagcaggccgtggatcatggcttgacaccggggctcggcattgacctcgatacggcattcggcagtgacatgttcggagagatgcacgccctgttcggtcagcagcgctcggcgatgcgctatcggcgttttcgtggcgaagccggcgcaccagcgccgatctccgtagaagacgtgctgaaagccgcgacggttaatggtgcccgtgccgccggcctgcaggatcagatcggcactctgacgcccggcaagcaggccgacatcatcatggttcgtaccgacggaatcgcagtctttcccgtgaccaacgccattggcacgatcgtccaagcggtcgaacgcgccgatgtggacaccgtgatggtggctggtcaattgcgcaagcgtaacggccaactgctcggtgttgacttgagcaagctcaatgcggatgccaccgcttcgcgtgactacctcatcgaagcgagcggctactgcgccgatcccttcggcaccgccgcgtaa

SEQ ID NO: 529628 - DNA, 912 bp, Stenotrophomonas maltophilia
atgagttccgacggacggctgctgtcagacatgagcgtgttggcggcggtggtggaggctggcagcttcagccgcgctggcgaggtgctggggctgtcggcgtctggggtgagtagatcgatctctcgactggaagagagattgggcgtgcggctactggatcgcaccactcgcactcttcacctgactagcgaaggcgccggcttgtacgagcgtgccgcgccccaccttgagggaatcgaggaggctgctagctatgtatccggtgcggccgtcacggttcgtggcagcttgcggatcagcctgaacccgatctttgcgcgtcacgttttggcacccaagctgacgctgctgcgcgagcgccatcctggactcgatctgacggtcctgcagcaacccgacgtgggcgatctggtgaccgaaggcatcgatatcgctgtacgttttggtccccaaccgccttctactatggcctcacgtctgttgcttgaaacgcgagttctgactgtggcgtcacctacttatctggcgcgacacggcagacccaatcgaccagaggaactctccgatcacgattgcatccagtacattgacccccgcagcggcaagcctttcccatgggaattccaacgcggcagggaagtcgttcccgtgaaaactgaaggtcatctcaccactacagacgtggatttcatggttcaggcatgcgtgggtggatcgggcatcgcccaggtgcttgcactcagcgttggcaacctaatcgccagtggtgaactggttgagctgtacccagattggccgggcgaaacatacccgttgtacgccactcgtccatctcgccgcctagcgcccgcggcggtgggggccttcttggatttctgcacagagatttgtcgcgaatatgcagcgtaa

SEQ ID NO: 529629 - DNA, 417 bp, Stenotrophomonas maltophilia
atgaagatggttttctgcaccttgcttatcgccgtgggcctgctggtgggcgacgccgcacgtgccgcaccggccacggatgccggccagatccaagcgctgatgaagggcatatgggagcgcccagactcacgcctggacatcgaccccatcacagtacagggaacccatgcggtggccggttggacccagggaacccatggtggtcgtgcgctgctacgtcgggtccaaggcaaatgggaggttgttctgtgcagcggcaatgccttgctggaggagaaattcttgcaggacgccggagtggcgacgcccgatgcgaaactgctcgcaactcgcacgaaggcagcggagagtcgccttgccaaggcaagggttgcccagttcagccggttccagggggttgtgcggatgaagtaa

SEQ ID NO: 529630 - DNA, 1920 bp, Stenotrophomonas maltophilia
atgtctcttccttgcccccgaccattgacgctcgcctttgccgcgctctgcgcgcctgcggcccatgcgcagtccatcgaggccacctcgctggaccgcatttcagtggtcgcatcgcccatcgtcgaatccaacgaaatcgacgcacacggcgcgctgaccacggttgtcggtgcccaacagatccgtgatctgaacgcgctggacctttcctcggctttgcgtcgcacgcccggcgttactgtctcgcgcttcaacccggtcggcgccttcggcggtggcgagggcggggcggtctacatccggggccagggtgcgagccgccccggctcggagatcaagacctacatcgatggcattccgttctatatgggggtctgggaccacccgctgctcgacctgctgcccgtacacgcagtgcagcagatcaatgtgctgaagggcccgcaacctcaccggtacggcaacacgttctccgccatcgacctgaccaccacggccgctcccgatcaggggcagcgtaacggcctgcagctcaccggtggaagctacggaacggtcaccgaaaacgcactgctcagcggacgcacgggcgacatcgactacgtggtggcccaagggtatgcccgttctgacggcgcccgatcgcacggggaaggacgcctgctcaacggtatggccaagctgggctatcgtgtggatgatcactggcgggtgggactcacgctgctgtccgctgacaaccgggtgtctgatcctggcgaggtgggcagacctgagacccgctctggccagttcaatacccgcggcaccctgatcacggctacagtgcagcacacgcacgacgaggcatccggcgagctgtcgctgtaccgcaacagcgggcgtggcagtgcactgagccagcccggcttggacggcgacacgctttcggactttgatctgaaaggaatccgctggaccgagtcagtgcaggcaggccgcggtagcgtaagtggcggcgtggacatcgaccagatcgatggcacggtgcgcttccagcgtctttcgccggcgccgcccgcctacttcagaggaccttccctgcgcatcgtggctccccacctggcctatgcccatcccattgatctcggggcccgatggaccctcaccccatcggccggtctcagggcctacgaccacaacgtgtttgaaaacaccttggcaccccacgtgggtgtgttgttgagcgatgggccggtgagcctgcgcctgaacgcttcgcggggcgtgagctacccgggtcaaggcgtggtagtgctttcgtcgctgataccggcactggggaaaagctggaaaggcctgaagcctgaaacaagcaaacacgtggaaatcggcgcgcgtttcgaacttgcaccgggcgtcgtagtggatgcgtcgttgttccaggacgactaccgcaaccgctatgtctttgccttcccgccggcagtggcaatgccgatgttcaccaacctgggcagctatcgcatgcgtggcggagaggccacggtgaccgcggaggctggtgagcacgccgagctgttcgccggcttcacctggttggacgcggatctggcgcaggcaccctatgcgccgcgccgggcgttgagtgctggtgtgaatacccgatggcacgcctggcgcctgagtgccgacgcgcagtatcaggacgccatgtacgtgctgggcaaggcgcgatcggcagaaggctctggcttcagccgcgtgtctccctttgcagtggtcaacctgcgcgtggcgcgcagcgtggccgcactcggcaacgaaggcgaagtgtttgttgcggtggagaatctgctggatcgcgattacgcctatcgcaccggctatcccatgcccggccgcaatgcgcagctgggcctgcgtatcggtttctga

SEQ ID NO: 529631 - DNA, 477 bp, Stenotrophomonas maltophilia
atggaaaaggacgagattggaccctacactcgccgcgtgaagcgtatggacaccctccaccgatggatgacccgcgccgcgttgctggcggcgctgctgatcgtggccggaccggtacttacgcgcagcctggtgcatccagcaccggggtccctcgttgcatcggacatctgccacggcgtggcgaacgtcccagcgtccgatgccctcgaatcatcgccatggcttgtccgtggcagcccgcaggtgctttcgcacggcgaccttgaaccgaagggtacgcagcaggccacggctgaccatgactgcgcctactgcgtgctggcgggtcgtttgctgggcggcatctccgcgctgccctggacgggcagcatgctgccgacggtcgcccccccgccggcagcacctcagcccctgccgctgctcacgcgcgcggaaggctactgggccacgggtccccctttgcgccggaactga

SEQ ID NO: 529632 - DNA, 204 bp, Stenotrophomonas maltophilia
atgaatgagtccatgcaggagcacgccagcgatcattgccgtggcgaagatgatcgcgaagggctggccggttcccagcaacgcgatggctgggccgggacacactccggccagtccccaacccagaccgaatatcgccgcaccaatgaccaggcgccgatcgatgatgcgatgggtgggaatgtgcagcgatgcggcaagtag

SEQ ID NO: 529633 - DNA, 1278 bp, Stenotrophomonas maltophilia
atgggcattgggaagaagcctcccacttccgcgttagatgcggcacagagaattcgtagttatgtgcacttcgatacgccgctttcaaagaaggcttgcgccgcgctggtcaccaatccattgcgtgtggaacgtcatgcctttctcccgtttcttcggcatgacgtggtgcgcgcaaagcttaaacgccttccgggtggccgggtaatcaaaagcacaaagattcgggacattcgctatgccgctcactctgatgcggccatctatagctactacaattttttgttgtcacaaaggtatgaggcgcttctggcggactatgcgctcacgaacaatgtgatcgcatttcgcgctctggcaaagtcaaacgtcgattttgcgcaggaagcatttagctggatatcgggagagttgccctgtgtcgcaatggggttcgatgttaaggacttcttcgggagcctggaccaccatttactaaagactgcttggacagaggtgctgggcgttgagcgcctacccccagatcacttctctgttttcaagtccctaacgcaacacgcgtcggtcgagctgatatcggcccgacgcgagcttggcctaagtaggtcaagcctgagtcgcatcgataggctgtgtggcgcttctgagtttcgaagtattattcgatctaaaggcctaattgaaacaaacaagaggaatcgagggattccccagggatctcctatcagtgcagccctttccaacatctacatgtggcggtttgaccttcgattgagggatgaggttgaaaaatttggcgggttctatcgccgatattgcgacgacatcttacttgtcttgccacaatccgaaggggtcgagtcgaaatttactactctggtcgagcatgagcttcttgctttgaggcttcagttgcaatcgtcaaaaacacttgtctgtcattttaattccgcaggtaatgataagccgcttcactatcttggattggttttcaatggcgcgagtgtcggcttgcgagtggcgggcgtagctcgcttttatcagaaaatgcggaagggtgttgggcagctgaagggatcgaagcgcctcgacggaaagacccctattttgatccagcgccgacgcctgcttaccaatcgatacacagagcacgtctccccaggcaaccggagctactttagctacgtcaagcttgcagctagtaggacgaggtcggtcgctatacgcagacagcttaggctgcaccgggctcgcttcaaggccctatcaagggactag

SEQ ID NO: 529634 - DNA, 240 bp, Stenotrophomonas maltophilia
atgtctttgaacgaacagcttgaactgaaagatggcgaaagacttcgccgagacagctcccgggagactggcccattagccaacattgatatcgtaaattactctgttctagatgctcaaggagatgtcatcggtaaggtcgaatacaccgaagacacggcaatcaagggcttcaaagtcacgcgcaaggccgttaggactgacttggaaggcaaagtagtcctacagaagttctggtag

SEQ ID NO: 529635 - DNA, 546 bp, Stenotrophomonas maltophilia
atgaatctcggccttggcggcagcgcgttgctcgaccctttcatcgctcgcgtaatccgggaccaacccgccgatctcatcagcctcaagctcggcatcaacatcgtcagtatggacctgatgcggttgcgcgccttgggcccagctgtgcacggctttctcgacacgatccgcgatggccatccgacgacgccgctgttgatagtgtcgtcaatcttctgccccatccacgagcagacacccggtccctgcgcacctgacttctcggacgggcaactcaagttccgcgcgacgggggacgaaagggatgttgccaggggcgctctgacgctcaccgtgatccgttccctcctttgtgcaatcgttgcacaaaggagggaacgcgaccccaacatccattatctggacggacgaaatctctatggggagcaggaccatgaactgcaacctctgcccgatcggcttcatccggattccgctatccacaggctgatcggcgagcgatttgcagcgacggtttttggtggcgattggcccttcggctga

SEQ ID NO: 529636 - DNA, 333 bp, Stenotrophomonas maltophilia
atgagggcacgtatacgattggcgagagtggaggatctcgagcaggtcgcgatgctgttcgacaagtatcgccagttctacgcgcagccggcagatctgtcattggcaatgcagttcatgagtccacgcctgtcagatggttcttcgcttgtgcttgtggccgacgcggatcggggcggacttgtcgggttcacccagctgtacccgctgttcgactccatcagcgcaagcccgagcttcgtgctctatgatctttacgtcgacaaacgtgcgcgtcgtacgggtgttgccagcagcctaatgatcaacgcagttgaaggcgcgttgacttga

SEQ ID NO: 529637 - DNA, 630 bp, Stenotrophomonas maltophilia
atgaccgtcttgtcagagccctattcagcgttgctccgtctgcagatatcccacgaggagctttccagatggctggcagcgccggtgcctccagcatcccgttggtctgactggcgaggcatctccgggcagtggctcattgccaacggccagcacattgcatcttcaagcgaccaggagttggatcacctgctcgcggactgccaagcgctgttggcgcgctaccccgacaatcgcgccgcattgaaggctttccttgcgtcttcgcaggccgagaatatccagattgccgcccatgaccgcaccggtacgcactttgttgcaggatcgcttgcatattcggagagcctctacgatctcatcgcgtttctggctgtggcacgaggcgccgccgacttcctgaagacgggcgaccggggtgtggcactgatccacgactatctctgggctgaggaagatgagcgggagaccgttgctgcgattgctctggccggcccgggggaatccggattcatgtcttctagaggcctggataccgccaccgagcccttcgaggcattggtggaggccatgctggaaggcaaggacgacccggactttcatccgcgcaaccagcttggtcgactttga

SEQ ID NO: 529638 - DNA, 957 bp, Stenotrophomonas maltophilia
atgagggccgatgctgtgaccgtcagcctgaacccggccatcgaccagaccgtgcggctggcgcggctgcagccgggtcacgtgcaccgcgcccttagcacacgcgatgacgccggcggcaagggcatcaacgtggctgcctgcctggccgactggggtgtaccgaccacagcgctgggcgtgctcggcgacgacaacgacggcgtgttcggcgctctgttctatgagcgcggcatcgcagacggctgcctgcgcaagccgggccgcacccgcaccaatatcaagctggtcgaagaggccaacggcgagaccaccgacatcaacctgcccgggctgtcactgcgtgaggccgatctggatgcagtgtcgcgccagctcgccgccctgctgcagccggggctgccggtcgtactgtcgggcagcctgccgtccggcctgccagccgatgcctgggcgcgattgcaggcacaggccgccgccgcaggtgcgcgggtgttgctggacaccagcggcgacgcgcttgccgctgccctgggtgacgcacggggagcactgccctgcgcggtcaagcccaatcgccacgagctggaggcctgggcaggcacgccgctgccggatcgaaatgccctgcgggcggcgggcgcggccctggttgagcgcggagtcgccctggtggtgatttcgatgggcaccgacggtgcgctgttcattgatcgcagcggcgcgctgatcgcgcgacccatgcgcctggcgcagggcagcacggtgggtgcgggtgacgcgatggtcgccggcattgctgctgcatggctcgagccctcccttgacctggccggttgcgcacgactggcgacagcgttctcgatgagccgactggcaagtggcgatgcacgacgactggacccggcacaggtgcgcgaatggtccggcggtgtactgatcgagcggttggattga

SEQ ID NO: 529639 - DNA, 861 bp, Stenotrophomonas maltophilia
atgtcttcagcttcgccggggcgctggcgcctcatttcccgcctgttcctgtgggcggcaattctgctggtgatggcactggcaaacaccgcggtcgaagtgatggatgtccagcgcaggggcggggcactggcgccctgggaaccgctgatctgggagatcaccagtgtcaccatgatcctgatgacccttcccctcgtgtggtggggctgcgcgcgctggccgctgcatgaggacacttggaagcgacgcctcccgggctacgtgctggccagcatcggctggtcgctcctgcacgtgctgggcatgatggcgttgcgcaagctcgcctacctgggtttcggtgccagctacgtggacggcacaggctgggcctcacgcctgttctacgaatacctcaaggatgtccgcgtattcttcagcttcgtggcgcttgaacacctgatgagctggttggtacgccggcggcagggggaagcgcacctgttcgcggcgccggaagatgccccgcccgaggcgccggttgatcggccgcagcatttcctggtgcgcaagctgggcaaggagtttctggtcgccacccacgatgtggagtatgcgcaggcctctgggaactacgtgaatctccgggttcgcggccaggactatccgttgcggaccaccatggccgcactgtccacccggctggatcctgcgttgttcatgcgctgccaccgcagttggctggtcaaccgccgccacctgcgctcgatcgaaccggccgatggcggcgacgcgatcctgcacatggccgatggtgcccaggtgccctgcagcaggcggcaacttcacgcactgcggcaggtgctgggggcaggttag

SEQ ID NO: 529640 - DNA, 1239 bp, Stenotrophomonas maltophilia
atgaatcgacgccatgatatcgacgcgcttcgcgtcttagcctttgcgctgctcatcctctaccacaccgccatggcgtatgtgggggactggggattccacctgaaaggcagtttcaccaccgatgcactccaatggccgatgcgcctggtgaacggatggcgcatgtcgctgttgttcctgatctccggcgtggccattgcgctggtgcggccgcgcatgcaaagggatcggttcgtcctggttcgcagctggcgactgctgctgccgctgctatttggaatgttggtggtggtaccgatccagccgtactgcgagggcgtcagcaggggcacggtcacgccgggcttctgggagttcctgctgcgctactggcaggtccggccctggccggagggcagcttcgccggcgctcgcttcggcatcacctggaaccatctgtggtatctggcctatctctggacctatacggtggtgctggtgctcgtcatgccgttgctggacgggacgccgatgcgacgattcagccagtggctgtctgcggccccggccgtgatcctgatcggaatgccagccctggtgctgctgttgtggctggcgtggctggccccttctcacccggctaccaacacatttgtggacgacttctaccagcacgccaagtacgggtcggtgttcctggctggctatctgctgggtcgggagcccaggttctggcagcgtgtgcaggatcttcgctgggcgtcgttgttggcggccacgggcgccttggcctggtacctgtttctggaagcgctgggacgctggctgcccggcgattccccgctgcggcagtggccggagcgattctgggggctgcagtcgcagtactgcgaagtgctgtacgtatgggcgatgctgatgaccgttctgggctggggcaagcgctacctggatcgccccttcccgtggctgccgtactgcaccgaggcggtttatccctggtacgtgctgcaccagagcctgctgatcgggctgctgttctggttgaagcccctgcatctggcgccctggcttgagccgatgcttctgctgtcgggcaccattgccggctgcctgctgctgcatgaaggggtgatccgccggtcacgctggctgcgacccttgttcggactgaagctgggctcgccgcgtcgcggtgcggccaacgcggcgcgatcctcgctcccggcagccaatgcacggtgtgatgggaggtag

SEQ ID NO: 529641 - DNA, 2274 bp, Stenotrophomonas maltophilia
atgaagaaccttgtaatgctggcgctgttcgcagcggcggccccggcattctccgccccggcggcggcaacgcaggcagacgacgctggccgccaatggctggccggtgaccaccacgtgcacagcgaatggagcgtggactgggaccgccgcaccacgccgcccacgccggtgcgtggtggcgactctccctacagccgcagccataatgcggcacaggcccgggccttcggcctgcgctggatggtccacaccgaccacggtggccccggccactccgcggttacccgcgaccatgcctatcccgcgctgctgcaggcgcgcaccgatgttcccgacgtgatccagttcaacggcatggaattcgatgtacccgcaggcgagcacgcctcgctgatcatcgcgccgggcccgcaggagcgggagcagctggtcatcgccgagcgggacttcagccgcagcgagccactgcacggcagccgcgatagcgaacagcagacgcaggcggcgctggcctacctgcgcgggctggcccctgcgccactgatgttcatcaaccatccttcgcgcaccgcgaccggcatcggtgagtggggcgaggtaacgccggacgaactgcgcggctggcatgcagccgccccccaggtactggtgggcatggagggcgcccccgggcatcaggccatccgcagcgaacgcgggctgtaccgcaacgcggccgcgcccacattgggcggctacgatcagatgaccgcgcaggtcggcggcatctgggaccagatgctggccgacgacatccgcttctggatcaccgccaactcggactcgcatgtgaacctgcgcgacggcggacgcgattacgacccgggcgagtacagcaagacgtacgcatgggcgcggccagaggccgaagatatcctggatgccctgcgcagcggccgcatgttcaccgtcaccggcgacctgatcgacgcgctggagctgcgggtagccgcccgcgactccagcgccgggatgggcggcacgctggtgctggcgccagcgcagacgatgcagctggaggtgcgggcacggcaaccggtgcacgccaacgcgaacgggcaacacccggcgctgaagcgcatcgagctgatcgtgggcgggagggacgaggacggtgcgctgcagatgcagcggcgcggattcgacgcggcaacctggcggcgtgacggcgctggatcgtggcgcgcgggtcagtgccggtgccgccgcggggtggcttcgtgcgggtgcggggcaacagcaccggtgcggtggatgcacttgcggacgcgcccggcgaggatccgtgggcggatctctggttctattccaaccccgtcttcgtcagggttgccgagggtgctggcccgtcgcgcgagtgacgtagcaccggcgcacctttcgcgaggggggacgggcagggcgggggagtttcaattgcaaatgactctcactacacttgcaggattcctcccctccgtcgcccagtgcggcccatccgccggctatccaagtgaatgtcccgccccacctgtgcagaccgcaggcatctgtcctgagggcgccgtgtccgcgctaggccggggcacgggcggggccgcgaaccacagcgcatcagcagaggcagggctggccgagagcggctcatccaccggcgggagcctgctggccaaagcctatgcccgttggcgggcgcccatcctccgcggccttgcgcgcgtcagaggcggagacgctgaggacgccctgcacgacggcgcagtcaaatggattgcggcaaacccttcgctggcgtccagcgatcagcagggggcctaccttcgccggacggtaatgaacaccgtggccgatgagtaccgcgagcgcagcgcaggccgccgcgtgcagaccgtgcccctggcagatgccgaagacgccggccatcccatggccagcgatgaatcacagtgcccgttgcagctcaccgcccagcgccagcgcctgcagcgcctggcagacgcgatgtccgaactgcccgagcgccaacgcgaggcgttcgtgctctgccgcttcgatggcctgacccaggaagaggtggccgcccgcatgcagatctcccgccgcatggtggtcaagcacctgtcgcgagcggttgcctactgccaagtgcgggtacgctatgcgtccctggaacagatgcaggaactgcatcggtccagcgcggcaggcgaggggttggcgcctgccattgatgccgatcttccctgccgatga

SEQ ID NO: 529642 - DNA, 615 bp, Stenotrophomonas maltophilia
atgctgcgcttgctcatgcttccgctgctggcaatcctgtccgcgtgccaggacccgccaccccagcgccccgtacatgtgatgcttcgaccctacctgctgcggcccggcgttgacccggctggcggcaacgcggtggtggtctacctgaaccgcgacaacggccgcgtaagggaagggcccggcagagcggcagggacgccatggacgaccgtccgcctgcttgtgggcgtcggcgccacgctgcctgcctcgatgtcacttcgaggcgatgagcgcgtcactgatgaaggcgatggattccagcgactggaacgcgacagcgggtcccgggtgcacagcatgcttcgcttcacgggcccctgcggacacgaggtgcttgccaccgcatggtcgaacgactcgccgggcaggggtatctaccgtgcagaaatgcagatggatggattgtacctgcagtactcctatggcgcggagagccacgccgaccatctgcgcttcgcggcctgggcatatgcctggtacatgggggaaccctgctcgcagccgacgcaggacaccgagggggtatccagcagcagaacgcgcatcgcgcctggcgggcataccccctga

SEQ ID NO: 529643 - DNA, 1305 bp, Stenotrophomonas maltophilia
atgaggccacacctcgtccttactgtcgccctggcgctatgtcccctgcgtaccgcgatggccagcgaacaggaactatccgacgcggcggcgcacaggatcttccagcacgccgaacagctctgcgatggcgaccggggccggctatgggggcaatccctgtgcgggccgatgatgctggttgatccaaagcgccggcaggtcatcgcctcgcatgcagacgcacatggcgcgctgaaagaacgtggcaacgtattcgcaggccagcttccggcggatgcaatcgtcgccaacaccgccgtggactggtcgggtacacgctggacccagctgctctggcctttgccgcaggacgcgtcccgtcgcagtacgctgctcgctcacgaaatgttccatcgcctgcaaccggcgttacccatcatcgcgccgagcgagggcggaaacgaacacctggacacgcttgaggggcgctactggctgcagctggaatggcgcgcacttgcgcacgcactcgaagccaccgatgcggtggcactgcgcagcgcgatgacggatgcgctggcattccgcgccgagcgataccgccatttccctgcagccgcgcaggaagaagcggcgctggaattgaacgagggcctggccgagtacaccggtgtgttcgtcgttaatccaacgccgtcggcacggatccaggcggcgctgcatgaccttcgcgcacacgttgacgatcgcagcttcgtccgctctttcgcctatgccaccggcccggcgtatggcctgctgctggaccaggccgcacctggctggcgccgcgagctggcccgccacgcccgggatctcggtacgcacctggccgaagcggcacgcatccccatgcaggtggatgcaaccgcgctgcgcgccgctgccgcgcgccacgacgggccgctactgcacgaagccgaaatgctgcgcgaacaacagcgccttgcacagctggaacacaaccgggcgcgcttcgtgacaggcccggtcgtgcggttggatctgcacagcatgcgtatccagtccaatcccaacgcgatgcaacctttgccgggccacggcacggtgtatccaacgatgcggctgaccgacacctggggcagcctggacgtcgctgacggcgcgttgatgcagggcgactggaaggccgtgttcgtgcaggcaccggcaagcgcagacccgccgctacagggggcggggtggtcgctggcgctgaagccggggtggtcgctggtgccgggaacacgcaagggtgactacctgttgaaggcgaacccctga

SEQ ID NO: 529644 - DNA, 1128 bp, Stenotrophomonas maltophilia
atggcgcgattgttcatcgtcgtgggcgacagactcagtagtggcggcagcgttctcaccggctcaccgttcaccgatatcgagggacggcccatggcccgagtaggtgaccgcacgatctgtgcggcgcatgggcccggcacgatcattaccggcgatgccacgctgatcgtggatgggaacgccgctgcccggcatggcgaccggacaagttgtggatgctggctgattgcggggcggcagaacctggtttttgtggatcagggagttgcatcggcccccagtgcccaggcaccacccacggctacgacgcgccaggcaggcgccacttcgaacattccggcagagtcgccggatcgaagatccacgctcagatcaaggcgaagggcttcagtatgctgggccgaggatcacgagattgaggtagcgacaaatgcacatggacgctactacctcgtgcatgacgagaacgggaaccctctggacctaagcctgcaaagaaagttcgaaatctccgtaccactgaaatccacaggcgatgtgcaagtactggttcgtatcaaggcaacggctgtgcgaactggctcaggtgctggcgcaacagtttcgcaagaggacatggacgcggccaagtcgcggttggaggcaggcattcagacactgtggaacaacaaattcactctggagatatccgatgccccgtgcggcatcagaaccttccccatagtattcaaagtcgaatgggttgccagaggccatcactacgcaatgaatgtaagtccaagccaactgcgtgagcacgtcgtaaacatgaatatcaacgtgtggaaggaaacaaccacatggacctttgcgcatgagtatgcacattgcttcggcgtagctgacgagtattcctacgaccggatgaacacgtggacattgagatattaccgccccgatggaacattgagcccagatgccctacagattccagcaaacaaggcagatgacgatccgggcgccacaatcaattcaacccagaacaacaccagcgtagagctcaggcatgcgtggcagatcgctctggaagttcaagaatttctagcgcgccacacgggtaggagaatcgaatgcagcgtcagatag

SEQ ID NO: 529645 - DNA, 231 bp, Stenotrophomonas maltophilia
atggctggcgacatcgctacggccctgcaggtgccgccggcaacgttgagcttccatctgaaagagttgctacaggccggcctggtggagagcgagagccaaggccggaacgtctgttaccgcgcgaacttcgctgccatgactggcttgatcgagtacctcacgcacaactgctgcgcaggctcgccaagcgagcaatgcgtgccgacttttcccgagtgcaagtgctga

SEQ ID NO: 529646 - DNA, 777 bp, Stenotrophomonas maltophilia
atgaacaagggttactccgccagacatcttgtttccctcgtcgtcgcagcgctttttgtctgcgcatgccagccatcagcagtccagacgccacaacctgatcaatccgcactgcaggcagagacggcgccggcgcagagtggcactgatgaaatccagcggccgtcatcggagctccagtggcttgaggacaggggccatttctctgaagaagatcatcggcacctgagtgcgctatccacccgctacaacaatatcttctcgggtctggatgcaatgccggccgctgaagtggcggcacttgggttcccgacagcaaaggaatggattgaggcccggaatctgtctacggaggcgttgaaggccaaagcagagaagggggatacaaaagcaaaggccttctatgttgacaggcaactgcagatgcttgaatcgctgacagcctcgtctggcgccgaaaacatcctggaagcctttcaagcctctcccgagcttcgcgacaggtttcaacaggacttcattgatgctcatgtcaccgccggggagctgctgaagtttcatccaagcccattctctgcgtacctgttcggcgtgagcagcgccgcaaccggaggtgttcccttccatgtcgccgcatccatcgcagtggcaggcgaactgggcgacaagcgatcttccgggctgctgcaggcttacctggagaaaatggggcccatggatcccagcgctgtcgacagcagctacaagagcatgcgcagaacggccggactggattga

SEQ ID NO: 529647 - DNA, 126 bp, Stenotrophomonas maltophilia
atggaatgcgaggcctatggcgcagatgaagaggatgattgctggggcaagctcctggagaagcgcgccgcgattgaacagagtaacgggaatggtgcactgcatgtgttcaggcctcctggctga

SEQ ID NO: 529648 - DNA, 597 bp, Stenotrophomonas maltophilia
atgatgaagaagaccattctgttgagcagcctcgcccttgcggcgatgaccaccactgcctgggcccagagttccggccaggcccctgccacgaggaccctgtcgaccgtggatgcacaggcgttgaaggcggcggctaccggccgttcgttcgatgtaggcggttcgcgattccagctggcaccgtcagcaaccgtgcagcccgccagcggcggccagttcaagatcactcccgcggctgatgccggggcggcggccaccagcacgcgcagcaagcgttccaccgatgccagcggtgccggcgccgcagcgcgcgtggatgctggcgccagcaagttcgctgccgccgtctccagcgacggcgcaccggtggtggcgacctcgcgggtcaaggtgttcttcaccgacgcggcctcggcgcagcgcgcggccaccgcaaccggtggcaccgtggtgaaggtgtccaaggccgcgggccgggcgatcgtcgagtacccatcggtgaacgcggcactggatgcgaccaccaagctgttgtccaccgccggcatccgtgcggccgaaccggacgtggtgcagtgggaagagaccaagtaa

SEQ ID NO: 529649 - DNA, 705 bp, Stenotrophomonas maltophilia
atgggaatcgccctgccagcttcggacggccttggcctcggcctgtactcatacgccgatgctgcgcgcttcattggtggcaaaccgtccgaactcaggcgctgggtcaagggatacgaaagccgttatcacggtaatgtccaggcacacccgccactgtggtcgtcgcagtgggcggggtcggacattgatgggatcggcttccgcgacctcatcgaactccgcttcatacgtacgtttgttgcgtgtggcgtaccacttaatctgatccgactgaccattaccgaactacgggagcggctgggcaaggactatcccttcaccagtacaaccttcaagaccgatggtcgtcgcatcttcatggaacttctggacgagagcggcgatggagcgttggttgacgtcgtgaagagacaggacgtcatgcgcaaggtcatcgctccctccttgcgcgatggaatcgagttgggtatcgatgatcacgcagaacgatggttccccatgaggggctcaagggcggtggtgtttgatccgaagcgaagtttcggccagcccattctctccgagtcaggcgttcccacgattgccattgttgaagcgctgcaagcggaaggcggcgacgagcggcgggtcgcacgcctgtatgatctgcctcttgctgcagtcaggaaagcactgcagttcgaaggccgagaaacgccttga

SEQ ID NO: 529650 - DNA, 444 bp, Stenotrophomonas maltophilia
atgtccgcggcggatgccttgctgcaggacctgctgagcggggatgccacgcgcatccatgcctcggcaagctgggtcgcggtgatgttcgaccgcaccgtactggacgcgctggccccgcacgccaaccgtattgaacgtgcctgcgccggggtcacactcggcggcgcactgttgcgcaaccaggtgcatctgcaggcggcgctgcagcgcctgcgttactggcaggcgcaggccggctgcctgtgcgcgctcacgccgaagtatctgttcttcaatccgcgcacgctgatcgcacagggccagatgcagctgctctcgttgcaggacgccgaggacggctggggcgaatgccaccatgtcgcctgcacgcagtgcggccagcgctggaaagcgaccgaccgcgaataccattacccatggtgggagtggaaagcgacctga

SEQ ID NO: 529651 - DNA, 678 bp, Stenotrophomonas maltophilia
atgcggaagacaggcctgttttcggttgcggtggccgcgctgctttttacagggtgctcaacattgccgaaggaagctggggtggcgtccgcaggctgcagcatgctgcctcagggtcttcggtacatcgacgcgcgcgtacaggttgcacagctgatgcaggatcgcgggggctgccatctccatgcggtagcaaagaatgccgccgtggcacatgcacagaaggtgctgctgggcaggctggccgagcggcgctgcggcaatgtcatcgtcagtgattccagcgagggcgttgccgcacaggacacggatgcgactggcgtgactatgcggatcaccctgcgcacggcgtctgggaaaccctgtgctggactcaccgccttggaggagaatgagcaaattgcggcttcagctgcttacaagccatatagcactcacgcgcggcccccgcgctacccgagcgatgcgtatcgggaaggtcgtcagggggaggcgtcggtgatcattctggtcgctgggcagggtcaaacaatcggcgcagtgctggagcggtcaagcgggcacgacgatctggacgaggctgcggtgacggcggcgcaggactggaggtttgacggacatggcaagcctccggaaactaccctgattcgtgtacccgtgaacttcgtacttaattaa

SEQ ID NO: 529652 - DNA, 1023 bp, Stenotrophomonas maltophilia
atggcaatcgaactttcagattcacggcgccagcaacgcggcgcgcgcagtggcagcatctgcatgatgctgggcttgctggcctcggccagtgccgccgcttgcaccgggcagcacaatgccggcgcgcccgtcaacctggtcattgatgcctgggaagacgccgagcaggatcagctgattgcgaggtggcagagcggtgccggtgccaacgcccagttcctgttgggatgcacaacaaatgcggtcataccgatggacgtaacgccatcgctgtccgggttggagtttgtccgcaatgtgaccattgatgggaagacctacccagcctttggcttgatcgcctatccacgttcgcctctgttgatcttccagcactacgtgtggactgcgtccggaagcatcaaggatgagcccaaaccgctggacatccgtagcgtgcttcacgatccctccaaggcgctggatagctcagggcgggggtcggtcttgaacatcgcggcagtttcacgaggtggcatcatgcagccggtgccttcgacctatctggggccgatctcacggcggtccccgctctacccaagcttcgtcaagaccgatacctacacagtcaccgccaacctcaaggtgcctacctgcacgctgtccgacacgccagtcacgctggtggatgtggccgcggccgatcttcccgccagcggccgctacgctggtgagcgcagcttcgatgtggcgatggactgcaacggcgcgttccccgttcagatggtgttgaccgacgccaacgcgccaggcagtacgggcagccgcctggcgcccacgcgcaatacgacggccgggtcggtacgcgtggaactgctgcgtgaaggcgcccccgtggtgttgcggcaggcctggacgattccgctcacccagacgggccgccagaacatccgactggcggcgcgctactaccgcgaagccggcacgttccatgggggcgtggtggaagggcaggcgatcatcaccgccacttaccgctga

SEQ ID NO: 529653 - DNA, 978 bp, Stenotrophomonas maltophilia
gtgagtgccttgccgctgccacgcctgctcgggggcgtttgcgcgctgtggctggcattgctggcagtggcagccgcgcaggcatgcacgacggttgcctatgcaggtggcgatgccaaccttgtcatcgacacctgggatgacaccgttcccgatgttctgatcagcaactggacgatggcgggcaatgccaattttctcaacggctgctccgtcagcagccccagtccggtggatgtcattcccaccatgccgaacttgacgttcgagcacgatgtagtcatcgacggcgagagataccccgcgtattcggtggtgggaatgccacgcacccctctgttcatattccggtacgtttttggtaacggcagtgcggtgctgaaccagcccttcgatgccagccgtaccctgaactcatcgggtggcagcgcagccggcgcctttcgctggtcggtactacagattgcggcggtatcgcggggcggccagatggaagcgttgcccactacttcggttggcagtgccagacatgtcttcccgcccaacccttcgctgtccaaggtggaaagcttcagcgtcaccgcaaacctgcgcagcaagacctgcacgctgaccgacacccccgtggcgctgctggatgtacacagcggtgacctgccgcgtgcgggctcctcagccggtacgcgagatttcaacgtggcgatgagctgcaacggcacctatacggtgtatctgtcactgaccgatgccaacgcgccaggaagtaccagcagccgtctgacgccgacccgcaatgctaccgccgagggtgttcgcgtcgagctgctgcgcggcggcagcccggttgcactgggcagcacctggagccagctcagccgtgagccggtggcgctggccgcgcgctactaccgcgaatccggcgcgttcggtaccggtctggtggaagggcaggccgtaatcactgtgacgtatcggtag

SEQ ID NO: 529654 - DNA, 372 bp, Stenotrophomonas maltophilia
atgcacaagatgatgactccgctgacccgctatgcgcagttcagcgggcgcgccagccgtagtgagttctggtggttccagttgttcatcgtgatcgtgttcatgccgctgcatgtactgagcttcattgcaggctataccggttcggaaacgctggcatgggtatcgacgggcctgggcgtggtggtgtggctggcgctcctggtgccgctggtttcggtgaccgtgcgtcgcctgcatgacaccgaccgatccggctggtggtacctgctgctgctcgtaccgtttgcgaacctggcggtgctggtgttcatgctgctgccaagctcgccgggcggcaaccgtttcggcgcgccggttccgcacgtgtaa

SEQ ID NO: 529655 - DNA, 417 bp, Stenotrophomonas maltophilia
atggacgagcgccgcctcaagtacctgtatgccgctcttgcggtggtgttcggcctgccgggagcgctgctgggcggcatcgtcgccctggtgggcgtgtacggcggcctgacgcaggaaaaccggctgctgagccggttgctgatggtgctgctgggcgctgtcggcacggtaggcatcgttgtctggctccgtatcagcgtcgattttctgctgcacggccggccgggcctgcgggccgtgagccgcatcgggtggtggggtctgctgctgggtgcgctggttgccctgtccatcgctgtactgggcgtggtggtcgggttgaccgaacgcgcggagggctttggcctgttgctgttcggcccgccactgctggtaccggccgcgatgctgctgtggctcaaacgccgcccatga

SEQ ID NO: 529656 - DNA, 360 bp, Stenotrophomonas maltophilia
atggcaggactgagtgaatcgttgaatcaattgatggccatcgagggcgcccaggcggtggcactggtggatcacgacagtggcatgctgctgggtgaggccggcagtgggctggacatggaagtggcggcggcaggcaacacggaagtcatccgcgccaaaatgaaaacctgcacggccctgcggctggatgacgccatcgaggacattctgatttcgctgggccgcgcgtaccacatcatgcgacccatctctcaacgccccgggttgttcttctacctggtgctggatcgccgtcgcgcaaatctggccatggcacggcgcaaggtgcaggacgttgaagccctgctggtgatctga

SEQ ID NO: 529657 - DNA, 945 bp, Stenotrophomonas maltophilia
atggcacgcgtgctggtagtgggaaccgatctgcagggcgaacaggccctgctgcagcggctgcgcctggcctcggccctgcccgatgggcaggtgtgccgcagccaggacctggacgactgcgatctgctggtggtgcgtgatacgccggcgctgcgcaatgccgcgctgcgcatgcgcgagcagcggccgcgcctgcagtgctggatcgaaggcatcggcggccagctgcgcgagggccatggccgccaggatgtcctcgatgatggggccatcggccgcgcgctgcgtggcatgcagggcagcgccgaacccgcgccggtgcgcctggccgacggcgcccatgccatcacccgcctgctgcgcgagcgcctgccggtgcgccagggccatgcactgctgggcgagagcggccagccgttgctgctgctggatctggaacaggaccaggccgtactcctgcaggaaccggccgccgtgctggtggaacgcctggcccagggcttcgaacatctccatctggacgcgctgacgccggcgcagttccgggtgctggcaggcaaccgcgcgcgccagccgctgcggccgctgctgtggcaatgggcgcagcgcagccgccactggcacgcactggacgagcgcctgcgcggtgcggcggtgaagctgctgcgctggcccgatttccgcgtgctcggccacgaccacgatggattccgcctgtgctcgctgctgctcaagcgcgcgtgcacggtggacgagtgcgcgacgctgctggagctgccgccggccgccgtgcgcgacttcatccatgccgcctacctgtgtggctacgcgcagctgcagactgctgcgccggtagctgccgcgccgaggggtagcagcgccgaccatggcctgctggcacgcctctggcgcagcctgcgcgggagcgagcgcaatgcgtga

SEQ ID NO: 529658 - DNA, 1068 bp, Stenotrophomonas maltophilia
atgcgacgctttctccagaccgttcggatcattccctgtgcgacgcaccggccacacttcatcgaagcgcatctttcgcgggcgttgggtgcgctgaagaagggggacttcgcctcgctcgatgcgtggctggcaacgctgccggccgaaacctacgaacgtcttgtgtggcggctggcattgccccgctatccgcgtggatggctgcaggcatggtcagacgccatcccggcctcccgccatccccaactgatcgccgcctacggcgatgtgaatgatgcatgggcagtgcgcggggaaacctacgcaaacgccattccctttctgcgtcgacgccggtatccgaagatcatggcgaaggcatatgagaagtttgtccgtatcgtcgaacggaatcccgcggatgcgatggcactggctgggctcatccactgcgacgtggtgatcggtgcgggtgagggaaagcggaccgaatggctgaaccaggtgctggcgaccagcgggtttcactgtcccgccattcttcagtacgcgcgtggcacgctaccgcggtggggagggcagcatggcgagcatgcccggtttgccgactggattgtggagaacgcaccggtcggcagttgcgcacttatcgtggccgcacaggcggttctggatgatgcgttcaccgcgtctgaggagatctacgatgcaggaaagatccggcggcatctggccgatgatgcaggcgcgggctggatacgcaacgccatcctgaaatgggccgatgccacacacggcaccttggatgtgcgcgtgcgtgagatcgcggaccggcagattgacagctatcacggcatctgcctggagtcgttcgccctggcagcgtatttcgttggcgccgacgacgaggcgcggctgctgctccaggcactgggtggcaggctgcaatcggatatctgggacgacttcatcgcgccgttgcccatgtggttgtatgtcatcagctccaaccggcgtggcgccaggcgcgtgcacgaccgcgtctgccgcgacctcggcctggacccgcgcgagatgtgcaagtag

SEQ ID NO: 529659 - DNA, 771 bp, Stenotrophomonas maltophilia
atgtccgagccgaacccgccgcgccgccccctggcgaccttcctgcgcactgcgccggagggtgaagccgcacctgcgaccgatgcgcgcatgcaggacgacgccatgcctgcagcgcccacggtacaacctccggccgagcccatcgcaccggcgcaaccgccggcggcagagaggcggcacgatgatgacagtgtcatcgtgcaggaccccacgccctttgaaccggcgccggtggcggtgccggcagcaccgcttgccggtgatgcccccggtttcctcggcaactcccgaccgcgcgccctgccggcaccgcgctggcactggctgctggtggccgggctggcactgctgctggtgctgcagagcgtgctggccgaccgcgcgcgcctggccgccgacgccggcaaccgcgcatggctgggccccctgtgcggcgttctccactgcagcctgccgctctggcatgaacccaccgcgttcaccatgaccagccgcgagatccgcccgctgcccggacaggccggcgtgctgcaggtacaggccagcatccgcaacgatgcgcgttgggcgcaggcctggccggaccttcgcctgtcgctgtccgatgccgatggccgggtgatcggcagcggtgtgttcacccccgcgcagtacctgggcgaggcccccggaacggcaccgctggagccgggccagagcgcacgcatcgcgttccgtgtacaggagcccgccgcatccactgtcgcattcaccttcgacttcctctga

SEQ ID NO: 529660 - DNA, 267 bp, Stenotrophomonas maltophilia
atgaccccttcgcaagcggaaaccattgccagcaccgtcatgcagccggacgaccggcgcgccgagatcgccgcgcagcagcaggcgcaggcgcagcaattgaagcgccagcgcaaagcggcagccatcggactgatcggcatggccgcaggtgcattgatcgcaggccagtcgggcctgccgtgggtaaagggcctgctgtacggcggcgtgccgaccttcttcatcgccaggatctggctggatcgccgcgccctgtgccgctga

SEQ ID NO: 529661 - DNA, 864 bp, Stenotrophomonas maltophilia
atgcatgtcttccctgacgacagtccgcagagcgtgaagtcccgctcgatctcccgtgaggcggccgtggcgcttgtacgctcgaggggaggtgggattgccgagaggatggtgtcggtcatcgaggactggtttgagccctcttctgcttcgaagacggctgacctgcttgcggagcttgatgaaagaatcgaaagctatcgccaccagggagatcagacgcttctgcgtactaccctcaaagcacgggcgatgatcgcggcatctgccgacagagagccggatgagcgcgaatccgtgttcaaggtggttcccgccgcctccctcgtcggcaattggaagtcggactgcagaacgcactgcgtgatcgtcgatggcgatctgtgcgtggagggagtgctggcgctcaacgatgtgaatgaggcactttgtatgatcattcttggaaacctcaagacccggaatcttgagtgtggtggctggctgtttgtacgggacgatctcgactgtgagcatctccacgcttgctcgctcaacgatggaatactggccgtcggcggaaacgtcagcgtgcggacctttctcgaggcaggcacctatacgcatgtggagggcgatctccgggcgctgttcctttccaccgttcggaacgagatcgttgttgaaggccagatccactccccggaattcaatagaagatcagagcctgactacctgtctggatgggttgatcccgggttgcttgaagagatcgaagtcgattgcagcaacggtgggatcccatggaatgtctatccgtcagaggcctaccggcggcgcatcctggcaggggagagcccgatgagtgtcaacctgcagggttga

SEQ ID NO: 529662 - DNA, 1401 bp, Stenotrophomonas maltophilia
atggcccgccgcgcactcctgcagccccaggacctgatcgcccagctgccccccggccagccacaaccggcggccgcgctggccgagcgcctgggcgtaaatcgcatgaccctcagccgcctggtcgcggccagcggcgatcaggtcgtgcggctggggcagacgcgtgccaccgcctacgccctgcgccagccttcgcgcgtgggcagcgaatggccgctgtaccgcctgcgcgaggacgccacgctggaagagctgggccggctgatcgcgctcagtggcgacaccttccacctggacgccagccgcgcgcggcccaacctgttgcgcacaccggagggcgacattgccgcgttcttcccgggcctgccgtggtacctcgatgacctgcgtccgcagggcttcctcggccgcagcttcgcgcatggccgtgcgcgcggcctgggtctgtccgcggacctgacgcgctggcagcgcgacgacgtgctggtggcgctggtgcatggtggcggaaccgagaccggcgacctgctgctgggcggtgaggccgtacaggcggccttggcggcgctggatgcaccgcccgatcgggtggctgcgcgcgaccgcccgcagcagtacccgcaacgggctcgtgccgcattggccggcgaggacgtgggttcgtcgcctggcggcgagcagcccaagttcaccgccaccgtggaaagcgacggcgggcgccgcgcggtgatcgtgaagttcgcccagcccgatggcggggaggccgcacagcgctgggccgacctgctggtgtgcgaacacctcgcgctggaaatcctgcgcgccgccggcgtggacgcagcgagcagcgagttgctgcagacacccacgcataccttcctggaagtgacgcgcttcgaccgcagcgccgatgtgctggggcggcgaggttttgtttcgctgctgtcgctttcggctgcgtttacgggtgaggcgactgcggagtggccgcgcgcgggtgcgctgctgcaggcggcgggttggctgtctgccgaaaccgtgcaggtcatggcgcggctgcatgcgtttgggcggttgatcggtaacggcgacatgcatcagggcaacatcggtttccacttcgtggaccgtggtccgctgccattggcgccggcctacgacatgttgccgatgtcgttggcgccttcgcggctgggcgtgctgcggcaggatgcgccgttggacgcggttgcaccgcgtgagagcggcgagcttgaacatctgcgctgggcggcgccgctggcgagcgagttctgggagcgcgttgcgggggatgcgcgggtggggtcggatggattacgcgcgctggcgcgggggaatgtcgagggcgtgagggcaatgggggcgcggtttgggtga

SEQ ID NO: 529663 - DNA, 312 bp, Stenotrophomonas maltophilia
atgaatgttgtcaagcacgaaatacctgatcccctgcaagccgacttcccgccgctgctggattgggaggaagtagagcaggacgagcgcgaggatcggctgggtttcgcccgtcgcacgacgcaggcgcttctgacgcggtctggtgcgcaactggttgagggttttggtggttgcaaccagcccgggctggaaggggccagaaggacggttgcgttgtaccaggcgcatcttcggcagatgcagcacttcgcggagattgcggaagtgcggctggagcgggtggccaaggcgctggcggttgacgtctga

SEQ ID NO: 529664 - DNA, 570 bp, Stenotrophomonas maltophilia
atgcgcctttcacctgccatcctgccgctgtccgccgccgtgctgctttctgcctgtggcagcgcgccgcagaagtcacagcccaccccgccgccggtggtcaccacgcctgtggcccagctggccgaagcgaacctggcgccggcctcggccagcatcgtcagtggccgcctggtgctgaaaaccgaaagcggtggcgtgcacctgaccggcctggtcggtggcctgcagccgatgcagcaggccggcttccacatccacgagcgcggcgactgcagcgcggtggatgccagcagcgccggcaaccacttcaaccccggtggcgccgcgcatggccgcgccggcaccggcaagcaccacctgggcgacatggacaacctgcgtgccgatgcccagggccgcgccaacgtcgatatccacctcaagggggttacccttggcggaggcgccgccaccgatatcgccggacgtgcactggtcgtgcatgccaacgccgacgactatcgcagccagcccgccggcaatgccggcgtccgcatcgcctgtggcgtgatccgggttgtccgctga

SEQ ID NO: 529665 - DNA, 768 bp, Stenotrophomonas maltophilia
atgggcgacgtttcatctctcaccggtaccggcacggcctaccaggaacacctggcgcccgaaccactgcgtggtcacttcggccagctgtggcagagtcagcttcctgccgatgccgatgggcagatcacggtgctgcccgatggctgcgtggatatcctctggcgcgacggtgcgctgttcgttgtcggccccgatcgcgttgcagcgcatcccgtgctggcaccgggggcgcaggtgctgggtgcgcgcttccgcccggggcaggcgctggcggccttgggcctgcccttggccgacatcattggccaagcggtgccactggtggatctgaaaggcaggtgggcgctgaaggctgcggcgtcgatcggcgataccgccccggcgcagcgccttgcccggctcgcgcactgcctgcaaccgcatctgggcggcatcgcgcttgatgcctcggcacggcgggcaggcgccttgttccaggcacttgatcgcgggcacgccacactggatgcactgtccgcgcgcttgaacctgagcccgcgcagcctgcggcgcctgagccaggcgcagttcggctacggcgccaagacgctggaacggatcctgcgcctgcaacgcttcctgcgccatagccgcacgctgccgcagcattcactggcgatgctggccgccgatgccggctatgccgaccaggcccacctcagccgcgaggcgcgcgagctggctggcatgaccgccagcgcactgcgcctggaatgggggacatga

SEQ ID NO: 529666 - DNA, 606 bp, Stenotrophomonas maltophilia
atgtggtggaatgatctcaccgccctggccgatgcgctcccggcactggcatcccacatcgattccagcgcccaggtgtcgccacgtgcaaccgtgcaggggacggtgtgcatcggtgccggcagccgcatctgcgacggagcccatctgcagggcccgatatcgatcggccgtgattgcctgatcggcaacaacgcgctgctgcgtggcccgctgcgcatcggcgatggcacccgcatcggctttgccagcgaactgaagaacgcgttgatcggcgagagcgtcagcatcggtccgcagtgcttcatcggcgacagccgtatcgatgcccgtgcctaccttggcgcgctggtgcgcaccagcaaccatcgcctggatggcgcgacggtcgccgtgcacatcggcggcgccgtcatcgacagccagcgcgacaagcttggcgcgtggatcggtgaaggcgcctcgctgggcgtcggcgtgatcatcctgcccggtcgcatcatcgcaccgggcagccagttcggaccgcgcatcaccgtggaacgaaacctgccgccgggccgttaccggctgctgcagtcgctgcattcccaacccctggagtaa

SEQ ID NO: 529667 - DNA, 582 bp, Stenotrophomonas maltophilia
atgcagctttcggtattgagggacgaactggcgcgtttcggtgccgataacgacgcacgcgagaccgaacgtgcccggcgcatgctcaacatcacgccgcagaccggtgagttcctgtcggtactggtgcgtttcggtgcagcacggcgcgtactggagatcggcacctccaacggctactccacgctctggctggccgaagccgccgccgccatcggcggccacgtgaccacgctggagtacgccgaagacaaggtggcgatggcgcgagcgacgttcgtgcgcagtggcctggctgagcgcatcacgctggtccacgccgatgccggccagtggcttgcgcaggccgccgatgccagtctcgatctgttgttcctcgattcggaccgcgaacagtacgccggctggtggccgcagctgcgccgggtgctgcggcccggtggcctgctggtggtggacaacgcgatctcgcatgccgcgcagatggagccgctgcgcgcgctgtttgcagccgacgccggcttcagcagcagcctggtgccggtgggcaacggcgagttgctggcggtgcgcaacgcctga

SEQ ID NO: 529668 - DNA, 714 bp, Stenotrophomonas maltophilia
atgctgcaggcaggcctcctgcttccacccgtagcagcccaggtgccgttccacgccctgcacgtgttgagctatgccattgccgaaggtaccggtgccagcggctggctgcacgacccggcgtggcggtgcgcggctgacgtggtggccagccacatccgcgcggggaatctgccgaccggtttgcaggtggattgccacggaagcgtggaggcatgcgtgcagcacctgcgcgcgcacggcattgcgctggaccctgcgctgctgttcgacaatcacgcgcagtgcgcgtggtacagcccgcgttaccgggccggcccgggcatgcgcgcgctctaccccgacggcgaccttgacgacctgagcatccgcctgttccaggtgcacgcttacgagccgccgttcgtggtggcaggggaagggacgatcccgccgcgtgtaccgggcgaacatgaggaccgcgaagacttcccaccgtttggagattacaccgatttcatcggcgcggcctgcgaggacatcaacgtacagtggagcccacccggcaccgatgcgcgttaccgcatcctggatctggactggtacgcaggcttgggtatcggctggcatttcatccagttcgaaggcggcacgggccacgacatggtggctttcatccaggccatcagtgaccagtgcggccagcgcatgcaggtggcgcaccgccacttgtga

SEQ ID NO: 529669 - DNA, 378 bp, Stenotrophomonas maltophilia
atgaagatgcccttcctgctcaccgccctcaccctggccgcggccagcctgctggcgccgaccgcccaggccgccgacacggcccccgcccaatgcgtaccgctgaccggcgagcagcagatcgtacgcgccggcgcagacaagaacgtgctgctgcgcacgggcgacgaccactatgtcgtgcacttccgcaacagctgcacgtcagccgtgcgggcctcccacctcggcttcaagaccgacgggaaggaggcgactgaactgtgtggtgaaggccgcagccagctcgacaccggccgtggcacctgcgacgtggcgcgcatcgagccgatcgatgccgagcggttcaagcgcgaagcgcgtcttcgcagccgctga

SEQ ID NO: 529670 - DNA, 186 bp, Stenotrophomonas maltophilia
atgggatccaatcccatggcggttgtggcgcggatgaacgcgacccggtcggcggcagacggcccgccctccatggcagcgttggaagcggggcggtccaatgccccggtgggcggcaaaataggggaaattccgccccctgtgcaagcgggcatgcgcgcgcgtgatacacagtgtgacgtgtga

SEQ ID NO: 529671 - DNA, 2322 bp, Stenotrophomonas maltophilia
gtgagtcggcgccaacgcccgcgcccgatccccgccctgctgctggtcctgttgctgttgccgacggtgtcggccggggacccgccgtcgccgccctgggcggcgggacgcgaagtccgcgtggcgacagcgccctcgctgcgccccttgccaccggcattggctgatacagcgccgctgcccaccctcgcccacggctacgccacgctcgtggcacgccactcccagttgcgcttcacggaacatccctaccccagcactgatgcatcggtggcggcggtatgccagggacaggccgacctggtgctggtcatcggtgcagtacggccgctgcatcaaccctgcgcaggccttgtagcctcggctcccttccgcggcggcaagaccgtcctggccggccgcagcggtgggcgcctgccgcacgatgtcgcgcaactggacgggcggacactggccgtcgtcaatggcgggccttatgccgaatggctgcaggtgcatcaccccgagctccacctgctgcacctgcctgaccggcacgcaacactggtggctgtcgagaccggcgtcgctgatgtcgcgattggccttgaatcgacgctgcagccgatgatccggcgccacttcggcggcacgctgcagctgcagcctttcgagagcgcattctccaccgacctgtacctgatcgtgcgcagcattgaccgccaactgctggcgcgcatcgaccaggcactgcacgacatcacgctggaagagcatgccggcctgctgcaactctgggcccgtcaggcactacccgcctcgatccagcgcatgttcgaccagatgcgcatgccgccgccgcactggcttctggctctgaccgcgctgttggccggtctgccgatcctgtggcatgtcgcggcccgtcgcacaaggcgtgagcgccgccgtgatgcccgcgccgcgggcatggtcagccatgagatgcgcaattcggctcaggcgatgctgatgtcgatcgatctgctgggccgatcgcccctggccaacggtcagcgcgagctgcttgcggccgcgacggccgccgggcgctcgctgcgcagcctgctgaaccgttcactggatttctcgcgcttggccggtggcagcttcaggccgcgcgcaggtgcctgcaatgtggcctcgctctgcaggcagtcgctggacgcgatccggccccaggcacggctgaagggcctgcagcttcgattcgactgcacccccgatcctgtaccggttgtcgcactggatgccgaagcgcttcgtcagattgtcgacaacctgctcggcaacgcagtgaagttcaccgatgccggcggcatcgagctgcgcgtgcagctggcgccgccaatcgagccccgggcgctggtgctggatgtgatcgacagcggcattggcattgacaccaggcacatcgggcacctgttccgcgccttccagcagggcgaaggcggccagatgcgcggaggcagcggcctcggcctttccatcgcccgcgaactggcccgcgccatgcgcggcgacctcaccgtgcacagcgtcgtggggcgcggcagccgcttcaccctgtgcctgccggtacagcccaccggcagcgatgtcgtcgtcccggatgaagctgccctcggctgcccgcttgccggcctcgacctgctgctggtggaggatcatccattgaaccgacagatcatcgccgagcagctgcgacggctcggcgcgaacgtgcatgccgttgccgacgctgcagacgccctcgccgagcagagccgggccccgcgcccggtcgtgctgatggatatcggcctgcagggcatggatggctacacactggcgcggcaactgcgcggccaggcccgtgggccactacgactggtggcgctgtccgcccgcaccgggcgcaggcacgtggcgcgttcacgcaaggccggattcgacgcgatgctgaccaagccgctgcaggtcacgccattgctgcaggcgttgcagctgacgcccatcactggcgacgcatcgcccaacccggttgcggcactgggccccgcgcatctggccgacatccacggcgagctgacaggtatcgagcgggcgctcgcggatcgcgatgcaagggcgatgcgccatcatgcgcaccgcctgcagggaacactgcagatctgcggcgccgccgaccaggccgagatcgcggccgacctgtgggaactcggccatgacaccgcgccggactggatcgatgcgcggcgactgctgcaggtactgtggcactggcatggctcccgcactgcggaaaccatgcctgccaactga

SEQ ID NO: 529672 - DNA, 438 bp, Stenotrophomonas maltophilia
atgcatcccgaatcccgcccgcacacctgcaacctgctgctggtggaggaccagttcgacctggccaacctgatggaacaggcactgcagcaagagggcgaccaggtcacgcatgcctacagcgtgttcgatgcgctggagctgctcgacacccggcagttcgacggcgccgtgctggatgtcgaactgcgcgacggcgtggtgttcccggttgccgatcggctggccgagctcggcgtgccctatctgttcgtgtcggcggtctatgaccagctggtgccggcaaggcatcgcggcgccccgttcgttgccaagccgttccatctcgaaaagctgcagcgggccgtgcagcacgccatcagcggcagccgcgccactggatcggcggggccggacagcagtcctcgcaatcagacgcccccgcgcaagacctgctga

SEQ ID NO: 529673 - DNA, 849 bp, Stenotrophomonas maltophilia
atggactacttcgagcaccctgcccccgacgatctgcgccggcatgtccaatgcctgtggtggctgcgggacgatgcgcccgggaatgacgtacaggtcatctacccggatggccgttgcgagctgattgccgagcttggggttccgctgcatctgcacggggccgatggccggatccgctcagatctgccgttctgtttcgcggctcagcaatgtggcccgatccgactgcaggccgtcggcgcggtgttctgcatcggggtgcggctgcagccggcagcgagcgccttggttgctggccctcggttgcccgggcttcgcgaccaggcgccggacctttacacactggatgctgcctttgccgaagtgttcagcacggccgcccgcgccagtgcggtaagcggttcgcccgagccgctctggcagatcctgcgcgaacgctgcgccagcttcgccctggatgagcgcgttgaacaggcggttgcggtgttggatgccatcgagggcgacctgcgtatcgccgaactggcacgccgggttggcatctcgttgcgtgccctgcagacgcgctttctggccgctgtgggcatgacacccaaagagtatgcccgtgtccgccgactgcaggcgctgttgcgcacgttggatggcgaagcagccagcatcgcctcggccgccgcgcgccatggttacagcgaccaggcgcatgccacgcatgatctgctgcgctggaccggcgtcacacccggcagactggtccatgcactgcgcggcgatcgcggcagccgcgatgcgttgcagctggcggcggcgtttgtacgtggaaccagtgtcggtcaagcgccatga

SEQ ID NO: 529674 - DNA, 177 bp, Stenotrophomonas maltophilia
atgagcaggtatccctcactcgccgaactggcggagttcgatatgggcctcgcggcgtgcgctgtacttgtcgggctcgttctcgttctggcaatcgtccctatcgtgatcgagcacgcatggttggcgattcgtcgcatgtggaagctcgtgaagggcctcaccgatggccggtga

SEQ ID NO: 529675 - DNA, 228 bp, Stenotrophomonas maltophilia
atgaccgcgccccttcttgccttctgtctgctgggggccatcgcggccatgtccatcggctgcgctcgcatcgtttcgtggctgctcgagcggcgtgactacaccgcctcgcagcagtcccgggaggccgaagtcatcgcattcgcacaggctgagattgcggcaaccaagcgcggcgatctgctggctgcagccacctttgccgaagagcaggagcgcgccgcatga

SEQ ID NO: 529676 - DNA, 858 bp, Stenotrophomonas maltophilia
atgactactgaaacctgcagcttcgccgaaacaaagagcgaagctgagggatttgtgcttaccgctgacctactggctgcctcagcctcctggctgctcagccgggagaggatctatcagctcgagggagttggcttctgcaaggagttcgtcccttcgcttcttctcgtagtctgcgatttcgccgcttaccttgcgaatgcctccgatgctgattatcagattgttggcgagtcggtctcttggcagattcttctccagcggcctcccttcgtagaaggcagagatctctgtgcattccttaagaatgtctctcgcccagaggcgaagagcagagagcatatcaagcccctcaggatctctcgccatcagcgagacttcatcccaatcctgggcactgaagtaggcagagcacgtgtcgcaactggcaagaaaatcgacggagtcaatcggagtgctttcgtcttcgatagcctcaccgaagtgcgccattgtgttctggacgcaaatgataatgtgtctcagccgattgagcagagcgaacttgtcctccagcagggcagccctctcgacccttatctcgctttgcctaagggcgtgagcctctcgcgcatacttccatgcaccgtatccgatcacccaggttccaagtgcagcagcccaatctccaaggctgccgaagggaaacttctcggctccggtgcctatccaagcaaatacaagccagctaagcgtccctcctgcgcagcccgctaccgcgcaagcgacgatcacgtcgcgtacttcaatccttcgctcaaaccacttccccatggcgccccctttggcgtccctgtcgtcgacgggattctgccatga

SEQ ID NO: 529677 - DNA, 993 bp, Stenotrophomonas maltophilia
atgcgtttgcccacccttgtactgtgcctgtccgttctgctggccgctgcgcccgcacctgccgccgaggtcccactgcgcgacgggcagcggctgggcagggaggtcgcgggcgaacgcctgcccctatggccagacggccgggtgcccggcgaaagcagcccggcacggccggcgcgcgtggttgaacgcagccccgacccggcccatccggaccggttcgtggatggcatcgatgcgccctacctgatggtgcacacccctgtacatccgaacggccatgccgtgctggtcattccaggcggtggttaccagcgggtggtgatcgacaaggaaggcagtgcgctggtacccgactgggtgcggcgcgccgggtttaccctgttcgtccttcgctaccgtctgccgcagccgggcagggaccgccaggccgcgctggccgatgcccagcgcgcgctgcgggtggtgcgcgaccaggccgcgcggcgcggcctgcgcaccgacgacgtagcggtcgttggcttctccgccggcggccacgtggctgcgcggctggccaccggtttcgatgctccggtctatcccgcaggtgatgcgatcgatcggttgagcgcgcggccggcgcgggcggtgctggtctatccggtcatcgacatgggcgcgcatgcacacagcggttcgcacgggcgcctgctgggcgagcatcctgatgccgccctggctgcgcagtattccctgcagcagcatgtccgcctggacatgccaccgacgatgctgatacatgccaatgacgatcgggtggtcagcgtgcacaacagccaggtgatggcgcaggccctggccgccgcgggtgtcgagcacgagctgcatgtgtttgcccatggtggacatggcttcggcatgcacctgcagcgcggttcgacgctggcgctgtggccggccctggcacaggcctggctggtggcaggggccggtgcggagggcggccggtga

SEQ ID NO: 529678 - DNA, 291 bp, Stenotrophomonas maltophilia
ttggatcttcttacgcttgaacactttgccggctgcgtcgacgaaaccttcgccgccgatctggatggcatgcgggttgacttcgtgctggtcgaggcgcgtgcgctgccgggggcgcgcgccgacgcaccacgagcaccgttctcacttctgttccgcaacgccgcgcccatcctgttcccgcagcagacctttcccatgcggcacgcacgggtgggcgaggtcggcattttcctggtgccgatcgctcaggagcgcgcaggcttcctctaccaggccgtgttcacctga

SEQ ID NO: 529679 - DNA, 549 bp, Stenotrophomonas maltophilia
atgccggtgcgggcattggcgccgttcccgacggaacggctccgcccatgcgtcgaagcacccacgccagcggcatggcgctggcgtgcgctcggcgatgccgacctgccgtggttgcaggcgctgtatgccagcacccgccaggaggaactgcaggctgtgccatggccggacctggccaagcagcagttcctggcgcagcagttcgcggcccagcaccagcactatctgcagcaccacccgcaggcgcactacctcgcggtcgagaaggacgagcaggcgatcggtcgggtctacctggacccgaccggcgccgatgatctgctgatcgacatcagcctgctgccgcactgccagggcaacggactcggcagcgcgatgatccgatgcctgcagcaggcatcggcggcacgccggcgcgcgctgtgcctgcacgtgcagattcacaaccccggggcacgccggctttacgagcgcctgggattcatcgcaagtgatgcgtcaggcagcagccttcatgttgcgatgcgctggaatccgttggcgtag

SEQ ID NO: 529680 - DNA, 534 bp, Stenotrophomonas maltophilia
atgaccgaccccttctacggcgaaatccagatgttcgccttcaactacagtccggcagactgggcgttctgcaacggagcactgattcccatccggcagaaccctgcgctgtactcgctgctgggcacccagtatggcggcgatggcgtaaacacgttccagttgccgaacctggtcgcgcgcggcgccacccaccagggcgcggggcccggcctgaccccgcgcgtcgctggcgaaaccttcggccaggctgcggtctcgctcaccacggccatgctgccggcacaccgccacgacctggtggcctacgcccagcccgccgccaagcgcaccgccacgcccgttgccaacggtgcgctgtcgatgcccggatcaaacgcgatcaagcctttcagcgcagagccaccggccacgccgatgtcaccgaccctgctcggccctgccggcggcgggcagccgcatgagaaccggcaaccgtatctggcggtgaacttctgcatcgccctgcacggcaacttcccgcagttcgaatga

SEQ ID NO: 529681 - DNA, 531 bp, Stenotrophomonas maltophilia
atgagtacgccttttgtcggcgagatccgcatgttcggattcagccgcctgccggttggctggtttccctgcgacggccgccttgtgccggtcgccgggcaggaagccctgtttactctgatcggtaccacctacggcggggatggccagaacaccttcggcctgccagacctgcgtggtcgcctgcccgttcaccagggccagggattgggattgacccagcgtgtgatcggtcaatccggcggcaccgaatcggtaaccctgaccctgccgcagctgccagcgcacaaccacccactgaacctcaccagcgccgccgccacggcggacgtaccttcggctaccgccgtcccgggctcggccagcggcgaaccctactacgtcaccgacgccaacggcgccaccgcaatggtgctggattcggctgcagtctccgccaccggcagcagcctgccgcacgagaactgcatgccgaccctgaccgttcagtactgcatcgcctggtcgggcattttcccgtcacgcggctga

SEQ ID NO: 529682 - DNA, 540 bp, Stenotrophomonas maltophilia
atgagcgatgtctatctcggccagatcatcatggccggttttccttttgcacccaggggcttcgccttgtgcgacggccagttgatgccgatccagaccaaccaggccctgttcgctctgttgggggtccagtatggcggtgatggccgcaccaccttcgccttgcccgacctgcgcggccgcgtgccggtatcggccggcatctcggtggactccgcctggcagccgccggcgcagccggtaggcacggccgccggcgccgagtcgatcaccctgctggtcggcaacatcccgccgcatacgcacggggtgctgggcgtgaccagcgccggcaccgtgcgcaaccccaccggtgccaccttcgccggcaccgccagcaacccgaagatgtatgccacccaggccagcccggccgtgccgcaggccggcgggtcggtgggcgtgtccggcagcaaccaggcacacgcgaacatgcagcccttcggagtcatcaacttcttcatctgcatccagggcggactgtacccgccgcgcgactga

SEQ ID NO: 529683 - DNA, 5820 bp, Stenotrophomonas maltophilia
atggcgttcctttccggtaccgcgcgttccgcgcgttcgttcgcgttcgtcctgctgctgtcctgcctggccctgctgtggcccgggctggcctccgccgccaatacgtccaccctctgcggccccttctcggtgcacgtgccgagcggaggcagcgtgccgatcaacgtcacggcctgcgccaggaacatcaatttcgccggtgatggtcccgtcgatggacccgcgctcccgcagcgtggcagtgccatcctgcgcatcgccggcagcagctggttcgtcgactacagccacaacgggctcaacaccgtcggcgatgtctttgagttctccgacaccgacggcaatacggtcacggtgacgatgatcatcgacccgccggcgtcgtcgatcgtggtcagtcctgcggtcctcgatccgatgacggccggcacggccttcagccagaccttgagtgctacaggcggtgcttcgccatatacctacgcaatcaacggcggccagttgccacaggggctggccctgaacagcaacggcacgctctcgggaaccccgacccggcgtggtgccgtcagcttcaccgtgcgcgccaccgacaacctgggggccgtggtcgacaaggcgtacgcgctgacggtgcagaatccgtccctgtcgatcacgccgaccgccgcgacggcagtgatcggcaatgtgttcacgctggccctcaatggcagtggcggcgttgcgccgtacacctatgcggtggaatcgggcgccttgccgccaggcatcacgttcaacggcgtggacaccttcagcggcacgcccagtggccctgcgcaggcctatccactgacgctgcggatcaccgacaacagtgcaggcgcggcgccctactacgaactgaagtctttcaccctcacggtcagcaacgcgcccaccgtcagcatcaatgtatcgccgagcagcgtcgccgaggacagtggcacgccgctggtgtacacggtaacgcgcagcgccagccaaccgaccccgatgctggtgaacctgacgctttccgggacggcgaccagcggcaccgactacaccggcgcggtgtccagcgtgaccatcccggccaacgccaccagtgccacgttcaacatcgttcccgtcgccgatactcaggtcgaatccgatgaaacggtgatcttcaccgtggccgcgggcgccggttacacggtgggtgcaccggccagtgccaccggcaccatcgtcaacgacgacttcccggtggccacggtcagcgtctcgccggcaaccgtcaacgagaatggcggtgtgccgctggtctacaccatcaccctggatcggcccaacccggtgccgttgtcgattgccttcaccctgggcggcaccggagccagcggtaccgactacaccgcggtcagttcgccgctggtgatcggcgcaggtgccaccagcgcgaccgtgagcatcgcgcccatcccggatgccattcccgaacctgacaagaccgtggtgttgaccctcgcctccggcgccgggtatcagatcggcgtgccggccagtgccaccggtaccctgcgcgacgatgacctgccggggctgagcatcaacgacgtcagcgccaacgaaggcgacagtggcaccaccggtttcaccttcacggtatcgctgaacgcgcctgcgcccgccggcggggtcagcttcgacattgccactgccaatggcactgccactgcgggctcggactatgtcgcacgcagtctggccgcacagaccattcctgccggcagccagacctacagtttcgtcgtgcaggtcaatggcgacacactgcatgagttgaacgaggacttcttcgtcaatgtgaccaatgtcagcggcgcgacgctgaccgacggccaaggccggggcacgatcatcaatgatgacgcggcaccctcattgtccatcgccgacatcaacgtcaccgagggcaacagcggcaccacgccggcggtgttgaccgtgacactgtcagcggcaagcgcgctgccggtccaggtccagtacgccacggccaatgtcaccgccgttgcgccgaccgattacacggccgccagcggcacgctcagcttcccgcccggcacgaccacgcagacgattaccgtgctggtcaacggcgataccacggtggagcccgacgagaccttccaggtcaatctgagcaacccggtcaacgccagcgtggccgacggcttggccgtggtcaccatcgtctccgatgacgcaccggtggtggtggggccgacggtgctgccgacggcgaaggcaggcgttgcctacagccagacgttctcggctaccggcggcaccgggtcctacacctacgcgctgtcgggcacgctgcccaccggcctgacgttcaacaccagcaccgggacactgtccggcacgccgacccaggcgggcacgttctcgttcagcgtgagtgccaccgacagcagcccgacaccgaacatggggacggcgttctacgggctgattgtgcccgggccgaccctggcgctgccgggcgctgcgctgccaggcgcagtacgcggccagccgttcagcagtaatcgtgggccggtcagtggcggcaatgctccctataccttcagtgtcacaggcgtactgccgacaggactggcgatcagccccaacggggtgatcagcggcacgccaaccgcggtgggcacgttcaacttcacggtcgtcgcccgtgacagcaccagtggcacaggtgcgcccttcgacgttaccgagaacctgaccatcaccgtcgcggagtcactgccgctggcagccaacagtacgttgagcgtgggcttcaatgctccggcggcgaacgtagcactgatcctgagtggcggtcccgccacctcgctggcgctggcggcggcgcccacccatggcacggcactagtgaccggcccgaccacgatcagttaccagccggcaaccggttatgccggatcggacagcttctcctataccgcgaccggaccgggcggaacgtcctcaccggcgacagtcactgtcaccgtcgccgatccggtcatcagcatcgctgccagcggcggtttcaacgctgtggctggcatgccgtacagccagacgttcacctggtccggcggcagcgcgcccttcagcggttaccaggtgtccaatctgccggccggactgtcggtcaccgcgaccaccgccaacagtgcaaccgtcagtggtacgccgacggcctcaggtaccttcaacatcaacgcatcagccagggacagcagtaccggcaacggcccgtatacggtcggccagctgttcagcctggtggttgccggtccaagcctgtcggtgatgccaaccgtactgccggcggcgaccgctggcagcagctatcagcaggtcatcagtgccacgggtggcatcgcaccgtaccaggtggtgctgaccggcacactgccggtgggcatgagcttcaacaccgccaacggcacgttgtcgggcacgccgacgcagtcgggtacgttcgcgttgagtgcgacgattaccgacagtaccggcggcacgccggccagcgtcacccatagctacagcctggtggtagccagcccggtgctggcggcgaccccgggcacgctcgctggcggcaccgccggcacggcctatcagcaggcgatcaccgcgacgggcggcatcgcgccgtaccacgtggtgctcagtggttcgctgccggccggtatgaccttcgataccgccagcggcatgttgtcgggtacgccgacgcagtcgggcacattcgcgctgagtgcgacgatcaccgacagtaccggcggtacgccggccagcatcacccagagctacagcctggtggtggccagtccggtgctggtggcgaccccgggcacgctggcgggcggcaccgcaggcagcccttaccagatggtgttcaccgccagcggcggcatcgcgccgtatcacgtagcgttgtcgggcacgctgcccgccgggttgtcgttcgatgccgccagcgccaccttgtccggtacgccaacgcagtcgggcagcttcaccatcagcgcgacgatcaccgacagcaccactggcacaccggcccgtctggtgcaggcctatacgctgacgatcgccgcgcctgccctgtcgctgactccggtcgccggcgcgttgccggcctcgacggccggcagcagctacacgctggctttcgcgaccaccggcggtctggcgccttatcgctacacgctggccagtggtgcgttgccggcgggcctggtgctggatgccagcaccgggcgcatcgcgggtaccccgagcgtggcgggcagcttcggcttcagcgtcgctgtcagtgatgccaccaccggtggcgcaggttcggctacccaggcctacacgttgaatgtgtcggcacccgtactgaccctgaccccgtctgccctgccggcgggactgttcggccaccgctacgagcagcgcctggccgctgctggtggcaccgcaccctatcgctatgtcctcagcgccggtgcactaccggatggagtgacgctggaaccggccggtggcctggccggcacgccgaccgccgcgggtgcgttcgccttcactatcactgcgaccgacgcgctgggcttcagcggaagccacgactacgtcgtgcagatcgcgccgcggcccgatccgacccaggatccggaagtacgtggcctgctgtcggcacagcgcgatgcggcccgtcgattcgccaattcgcagatcgaaaacctgcagcagcgcatgcagcggctgcatggcgccagccgcagcaacggcttcagcaacaacctgagcttgtcgtacgcgccacgacgctgtgaaccgatggtgggcaacgtgccgggcccggactgcgatgcgcagcgtcgccagccgttcgatcgcgaaccggcgccggcggtgtccgatccggcagcaaactcgcaggcaccgttgggcctgtgggtgggcggcacgatccgctccgggcgcaacgagggcggccagcgcagcggagtcgacttcgagaccgatggtgtcaccatcggtgccgaccgccggctcagtgacaccctcgcggtgggtgccgcgctggggtatggacgcgatcgcagcgatgttggcgagcgtggcagccgcagcgatggccaggcctacagcatggcgttgtatgcaagctacagcctgggccgcagcctgttcgtggatgcgctggtcggccaccagctgctggactacaccctgcgtcgctacgtgaccgcagatggcagcttcgcgcatgcacgccgcaacggcagccaatggttcggttcgctggccttcggcgccgacctggcccgcggcgactggcagttcacgccatatgcgcgcctggatgcctcgcagggctcgctggaccgttatgccgagcagggcagcgatctgttcgcgctgcgctatggcagccaggaggtcgatgccaccaccggcaacgccggcctgcgcgtcgaagtacggcgggttgcacggtggggcgcgtggacgccgcagctgagggtggaataccagcacgatttcagcggcagtggcgtggccaccctgcagtacgccgacctcggcgagctgccgttctaccgcaccacgctggatggcttcgaccgcaaccggtgggtgctcggcgccggcgtgatgttcgacttcggccgcaactggggcctgaaggtggactatcgcggcctggtcgccagcggcgacgaccgtgaccacggggtgcagatcagcctcgacaagcagttgtag

SEQ ID NO: 529684 - DNA, 483 bp, Stenotrophomonas maltophilia
atgaaaaatgaacgattgcatcgtggcagtaccccagaacgcgtacaccgccagcgaggcttctctctggtcgaactcatggtggtcgtcgccatcatcgcgatcctgtccctgatcgcagtcccgcagtacaagaaattcgctgccagatccaaactggcggccgccctcgcggacctggccggcggcaaggcgggagtggaagcatggctggcagaacgaggcgatctctatggttcagacaacagatcgctcgggcttccagagagaaccgaacgctgtgaatccatcacaacgagaattcgcggaggtggagatctggaaatcgactgcctgctccgcctcgattctggatacaacgtgggaacctggagaaacagcctgatgctcatcagggactcagacaaccacgactggcgctgttggacccccattccgtactacgacctgctgcccaaaggctgtggccccgacaatccatag

SEQ ID NO: 529685 - DNA, 453 bp, Stenotrophomonas maltophilia
atgaataccgcattcgtcccagtaccgcgcacaggcatgcgcgcctcccggcagaagggtttctctcttattgaactcatggttgtggtggcgatcatcggcatcctggcgatgatcgcgctgccgcagtaccagcgtttttcggcgaaggcgaagctggccagtgcgctcgccgagatcgcaggtgggaaagtcggcgtcgaatcgctattggctgagagcagtgaagtcaggtctgcggcgtcgattggcctgcccaactcgagctcccgttgcggcgcgatcatggtgaactcggatgccatcacgggcgctacgagcattgtctgtcagctcagcgatcccggatttgacgttggcaccctgacactggaccgcgactcggagggcgtctggcgctgcagtagcgatgtgccggaccagagccttcttccccagggttgccaggcctga

SEQ ID NO: 529686 - DNA, 1614 bp, Stenotrophomonas maltophilia
atgaaattgattggtgatttggaatttggttttgcggatgctgaaaactataaacgccgtgaaaatagagatcttttgaataggatattcattagaggggcgagtcttgatcgtctgattcaggataatatatcttttctaattggcgagaaggggaccgggaagactgcctattccgtttatctttctaataacaattataagaataatcttgcagcgattagatatatacgcgaaaccgagtacgctaaattcgttgagctgaaacgtgccaagcacctcactctttcggactataagagtatttggaaggttttattgatgatgcttatggctcatcaggttaaggatcgtgagggcgtcacatcgaaagtgatgaactatccgctctttcatgctgttgactctgctattgacgagttctatcaaagcgcattcacgcctgaaattgttcaggcaatgcagtttgtcgaagagtctgggcagtcggctgaaatattggcaaaatatttcaaaattagtggcaatgagaagtccactaacagtttctcggagtcaagattccaggtcaaccttctttatatacagaagaagtttgaacaagccttgtcccaaatcaggcttggaaatagtcatataatattcattgacggaatcgatattcgcccaagtactatcccttacgaggagtacctggagtgcattaaggggcttgctaatgccgtttgggagcttaataatgattttttcccaacgataaagggcggtcaggggcgcatgcgagtcgtaatgttggtgcgcccggatatatttgatacgttgggattgcagaatcagaacacgaaaattcgtgataattcagtatatcttgattggagaagtgaatatgccaatcatcgatcgtcagatatattccaagtcacagatagacttctttcatctcagcagggctcggaggatgagagggcggagggctgtgagcttcaattgggggaggcatgggacaattacttcccatggaatgccacgaacgtaatagatgattattcacatccaagttcgtttattgcgtttatgcggtggtcatattataggccgcgcgatatagttgtaatgcttgatctgttgaaagctaatgcgggtgatggtcggaagggtagtttctcaattgatgattttgagaatcctagttttggtcgtgactattcaaattacttgcttggtgagttgaaggatcatctgtcgttctactatagtcctgacgactataatgcttttttgaagttctttgaattcatgggtggtgcggataagttcacgtacgatacgtacttgcaggcatttgataggttcaaatctcatttggggacgaccggtcgagaggagcctattttcactcaatctcctacggtattccttcagtttttgtttgagcttaatgctatttgctatatcgagcgcacggtggatgggcgcccattcattcattggtgctttaaagatcggagctatgcgaacatatctcctaaggttaagaccggcttaacgtatcaagtgttttatgggttggcgaaggcgctaaatctaggtaagcaatttaccggcagcgcttga

SEQ ID NO: 529687 - DNA, 339 bp, Stenotrophomonas maltophilia
atgaccctgcatcgatccatcatggcgggcctcatgtttgccctggccggctgcagcacgccggcatcctacgaaggtacggatttatccgcgtcctcgcagtgccgcgtgcagtgccaggccagctatcgcagctgcatggcgcagaatgactccctcggcagccgccagagcaattgcgagcagcaggcggtgcccgcgccggacaagcgctgcaaggacgttgccaaccctgaactgcgccgtgcctgtgaactgaaggcgcatgactgcacgatgcgcgcgccgatgatgtcctgtggtgaacagcgggatacctgcatgagccgctgcggctga

SEQ ID NO: 529688 - DNA, 360 bp, Stenotrophomonas maltophilia
atgggtaagtatgagccaggcctccaggccgtcttccacgcgctggccgacccgacgcgctgcgcgatcgtggccgcgctggggcaggggccgtgcaccgtgtcggtgctggccgagccgttcgagatggccttgccctcgctgatgaagcatctggccgtgctggaacgcagcggcgtggtgcgcagccacaagcaggggcgcatacgcacctgcgaactggtgccggcgcggctggagcaggccgagcaatggctggccgcgcagcgtgctgtgtgggaagcacgcgccgaccgcatggtcgcgtttgttgaaacccttcaccgacaggagcaggcccatgaccgtggacgcaggtag

SEQ ID NO: 529689 - DNA, 246 bp, Stenotrophomonas maltophilia
atgaagctgcagaagattctgtcggtcggttcatgggtggccctgctggctctggcttcgctggcccccgtcgccaccacgacggccgccgaagtcgtcgaggtccaggaagaatgcgtgcccttccgcttcgcaggcaacgtgtaccaccagcgctgcacgtcgtacgtggtctacgacaacggcacccgcgaggcaaccgggcattacaaccgtgacgagaacgggatgatctacgatccctga

SEQ ID NO: 529690 - DNA, 2007 bp, Stenotrophomonas maltophilia
atgtcccgactccagcacccggtgctcaacaccaccttcctgccgctgcagcgcaagtcgctggcgcgctacatcgcccatggcaccccaccgcagaccgcgctcgaacaggccgggttgatggccgcgcagctgtgccgcgcgcgcctgcatgcgccggccgagatcgagcgcctgctgcatgacgcctgcgtgctgtttgccagcagcgaggacgcgggcaagcagctggcgggtgccggcggtggtgcacagccggaactggacgcctggctgtccgcgctggccgcccatggcgtgctgctggcaccggcggagatcctgcaggacttcatcgggcaatccccgcaggcctacccgggactggccttgcagctggcctgccaggagaccctggtcgaacaggagatccactttcccgccgccttcggcagcgaggatgaagacggcgcgcaggaccccggcgaggcgatggcgacggacgcgcgggcgtttgaacaccatggcctgtacacctccgaacaggcccgtgtgctgcgtgccatcgcggccaatccggatgaactgatcgacctcgatggctacgccggcaccggcaagggccacctggtgctggcgctgatggacgcgcggccgggccgctacacctatatcgcgccctcgcgagggcaggtggacgcgttccgagcccgcgtgccggccagcaccgccaggcggctgatgacccagatcgagttcgccaaccatctcgcgcagcatgccgcgcgcagtggaaagacccggggcttcgtcgccacctaccggatcagcacgctgtcaccgcgcgtcatcgccgaccggatcggcctgcagcccatcggcagcagaacaccggaacaggtgctgcgcaccgcactcgatgcaatcacccagtggtgcgcatcgtctgcggcgagcctgcaaccgtggcacttcaagcgcaccgtgcactgggccatgatcaacgccgatccctacatcgcggcggccgagcaggtgtggcgctgcatgttcgatgccggtgtccagcgcggaggctgcctcagcctgaccgcggcgcatatcggcaagtggctgtggttgcagggcgtcgcaccgccgctggaactgggcatgctgctgatcgacgaggcacacgatctcagtcccgcctggcggcagctgttggccgcgcatgcgccgggcgtggtcagcctgggcgatccgcaccagcgcctgagcggaaacgtgcatcgctggcaggcggccaagcgggtggagatgcaccagtcggtgcggcagggccggcaggtggatgaactggtcaaccagacgctggcgatggactacatggggcgcgatgcggaaccgtttgccggtgccaccgatcgcgccaccgggctgctgcagtacgccgactggtcacaggtgcccgatgcaggcatccgcatctacggcgacgtggtacggctgatggaggatgcggtgcgcctgcatgcacggggcgcgcggctgcatatccacccggccacgctgcggccgctgcacagcgccctgcgcgagccgatcgaagcatggaacgtggtgcgccaaggcggttcgctgcggccttgggaacgggtggtcgagcagttcgtggcacgtggcgaaggacggctggcagacctgtttacccgcagcgatggcgggcaacggatcatgcagacattgcaggcgctggttcccgtcgaggacagccagatcgtgctgtgcctggccgaacatgccaagaacctgcagttcgatgtcgtctcgatgtccgactgctgcttcaaggcggtcgccggcaagcgttcgcggcacagcccggtgcgcgcggcctatgtggcgatgacccgggccagccggcaactgtggctgcccggcgatgcggtggcgcagctgcagcagagcgcggccgagcacgaacggtccagggagcagatgcggcaggagcgccagcacgccgcaggccatcgccacgcgcgctga

SEQ ID NO: 529691 - DNA, 423 bp, Stenotrophomonas maltophilia
atgaagaaccagaagggcttcacccttatcgaactgatgatcgtcgtcgcgatcatcgccatcctggccgccatcgctctgccgatgtaccaggactacgtggccaagtcgcaggccaccgccggcctcgccgaaatcaccccgggcaagacccaggccgaagtgctgctgaatgaaggcaaggctttcgacaagactgcagctcagcttggcctgaagaactcggatcgttgcaccattaccgttgatggtgattctggcgctggcacggcttcgatcacctgcgcgcttgctggtaatgcaaaggttgccaagggctcgctggtcctggctcgtgctgcggatggcacttggtcctgcactgccaacactctggatgccaagtacattccgggtggctgcaatgaggctaaggcgccgtaa

SEQ ID NO: 529692 - DNA, 627 bp, Stenotrophomonas maltophilia
atgaagagcgtcgagcgaatggccttggtgaaaaaggtctttgtcagggttgctctgatcggtctggcgctgtttgccttgactggcctggtcctcaagttcatggacttcagcatgggcccgctaccgcctgctccgccgaagccacgcattattgagcctgatactggtcatgatattaccgatgcgccaccggagatgaatctgaaaattggtattgccaactactcggatgaggggttggggatagttttcattaacgatgcttgggctggggctatgcgggctcgcgcaagcggaaatgctgccacctgctgcgtgacgttaccgcgcctctggcatcccggactgaaggttacggtggtctatcgcaccagcagtatgtttatcaaggatcccaagggctatgttgagagggacatccttgtcgctccgtacaagccgtttcttgatggattcatttactttttctactttccgggtgacgaggttcgggtggtggctacaccttatacgcccggttatcctggctttgcatatgacattaagtttgcagggcgcgagcgtgacgaggaaaggattgcccgatttcttgcggagaccgctgttgaggaggtaatggaatga

SEQ ID NO: 529693 - DNA, 753 bp, Stenotrophomonas maltophilia
atgaccgctaaagtgaaggcaatacaaagcgcgtgcgcgcccttcgatactgaagtcggcgtgatttccaatttgcgaatcaagcgtagtgtagaaaatgttttctggcgtagtggcgatcgcgagggtatggccgccactggagcctttgctgctgcactcggtctcagtggtcctgcggccagcatggcgatgatgtcctccgaggagatggaggagccagttgtccgggttgagttccgactagacgatttgatcgtgaaaggcctgctctggaactggccctacaaggagggagatctcgtgagagtggtcggaagccgaaacccggacggagtatttatcgcgttctcggtattggatgagcgcaagagattgattgtctcctacccacacgtcagtgctggcagtcgcgctcactggatctcggtctggaagtacacgtcattgatttcgttgccgatatgcacattgtttaccgtaggtattggcctgaattctctaggcatcctggaggacggatggttgttgttgaagttgctgctttgcatatttgctgggctcctgctcatcgctgccactgttgggatcagtattggctatcgatttcaccggtttgcccagcttgctgacggcatatttgggtcgcttggctggggtgacagtaagaatgtcaatctaaggcggattacaaagctcagaaaaagcccgagtgatcctgctgcgcttggtgatacctatttcagatactga

SEQ ID NO: 529694 - DNA, 894 bp, Stenotrophomonas maltophilia
gtgcgcgaaggcgagcggggtttcggcgtggagctgtccacccaggcacagggcgcgctgcgcgccggccgcggcctgctgctgaccaccgagcagggcacgccgcagatggccgcgccgcaggcattgagccagctgcaggaaagccagcagctgctgcagcagctggccgaatcggccgccaaccagcaggcgcagctgcccggcgagccgaacgaactgccggtggacaccaccctgaccgagctgcaggagacgctgcgcgccacccacagcggcagtgccgccggcagcatcgccggtggcgagggtgaagcgccgggctggagcgcgccggtgctgctgggcagcggcgtggccggtgtgctgagcctgaccccggccgaccaggtctgggtgagcggcacccacaccacgttggccagcggcgtggcactgaactggatgacgcagggctcgctgacgatggcggtggccggcggtctggtgctgtacaccgccggcgtacagcccagcggtgaaagcccgaaccaggagcgcggcatcgcgttgcacgccgcgcaaggcaaggtgagcgcgcgtgcgcacaagaaccagatgatcgtggcggccaagaccaaggtacgcatcgccagtaccgaagcggacgtgcagctgtcggcaccgagcaagcatctgctggcgacggcggcaggggcctacattcgcatcgagggcgacaacatcgagctgggcgcgccgggcaaggtggagttcaaggccagccagcgggattgggtggggccgctgatcagttcggaggagaccgacgttccagctgggcagttcaatggctgcgagccgcacttgaacgcagcagtatgccgacaggaagggtgcgccgatgtcggttga

SEQ ID NO: 529695 - DNA, 2859 bp, Stenotrophomonas maltophilia
atgaccatcgtcaaccgcctcattacgccaagccgcctgccgctcgccctggcagtgctcgcctgcctccaggcagctccggttctggcccaggacgcaggcaatacggaagcggcggcgtcaagcccctcgcgtgacagcaagaaggcgaccgatcttgacaaggtcacggtcacgggttcgctgatccgtcgcgccgactacgagaccacctcgccggtgttcaccatcgacaccgagcgcaacgccgcccagggccaggcgacggtcagcgagttcctgcagaagtccgccatcggcgccgcagaaacccagatcaccaaccagttcggcggctacgtcgtcgacggcggcaccggcgtccagaccttctcgctgcgcggcctgggtgccaaccgcaccctgatcctgctggacggccagcgaccgggtcccgcgggtacccgtggcgcggtcggcgcgttcgacctcaacgtcctgccggcagcaatcctgcagcgcgcggaaatcgtcaaggacggctcttcgtccatctacggctccgatgcggtggccggcgtggtcaacctgatcaccaagaagcacttcgatcgtccggaaatgaccttcaccggccgcgttcccaccgaaggcggtggcgaagtgttctctgcctcgctcgccaatggctggaacttcgagaagggcagcatcgtcgccgccgtcgagtggtacaagcagaacgagctgacccgcggcgatcgcgacttcttcaagtgcagccgtgacctgatcaccgatggcaacggcaacaacatcgatcgccaggatcattcgatcctgcggggcaccgacctcgccggctgccagaacatgctgatgaacgtgatcgatgtcggcgccgtccgctacgtgccgagcccggagggcaccaccgtcggtccgttcccgggctaccgcccgcgtgcgaacaagacctacgccaacaacccgattgcgtactacgaagagccgcagaacttcgcgcgctggggtgaaggcaacatcatcaacaagcaggaacgcaagtccgtctacgtcgccgccgacttcggcttcgactcgttcaactggaagactcagttcctgtacaacaaccgcaccacggacaacttccagtggcgccagttcttcccgacggtctacatcccgggcacgaccaccaaggcccagccggtgatgccgttcaagtcggcgtcgagcgttgaggtcgattacttctacattgccaacaagctggatggcctgttcaagggcaccgagtcgtggggctgggaagtcaacgcgaactacagccgctccagcggcaagtactcgaccctcggcatccgcaactcgatcaccggtgatctcggtcgtccgggtaccggcaccacgccggcggccaactacttcgacccgggctacctgagtggtgccaaggtcgacgaactggtcggcatcctgggcatcactgcacgtggcaagaccacctacgaccaggccaccgtcaacgccatcttctccggcaacctgttcgagctgccagccggtccggtgggcgcagccttcggcctggagtatcgctactacaagatcaacgaccagccgggcgagggctacaaggacctgtggggttcgagcacggccgatgtcaccaagggtgatgacaaggtcaaggaagccttcctcgagctcgacattccgctgctgaagggcattaccggcatcgagtcgctgagcctcaatgcctccggtcgtgttttccgctatgactccaccggcagcaccgaaagcgtctggaagaccggcctgaactggcagatcatcccgtcgctgcgcctgcgcggcaccatcggtacctcgtaccgcgcaccgggcctgtacgagctgttcctgggcaaccagaccggcttccagccgcagagcgccatcgacccgtgcatccgctggggcgagagcaacaacaccaacatccgcgcgaactgcggcgccgccggcattccggatgactacgtcggagcgggttcaagcgcaacggtcttcaccagcggcggcgccggcaacctgaagccggaaacctccaccgccaagagcgttggcctggtgttcactccctcgttcaccgatctgagcattgcgatcgactacttcgactacaaggtcaagggccagatcacctcgctgggcgcggatgacatcgtttcgggctgctacggttccacgaccttcccgaaccgctactgcgatctcatgaagcgcaatcccaccaccgggactgacgccaactcgatcaccgaggtgtatgcccagtacctgaacatcaacgagcagcgcacccgcggctgggacatgaccctgaactgggagcatgaattcagcttcggcaagttctcgctggacaaccaggtcacctacaccgtcgaagacgttgccaacctgttcgacagtgccgaggccagcggcctgtcctcgtcggaccagctgggcctgatcggccgtccgaagattgtctccaacctgggcctgagcctggagcgtggcgattggacctacaactggctgacccagtacgtgggcaagacggagaacaagaacctcaatccggtgttcacctaccagggtcgtccgaactcctaccgcgacctggtcgccgaatcccgcatctatcacacggtttcggtgagctacaagcaggccgactgggaagtgcttgccggcgtggcaaacgtgttcaacgccactccgccgcaggtttccaccggtgcgaccaccagccgctacggcaacgttgctccgttcgcaacgcagtacgactacttcggccgcaccccgttcgtgcgcctgaagtacaagttctaa

SEQ ID NO: 529696 - DNA, 837 bp, Stenotrophomonas maltophilia
gtgaccgccgccgccggtgacaacggcggcccccggcgcttcgtgccgccgccgcgtgcggcggtcgatccgcaggcattcaggcatccgttgtttggcgggctgcaggactttcgtgatctgctggacggcactgcatggccgtccatcgctgcgcttgatgcacggctggcgcttcctggccgacagctggtcgagcaggacgctgcgctgctggccgacggtctgcactacgaggtgcgcatcgcgcagggacgcatcgccacccgcgccgacaactggcatgacctgttcaatgcactggcgtgggcccgctatccacagctcaagcaggcactcaacgcgcagcaatgccggcatgtcgaggcgatgccgccgggccagcgcaaccgcgcgcaggcagcactgacccagttcgacgaaaccggtgtgatcgtgcgtgtgtgcgatgacgcgttgctacgcgcatgggatgggcatgactggcctgcattgttcgagccgaggcgctggcagagtggtgacatcgccattgctgcggtattcgggcatgcgctgatggagcaggcactgctgccggggcgattgctggtgggcaagtgcgtggtggtgcagggtgacgacgatgatgaagcctgcgtcgcagcggtggccgcggccatcggcgagggcagggcggtcaccgatccggcgcagctgcggccgctgccgctggcgggtatccccggctggcatgaaaggcaggatgccgtcttctacgccaacaccgactacttccgtccgctgcgcgcaggtcgcgcgtacccgccgccgttgctgctgttgctgcttcggtag

SEQ ID NO: 529697 - DNA, 783 bp, Stenotrophomonas maltophilia
atgggctatccccgcagcagctactacgcttggctgcgccgggaacctcagatcgatcaggagtttctggaccaggttgaactggtgcgtcgcattcatgaatccagtcgcggcagttatgggtcccgcaggatggtcaaggaattggccaacaagggcctggaggtcggacgctaccgtgctcggacgctgatgcgcagggctggagtgagggctcgacagcaccggcggcacaagtatcacagccttgggccacaggctttgacggttcccaatgtattggaccgacagttcaacccgacagcacccaatcgggtttgggcaggcgatatcacctacatcccgacccagcagggctggctctatttggccattgtcgtggacctgtttgctcgccgggtggtgggctgggctcattcccacgaagcgggcgcgtggctggccgtcagggcgcttcagagggcgttgaagcagcgccgtcccaagacggggctgttgtttcactccgatcagggcaggcaatacaccagccatgctatggccgagatcctgcgcgacaacgggatcatccaaagcatgagccgtaagggcaactgctgggacaacgccgtggtggagcggacctttgccagcctcaagggagaatggctctactccaagtacccggcgcggcaggaggcggtggccgacatcgaacggttcgtagactggtacaaccaccgtcggctgcacaccgccaacggcctggtgccgcctgccctccacgaagagcaggcagcctga

SEQ ID NO: 529698 - DNA, 153 bp, Stenotrophomonas maltophilia
atgtgcgaggaggatcgcatcgagcgccggctcattgctcacgtccagctggcgcatcagtccggcaacggcacgcatatcagcacgaatctgatcgacgatgagggcatcaggctgctcgctgttgcgctcgcggcccagcctagcagatag

SEQ ID NO: 529699 - DNA, 273 bp, Stenotrophomonas maltophilia
gtggccgaaacggtggcacggctggtcgctgaacggggtgggccggatgcgatcaaggcggacaacggcagggagtttgtcggcaacgtgatggaccgctgggcttatgagaacggcgtggagctgtatttctctcggcgtggtacgcagacgcacaatgcgatggcagagagcttcagcggccgactgcggcaggagtgcctgaacgagcattggttcttatcgctgcccgatgtagggagcaaaaatcgaagcgtggcggcgcttctataa

SEQ ID NO: 529700 - DNA, 855 bp, Stenotrophomonas maltophilia
atgtcgaacccacggccatggaaggcagcattcaccaatctaggcaagttcatcggggaagtcatcagcaagatcgtgattccaacctgcatggtcttcattgcattcgccgctcaccagttggcatcgcgctccgaagatcagcggcgggaggaacagaagcagaccgggatcgaggacagagcgttcaagaatgcaagcatcggccaccagcagagccaggccgatagacagcttgatcagatgatcatggcattcatggaaaagtatgaagcccagatcgtgtcccgggacgagcaggtattcctgcacctcctcgaccgagcaaaggcttacttctcggaaacggatttccggctcgtccaagtgcgcatcatctccttccgagcgagcgcattgagcctctccagcgagagcgacgtaggccaggcttcggccaacgtccccgcgccagctgccccccctcccacggccgaggattacctgagagcaggcagagatgcgctggtcagcggaaaggccaaccttgcctttcagtatttccaggccgcaacaaccgttgatgcctccaacgcagaggcgtggaacgcacgtgcatatgccggtctgcgcacatccaatcttgctgatgcgaacgagagcatcgtcagggccatccagctgtcgtcgggcgcaaccggcaaggttcgcatggatactgtcatcaacgcagccaagatccagtgcgtgggcatcggccgtgacacgggtattcgctaccttgaggcgcactacgagaaggtacctgggctgagagagcgcgcctcacaggatggggaactgtcaaagatgtgcgcgagcggcacgatcggctga

SEQ ID NO: 529701 - DNA, 153 bp, Stenotrophomonas maltophilia
atggacctcctgggtttcgggtggctgacgatcgaagtcgtagcgcatggtcccatcctcccgcagcagccagtgcacggtgacccgttcgtggctgccgtcgccgagatcccaatccagagtgcgcatcagcagaatctggccatcaggtag

SEQ ID NO: 529702 - DNA, 534 bp, Stenotrophomonas maltophilia
atgaacgccatcatcaagaaagccgcgctcgctgcagcgctggccaccgcttcactgtctgcacaggcagtcgaaacccgtatctcagtctatgccaatgtcgattccacactcgccttccagcaggaagacggcactgctttgccggatgtgatcaccctcaactaccaccccgaaatgacgggaactggcggccgcgtcggcgggttgcagccctggaagctgcccacgcgcatcttcaccaatgacgaagacaaggatattgaagtcagcctgcgaactgcgctggagctggtgccgacgctgggctttcccggtgccaagccggagccgatgactgtcagcctggacgacgtcgagctgaccacggctagccaggacttcaaggctgccgatctttttgacggcgcaatcccaggtgtatccaagccgctggacctgaagatcacgcagaccaccccgggccccctcgctgctggcacgtacaacggcatggtcgccatcgtgatggcccagaagaccggcaccccgtaa

SEQ ID NO: 529703 - DNA, 3879 bp, Stenotrophomonas maltophilia
atgaaccgcatctatcgacgtatctggaatgccgcccggcagtgttgggtggtggccagtgagctgagctcgccaaggggtaggccagcgcagacgcgcgtggcgactttgctctcactttgtcttgctgccgcaggctttgccgctcacgcggagcaactggaagagtgtgttgacggtgtgaagccttgcgccagtcatgacattgacgttaacgaatgggttattggttcagtgccaattttttcaacttttgctacgagcataagctctggtgttctagcatcaggcgacacgatttacggctcgggaaacagtacaactgccagttacaactcaatctttggttactactcagaggcgcgtggctatggcactgctatgggctactactcacatgctgcatccgaaggtgctacagcctttggggcgaacgcttatgcgagatctaccaatagcatcgccataggtcgaagtgccagtatcacctacagcacctcaaacgaagcaattgccatcggatatagtgccagcgctggcagcaattctatcgacggcgctgtagccttgggtggccgggccgtggcgagggatgagtctgtcgcagtcggctacaaggccaaggtgaacggtggcttctccgcagcactcggaagtcagaccgtggttaatggccagaactccgtcgcgctgggtagtcagtcgcaggcagatgagaacaacgtggtttccgtcggcaacggtagctggctgaagcgccgcatcatcaacgtggccgacggccgagtagccgatggcagcagcgaggtggttaccggaaatcagctgtacaaagtaaaggctgcatcggatgctgttgagagcattgccagggctgcgcaaagcaccgcgaacaccgcgaagagcaacgcagacagcgctctagccaaggccagcatacgggaggggctgctgaaccagacgtcaagtagcagcacgctccggctgggcggaagcaacagcggtgcgcttctggatatccgcaacagcagtgggagcaaccgacgcatcaccggcgtggctgatggccaggtaaccaccagcagccttgaggcagtcaatggccgccagttgtacgcgaccgatcgcctagctacccgcggtgacgcaacggcgaccgcggcaatgcgcaaggctgacgcgacaaccgctcagttgagtggcgtgtcgctggcgctggggcagaccgcgacggccaacagcagttatggaacggcactggggggaagcaccaatgcaggtgagtatgcagtcgctgtgggttaccaggcattagccaaggcgaagaacgcggttgcgctgggctatcgctcggacgcatctgcggcgaacagtattgcgttgggtgagtacagccgggcatacggtggctccagcattgcagtgggcaactcgtcccaggccggtggtgccggcgctgccagctttggttttggcgcaaacgcaagcgcagacaactcgttggcgtttggcggcctcgccaaggcttctcacactggttccgttgcgttgggcaatgattccatcaccaccggcatcaatcaggtatctgttggcaatgcgagcgtgcaacgcaagatcgtgaacatggccgatggcctcgtcgccaagggcagcaaggaggcggtgaccggcagccagctgttcgataccaacaccactgcgcagagcgctaaggtagcggcggatgccgcattgttgcaggtcaaggcctcttcctacctgttggccaacggtacggtcggtagcgatacaaccaaggcaaaggcaaccggcacgggtgcgctggccagcggcgtctataccgaggccagcgggacggctgcaaccgcgatgggccgtacggccaaggcattggcggaaggagccatcgccatcggtgatcgcgccggcgtcgaatctgttacctccaagcacagcatcgccatcggaaccatggcaaagaccggaccgcaggaagatctgctggccattggtcgcaatgccaatgcctccggtggggtgggtgcgatggcccttggttatggcagcgccgccagccatctgcgttcggttgcgcttggctcgggctccacgaccagcgctcaggaccaggtgtcggtgggtagcgcgagcatcaagcggaagatcgtcaatgtggccaatggcagcctaacctcgaccagcaatgaagctgtgaccggtgcgcagctcttcaccacggacaagctcgcacgtgacgcacagaccggtgccagcagcgcgctttccaaagcagtggcattggaagggctgatcaagcaggtcagcgtcgccggtgatatccgtgtcggctctgaaaacacaggcacggttctggacgtacggaacaagaatgacgccaaacggaagatcagtggcttggatgacgcatcattgagttcgggcagcagcgaggcagtcaacggcgctcagctgaatcgaacgaatatggacgttgctgacgcgaagctggcgattgatgatgctgtgaaccggctgatgggtgtggagaactcaaccaggcacgtcgccatcggaactccgatcaacgacgagaaggcgagggctggtcgcctgggtattgcaatgggtgactccgcagtagcagcgcccggcaaagacggtgcggtcgcccttggcagcttctcgcgcgccgagggcgaggactcggtcacgcttggacgtgccgcatgggtgcaggatgcagccagcagaggtttcgccttgggttcgcgctccgtcgttgccgagattgagggcgttgcgttgggcgcaggcgccgaggtggcaaagggggcgcagaacgcggtcgcggtcggtgctggatcgattgctcttgagagctttacagtgtccatgggtgatggcgcacttcagcgccgcctcaccaacgttgctcgcggcaccgccgaccacaacgccaccaccgttggccagttgaacgacagcctcgccaccctcggcggcggagccaaactggacgccaacggcaacgtgacggcccccacctacagagtccagaataccgaccagcacaccgtaggcggcgcactggccatcctcgatggcgccgtcctccgcaccacctcccgcgtcgacggcatggaaggccagctccgttccatcttccaggatacagccaccgcccgtgccgatggcttcaaccagctcacactcgccggtgcgcagggcatggtcatttccaacgtggccaatggcctgattgctgcgggcagccgagaggcagtcaacggcggccagctgcacgcggtgcagcagcagctcaatgggcgcatcgacgggctggagcagcgcgtagagggccagggcccggcgccgcagtcgcgtgccatggcgctggcatccactgagcaggaggcagcggcacccacgccgcccgccacgcaggacgacaaggtcgtcgccgataccggcagcgcaccgaagtcctcgcccgcaccgcagccgaaggctgatgcgccggaatcacccaagccgcaggtcgacaccgccgagctggagaagatgctggcccgggccaacgactacagcgatggcatcgcccgcgaagtggatgcgcgcttgaacaagatggacaagcgcttcaaccgcatggcggcgatgagcagcgcgcagaccgcgatggcgatgaacaccgccggcctggctacctacaaccgcctcggtgcgggcgtgagctatgccgagggcgaatcggcgatggcggtgggttaccagcgcgtgttgaacgacaagggctcggccaccttcagcctcaatggtgctttcaccaacagtggtgagcgcagcatgggcgtgggtgtgggcatcggctggtaa

SEQ ID NO: 529704 - DNA, 255 bp, Stenotrophomonas maltophilia
atggcttggcaggtgttaagccgcaggcgccgttgtgccgcgcggcaggatggggatcgtgcggattacgtcaccctgcgcgtcgtcggcggggtcaaacacacctggcaccgagacgatcacagtgcccaggccatcgacggtatggacagcgtgcgcatccgggagctgcgcgtgctcaacctgagctggaacgaatcccatccagccgaagaactgacggtgttgatacaggcgccggtctatttgatatga

SEQ ID NO: 529705 - DNA, 207 bp, Stenotrophomonas maltophilia
atgcataacgagagcccgcttccgatcggtagggtcgacggtcagtcggctcgcgaagagcagccgaccagcggtcggctccaccagggcgagagcaacggcatcgaacagcagcgccagcgtgccaagcgtaccgctgcctgggtcggcgccatcgccgtgctggtctacgtcggcttcatcctcagcggggtgatcggccgatga

SEQ ID NO: 529706 - DNA, 660 bp, Stenotrophomonas maltophilia
atggttcgtacgtatcccgttgcatccccgcacttcgaccccgcccgcgttgccgcctggagcgcggccatcgccctgcatcttctggccttcctgttgctgctgatcccggcaacctaccaggccatcaccaccctgccccgcgacaacaccacggtgcggctgatccccaaggaaattcccaggccgccggagccgcccaagctgcgcacggaaccccagcacgtggacgttgttccgaagcagcagaccatgccgaaggaagcaacgccactgccggcgccgaccgccacactggaggaagcgcagggcatcgtcacgcccgctgccgaacccgcgtccctgccctcggtcccggccatcgacagttcgacgccaatggccggcgcccagctgcagtaccgcagcgcaccgccaccggcctatccgctaccggcgctgcgcaaccacgagcagggcacggtactgctgcgggtggaggtcgacagcagtggtcaaccggtcgtggtcagcatcgagcgcagcagtggctcacgcagcctggaccaggccgcccgccagcaggtgctcaagcgctggcgctttgaaccggcacagcgtgacggagtagcggtaccggccatcggcctggtaccggtgcagttctcgctgccggactga

SEQ ID NO: 529707 - DNA, 249 bp, Stenotrophomonas maltophilia
atgggcgaaatgccaagcgcggtaagggttttgtctgaatgggtgaatgttgctgcattgcagcatcgcggtgacagcctgcgacaggatgtcgcagggttaaacgtgctgcggccgcacatgaaaccgcggctgagcatgcagaccggccatcggcgcggtgatcgcccggaatcgggcccgaccgcgcaacccggcgggtggatgccgacccgcgcgcgcttccagcagcgcgggtatgcaccgtag

SEQ ID NO: 529708 - DNA, 225 bp, Stenotrophomonas maltophilia
atgcgctggatgaagtggtggcctgagcgggtttcgtatctgccggccagcggccggcactacccgaccggtagtgccggccgctggccggcaaacgccaggccgaaccacgacggtagtgccggccgctggccggcaaacgccagattcggctacaccccggcctccaccaggtggtcgatgaagctgcgtaccttcggtgccaggtggctgcggctggtatag

SEQ ID NO: 529709 - DNA, 1227 bp, Stenotrophomonas maltophilia
atggatagcgacagtggcccgggcggcatgcgcgatgcagggccgggcatggatcatcttgcggtggtggccctgaccctgatgctgggtggcagcgtgatcgcgctggtggggcagcacactgccgcccaggcaggccccgccatcgtgttgagcctgttgctggctgcgctgggcacagggccgctgctgtactgcctgcgcatcctgggccagcagctgccggcggcccacggcctgcatggtctgctgcaggcccgctggggcagcgccccggccggcctgctcggcggcgcgctgctggtggagctggtggcgaccagcgctggcgtggcgcaatccatggccagtcatgtgcatgcactgctggccagcgctggcatcgaggccggcaacgcgatgccggtcgcgctcacggctaccctcggcctgcttctgctgggcgtgaccgtgttgttgccaccgaggcgcgctgcactggtggcctgtgcgctgttgacggtgaaactgggtaccggcctgctgttgctggcgctggcagcccgccacgtgcattacgcgctctggattccgtggttgccggaagccacggcgccctatcgcttcgggccaggcggggtattggcggcgagcgtgccgctgcttggcgtgttcgcctgcgccggcctggtgctgggatttccgggcatgtgcggccaggcgcgcgcgcgacagacgctgctgcttgcgggcgtgctgctgctggcgatgctgctgctgatcgcgctggctgcgttgcaggccggcctggtcgagttcccggcattggccagtacgcgaccgctgtcgatggcgttgcggcagcatccacaactgcagtggatgatgccgctgctgccgctggccggggcggccgggttggcggcgttgctgctggtgctgctgcgggtggcggcgcggttggcagcgcagctgtggactgccgcgcgcgatgcagcacccggatctaccgcaccgatgatgcgggtcgtcgtggtgctgtcggcggcgctgttggcgctggcgatgccgatgggcacattgccggtgctgcctggcccggcaaccctgctggtgatggcggcgctgtgcgtggctgtcctgcgcgcgcaggttccgctgccgcgcgccgtgccggtgctggcccccctggccgccgcgctgtgcctgctggctgcggtggagcggatgcgtgcctggcccggctga

SEQ ID NO: 529710 - DNA, 1500 bp, Stenotrophomonas maltophilia
atggttgccgccgccagcgaacaatgtgctggtgtcgtcgacggtgagcgtaccggtgccggtgccggcatcgcccagaaccagattgccgtcgaaggtcagttcggtgctgctggccaggctgatcgtttcccagttctggaagcgcccgacgcccgtggtcttgacgttggtgaggttgagctggtcggtgccgctgccgccgtcgaacagggggactgcaccgacgtgggtctgggtgaggttggccaggttcgcaacgtcgtcatccgggcccatgtcgatcgcaccgtagacgatgccgccatcggtccagttgaacgtgtcgttgccggtgctgagcagcacctggccgcgcacggtgccatcagtgatggtcacgctgtcggcaccgccgctgacgctgatgttgccgccgatgtaggccgtgcccgaaatgatgatggtgtcggtgtcgaagccggtcaccacgttgccgtcaacggtaccgccggacatgtcccacaggttcttgtccagcttcatgttgacccggccgatgcggccaccggtcatccaggcccggtcgccatcctcgaacgcgccgatgatgcggccaccgctcatgcggaaggtatcgatgttgtcgccctgctgcagcgcgccgatcgtgccgccggtcatgacgaaatcatcgcggccactgccctgtgcgaccacgccggtgatggtgccgccggtgaccgtcatctggtcatcgccgctgccctggtcgacacgatcgagggtgccgtcgttgagcagcagcacatcgttgccatcgccctgcaggacaccgccgctgatgctgccggcctgcatctccaggcgatcgttgccggcaccgaactgcacgccggttccgccactgatcgttccgcggttgaccagcacgctgtcaccattgccgacgaactgcagcgcgatgttgttgcccgtgctgatgctgccaatattctcgacgcggctgccgccgccgagctgcaccgccacgccaccgaccgaactgatcgcgccctggttggacagcagatggccccctgcaccgaccagcgcaatggcggaaccgccaccgctctgctgcagctgggcgctgctggcaacgttgacggtgatgccggccgcgccgctggcagcgatgggaacggtctgcgggttgggcgcgctggcgctgcaggtgaccgtctggccggcaacgggcgcgatggcgtcacagccggcccaggcgacgctggcggtcatcagcatgacggagggaacggccagggcctgcagcacggaaacggtgaggcggcgcggacgaaacgcgcgcgggacggcacgggacatacggcactcctggacaggggatcaggaactgcggatatgcggtactgcgagcgcagtctgccttgttgtgaatggtttcgacaggtgaatttacgtgccagtgatcacacttcaattgcgaactcgggcgattctcacctggcctctacgtga

SEQ ID NO: 529711 - DNA, 1128 bp, Stenotrophomonas maltophilia
atgattgcaaaggatcgcctgcagttcctcgactcgcttcggggcttggctgccgtctatgttgtgttgtatcacgtccagtcgatgccgacgcccacgttgtctgtcgcgggctggttgttgccggtgctgcacctgggggccacgggtgtcgcattgttcttcgtgatcagcgcattttccctgtgctatacccagcctcgccacagagccagcggtcggccgttgctgagcttctacctgcaccgcttcctgcgcatcgcgccgctgttctatctgctgctggcgttctcgattttccgcgatggccggggtagccatgccggccatccgtgggccgagatcattgccaatgccacattcacattcaacctcttccccggttgggaccagggaattgtctgggccagctgggcagtcggggtcgagatgctgttctatgcgatcttccctgtgttgtacctgtgggtgaatgacgggcgccgggcctggatgctcctcctggcgctgttggggctggcggcgttggccggaactggctcgctgggagcacgcgtggaggcttcgctgggcagctacggctggctgacgcacgcgcctgtgttcgcgatggggctggtggcgtatcacgcatacaacgctctctcgcggctgccttccgcgcaggcgcgcgggtggggaatggctctgaacgctaccggtggcctggtgctgctgctggtcatgacaggaacagtgggcggctggagcggagcgagccaatggcaactggcgggccttggctacctggcattgctggtgggttgttcgcaatgcccgccacgctggttgatcaaccgggcgacagcctggctgggtacggtgagctactcgctctacctggggcatcccattgtgatcgccttgctcgcgccggtgtttggcaggctgctggcggtcacgggtggcgggacaaccggctatctgctgtgcgctgcgctggtactggcagtcgcactgccgttggccgcgctggggcatcgctgcatcgaagcaccgatgatcaggttgggcaaacgcgtgatggcatcgctgtccgcatcaggtgcaggggcctcatccaggcaggcggagggcggcccacgctag

SEQ ID NO: 529712 - DNA, 777 bp, Stenotrophomonas maltophilia
atgcaggaagcacagtggtggtacgccaacagcaggcagagcgaagggccggtcgatcttgccggcctgcgtcgcctgcagcaggacgggacggtgacggcgcgtacgctgctgtggcgcgaaggcatgccgtcgtggcgaccgttggccgaactggacccttcggtggcgacagccgagccggtcgccgcgccgcttgaacatgcggtggtcgcgcctgtcgccgctgcagatcccgcagatcccgcagatccctaccgcgcgcccgcgacggcggccacggccacggccacgcccgccgccgggctggagggcgagatggcgttgtatgccgccgtggtcggaggcaacttcccaacctatcgccagcgctggcggttggatcagggcatcgccacgggcagcggcacctggcactggccggcgttcctgctgggcctggtctggatgatgtaccgcaggatgtatcgcctcgcagcgatgtgggcgggcctgctgctgctgatcagcgtgatcgagacgctgctggatgtgcctgatggcctgtcgctgatcatcactgtcgcgctcagcatcactaccggtgccttcggcaacacctggtacctggcacattgccagcgcctgattgcccgggcccgagcggagagcccgggcgacgaggcgcggttgcaccgtgagctgagcgcgcgcggtggcaccagcgtggtcgccactatgatcgccctcgtcatcgcggcggtgctgagtaccgtcggtgccggattggccgggtag

SEQ ID NO: 529713 - DNA, 1110 bp, Stenotrophomonas maltophilia
atgagcaaccaatacctggaactcaatccctggcacaagcgccaagccgccctcatccatcatttcacctcgatggattatctgaagggattgttgccacagatcgacagcctgctggcgctgaccgaccagatgctcaatgagcgatcgcatctggatacggcgggcagagccttggcaggttggagctcccaaaatacggcatcacacttcgcgacgtacgcttttccggcgctcatggagtttcgtgaaggcatcgtcaaggacatagcactgcgctcaatcgagcaatacagtgtcgcaggcgagcaccaatgtgctcgcatgctggaggagtacgcctaccagatggcctgggcgacgccggagcaggaaaagctgttccgtgacaccaccgaaagcgtcttcagatatgcacgggagctctccggcatagtcgcacgcccccccgtcaagaatgacttctcattctggctgctctggaacaagggcgtgatcgactcacatcgaatcccaaaattccgtgtccgcacagattttgtcgtgcgaaccaatcaggttcctccgcgcactggtatctacgttgccaaagatgaccccatagcttcacttcagtttgcatggactggtgggtacggacacctttgcccagccatggcccccaatgatgttggacgagccgtactgcggcagttcggtcgagagcgactgtggggcgatgcagaaggcctgtatcgcttcctcgatgcaaaccggcatctggatccctatggatggtcagacattcaggccgatctggccaagctggcaccgtcagtaattgcaggtgtgggcttcgatgatcaggattgcgactggtattttgtcgaacccattgccgatgaattcgaggatatcgacggcagctacaccggcaacgatcagccggatctccgaccggaccgagtcgcagccggagagcgggtgcctgtagccggctggtggtacacgcccgcgcaaggtggcaggcgcttcttcaagcaaggcgatgtgttccccgccatcaacagcgactggggtgacaccttctggatctgggcgccagaccagacgccgccggcattgggttga

SEQ ID NO: 529714 - DNA, 405 bp, Stenotrophomonas maltophilia
atgagcaaagcaccgggcactactcttgaagctattgcatccgccaaagctaagctggctgaagagctgaagaagcttgaagagcaagaagttaagttgatggaagaagaggcatcgagcgctttcgcaaatgtctcggagcttctgaaccgctttggtcacttcttctcggctaagcagaagtctgagatcgccaatcatttcaacgctacttcttcgactggtaaaaagtcgtccggttccaggaaggaagttgctcagaaatactggctgccgcatacccaggaaacgtggagcgggcgtggtcgcactccgcgcgccttcgccgcctgggaaggatcggctgcttacaaagagtggaaggcagcacatccggacgaaaagttcccgaagttccccggctaa

SEQ ID NO: 529715 - DNA, 684 bp, Stenotrophomonas maltophilia
atgccgagaaagacaaacgagaaggctgaggaagagggcttcaagaacgccttggagtcgatctttgcagatcaggataagcgcgatgagttattagacagccaggactacgcgtcggtgcgcaagaagcttcatgagatgagcggtgatgctctattcacgctatcaatgacagcattcttccttggcatcacaagtagcgctttgcgggaggctcgaaagaagtatgacgatcctttctccgtgtccaaaagccacgcggctcgcaaagatcagatcttgcgatggtggacaacggtcttaaagaaaaagagcggggtagaagaggaaatcgaaggcagcgctggactcgatcttcgtcccagcccaaacctctttatcgtcttcaaagacaagattaccggcaggccggttgttctttgcaatagcctgatcacctctgtctctgacgagctcttgtcagataccttgcgggctggatgccgtgtcgttgcactcacgcccgagaaggcgattgagaagccctgggaggtgcatgaagaaaaggccgcttacattgaggcctaccgcaagcatcttgaaaccaagcaccgggagaagcttctatggctggatcgagagcaggcgcaaagcaaagcgctcgctgatcgggcagagcttgacgcttcaacggtaggtaggtaa

SEQ ID NO: 529716 - DNA, 192 bp, Stenotrophomonas maltophilia
atgaaagtaaaattatgtttgggaaaagagtatcaagtaacactgctagacaagaccgtcgttacactaattgttcatggtgcaagtccgggtgtcgtccagttcacgctggatggcatctactgggagcatccggacatcgagttcctgcactggagcaacattgaggtagttaagggcatcgccagataa

SEQ ID NO: 529717 - DNA, 1158 bp, Stenotrophomonas maltophilia
atgaagcgagagacactgatccagttgatcggggacgacgagattggcctgctcaaggtcaaatctcgggtgcccgaagcaatgactcaggaccagcgccttcttggttctttcagagagattgaggaattcgtcaaagatcacggacgtatgccggaggcgaacccgaaggacatgcacgagttcaagctcaacagcagattgagcggcatcaacgatagcccagccaaagccgaagcgcttcgtcccatcgacaatcttgggctgattaaaaagccaattgagtcgctcgacgatatcttggacgatgatgatatgggtcttcttggacccgatcctgagagcattttcacgctcagaaacgttccgtccaacatacgcatgccagagcggattgcgtcgcgcaagccttgcctggactttgccaactttgagtcgttgttcgtcctctgtcatgcagagctcaaacaggggttgagggaaatgcgcgccttcactggcgaacagcaaattcaacccggccactttttcgttctacatggcgtcatggcatatgtcgccgaagtcggcgagaaagagattcgcaataagaaggtcaatgccaggcttcgatgcatctttgagaatggaacggaaagcaacatgcttctgcgttccctagccactgagctttacaaagatcctgccggacgccgcgtccttagccacagtgatcaagccttggatgagttggaccaagtcaaagacgacgacattgaaacgggctacatctacatcctgagctcaacaagtgagcgcgacgacatcaggagcatcaaccatctatataagattggctattcgactgttccagttccgcagcgaatcaaaaatgccaagagagaaccaacctatctgatgtcaggcgtcaagatcatctccgcctacaaatgcttcaacctcaatccacaaaaatttgaaaacttgcttcacactttttttggaaagtattgcttggacgtgcaggtggttgatgagctcggcaagaagcacactccgagggagtggttcattgcaccgctacctgccattgagatggcggtgcagctattaatcaacggtgaaattattcactatcgatatgatggcgttacacaacaggtcatcgagagagagtag

SEQ ID NO: 529718 - DNA, 1920 bp, Stenotrophomonas maltophilia
atgcctaacatcgtcgaagtcagctacgaacagaccggtgaaagcaccatgatcaactcacgcggcatgcgtgagatgcaggttcgtgcctatgaggcacgcgacagccaatacctgttgcttaaagctcccccggcgtcaggcaagagccgcgccctcatgttcctcgccttagataagctctataagcaagggttgcgcaaagcgatcatcgcggtgccggagcgatctattggcgcttcgtttgatagcaccgacctttccacccacggcttcttcgcggactggattgtagaggcacagaacaacctctgcacacccggcggagacggaagcaaggttcaggccttcctgcggttcatggaaggcgaagaccgtgtgcttgtttgcacccactcaactcttcgtgcggcctttgaagcgcttgaagaggagatgttcaacgactgtctgctagccattgacgagttccaccatgtttccgctgacgaagacagccgccttggactgctgcttcgaactgtgatgcagaagtcaagcgtgcatatcgtcgcaatgactggctcctacttccgaggagacagtgtgccggtgctgctgccagaagacgaagccaaattcaccaaggtcacttacaactactacgagcagctcaatggctatacgtatttgaagtcacttggcattggctaccatttctaccaatacaaatacctgactgcgatcaaggatgtccttgataccgacaagaaaaccatcctccacatcccaagtgtgcgttcaggcgagtcgactcaagacaagcaccaggaagttgacacgatcctggacatcattggcagcgtccagtttcaagactcagagactggtgtaatccatgtcaaacgcaaggaagacggcaagatcatcaaggtcgccgacctggtgcaagatgagcccaaagcccgtgatcgcatcgtaggctacctgcgcaagatcaaatcgcccgacgacctggacctgatcatcgcgctagggatggctaaggaaggctttgactggtcgttttgtgagcatgcgctcaccgttggctatcgcggctcgctgaccgaagtgatccagatcattgggcgctgcacacgcgatagcagcaacaaaacgcatgcacagtttaccaacctaatcgctcagcccgaagccgaagacgacttggtgaagctggctgtcaacaacatgctcaaagcgatcacttgttccctgctgatggaacaagtgcttgctcccgtctttaaatttaagaccaaggttaacgaggacgatctcccaggacctggcgaagtaaagattggcgggttcaaggagccctcgaccaaacgagttaaggacatcattgaatcagacctcaatgatatcaaggccaagattttgcaggacgaccaaatcgtcaaggctcttcctggtggtgtggatcccgaagtcatcaacaaggtcatgatccctaagatcattcggatgacctaccccgacctgacggacgaagaggttgaagaagttcgtcagcaggtcgtggtggactctgtgatcaagggaggggaatacaaggaagacggcgataagcgtttcatcaagatggcggggaagttcatcaacatcgatgagctgcacatcgacttgatcgaccggataaatcccttccaggcagcgttcgagatcctatccaagtcggtcactgtgggcgtcttgaagctgatcaaggaagcaattgaagctacccgaattgcgatgacggaggaggaagctgtcatcctttggccgaagatcaaagaattcaaccgtctcaacggacgcccacctagcccagactcaactgatcccctcgaagttcgaatgggtcaggcgctgatctacattcgtaacgagaggcgtaaagaagggctatga

SEQ ID NO: 529719 - DNA, 2661 bp, Stenotrophomonas maltophilia
atgaagattgcagagattggagagtctgtccggcagctggtgctggcaccgaatcgggatcgattcctctacgaactactcgccgcatatgggcagccaaaagcttcgatcactcggcttgagagcaaggacaaggggagctacaacctgtccaaggtggaaggtgttgtcctgtggaagaagaaagtgctctatgccagcacagcgctcgacgatgtggagagctacgccgaagcactcatcgagtcgcaagcggttgaaaagcactcaccgcgtttcgtggtggtgactaattttgagcgtttctacgtgttggatacaaagaccgacgaaacgctcgacatcttgttcgttgaactaccgaagcactttgacttccttcttccttgggcgaacatggagaaggccacggttacgctggataacccggctgatgttaaagcagcagagaaaatggcaaaactgttcgacctaatcaaggcggacaatccctcttccgatccggcgtcggtccacagcctgaatgttttcctgtctcgcctgctgttttgctacttcgcagaagacactgggatattcaagcgcaagcttttcaccaataaaattgaatcgcagacgtcaagagatggcagcgatgtcagctcctaccttgacctcctctttgatgtcctcaacacggaggacaaggcatcgtggccgtcataccttcacgaattcgaatacgtcaacgggggcctattcgcggacaaacatccgacaccgaggttcactgcgaaatcacgccaaattcttattgaatgcggggctgaacttgattggtccgagatcaaccccgacatctttgggtcgatgattcaagccgtggtcgatgtaaaaaaacgcggcaagatgggaatgcactatacaaacgtgcagaacatcatgaaggttatcaaaccactatttctagatgcgctttatgccgacttcgaaaaatcgcgaggcagcacaaaaaagttgctggaactacaaaagcgcatcaccgagatgaagttctttgatccggcgtgcggctccggaaattttctgatcatcgcctacaaagaaatcagaagattggagatggagatcttcaatcaaatttcgctccatgaaaggcaggccgacttcggcatcacgggcgtccagctatcacagttctacggcattgagcttgatgatttcgcccatgagatcgccatcttggctctatggctagctgagcatcaaatgaacgtagcgttcacaaatcgcttcggcggctacaagccgacgctgccattgaaaccaagcggcaatatttttcatggaaatgctcttgaaatagattggacgcagatttgcgctcggcacccgaaggaggaagttttcctgatggggaatccgccatattacggagcgaagaaacagacgaaggagcagaaggccgatatcgcccgagtctttcagcaaacaaaaacctaccgcaacctagattacatctcgtgctggtttatgcttggcgctagatatgtaagcggaaccgatgcgcgagcaggatttgttaccaccaattccatcgttcaaggcgagcaggttggtcttctgtggccgtccgtctttgaattggctgtcgttattccgttcgctcacgaagcctttaaatgggagaacaacgccaagaataaggcgggagtcacttgcgttgtagttggcttgtcatcggatgacgttaaggagcgctggctctactcccaagatcaaaagacgctatgcaagaacatcagcccctatcttaccgatgccagcaacgcaattatatttaagagaagcacgccactatctaacattgccgaaatggtatatgggaacatgcccctggatggcggcttccttaaacttgagcccgagcaactctctgaactgctgcaggagtttccgcaagccaagaaattcattcggccacttatcggcggcaatgaactgttgtatgacgagaagcgctggtgcatatggattgaagatgaccaactcgccgaggcagaactaattccgccaatcaaaaagcgaatccaacaggtcagggatttccgaatcaacggcggcgaagttgcgcagactctcgtcaatcgttcgcatcaattccgatatcgccagatggcaactcgtggcatcttagttgtcccttgcacctcgtccgaaaggcgagagtatcttcaagtaggctttgtaggcgctgaaaatgtctctatgaactcggcacaggtcatctacgaccccgagcctttctcgctaggactggtttcgtcccggatgcatatgctttggacaaaggcagcctgcggcgcgctcgactcgcgcatacgttactcaaaccttctttcatataataattttccgttccccagtatcggactggaaaagaggagggagattaccgcgctatcccttcaaattcttgacgaacgggaacggaatgcagaaatgacgcttgcagagatgtatgacccgaaaaggatgcctcctggcctaaagaaggcacatggcaacctggacgtggcgattgagagtgtatacagacgagagccattcaaaaacgattcggaaagacttgctcatctcttccatcttttcgagcaaatgaaggccaagaacaatgcctaa

SEQ ID NO: 529720 - DNA, 2604 bp, Stenotrophomonas maltophilia
gtgagttcattggacgaagaatatttcaattttttagagcatctcggtgcgtcgaatgctgacctcgaggtgcgccgtgtagcgcatgtcatccacgtgcacctccaacgcatcgctgacgccccaagtgccggtggccgtaggtcacaaaacgttgcagaattgctccggggaagcctgcaccgagttgaacagctgcctgagctcggagctcgcgctgatcaggatgccctcacttggtctgacttgaagtcactcaaaattgggccgtttcgtggattcagaagagaggagatcttcgacctaagcaagcgagtgaccctcttctacggtcctaacggaagtggcaaaacaagtctttgtgaggctatcgagtatgcgctgactggtgacgtcgaagaagcttcactcaagcgagcaggagctttggggagctatttcgccaacatccatgaaggtcgatacttggcacctgtgctcttctctcaaggtgacgatgagggcgttccggttgcacctgttccgggtctgctgcgctttgcaatcatcgagaagaaccggatcgagagcttcgccaggatcgctgcacgcacgccagcccaggctggggagctcattgcatcgctctttgggcttgaggaatttagcgatttcgtcaagcaatttcccgctgaaatcgatatcggattgttgcttgaaacgccgaagaaactgctccttgaaggcaaggcatctgcccttgccgctgctcaagcgcgtctccgagacgcagatgtaacgtcaaaagcgttcgttgacgagctaagcgcactcgctgcggagcttgaatgctcgattgatcgagtccgtgaactcatcgacccagatgatcgccagagccgactccaagagctcatcgccgcagcagatgagatcattcccgctcagtctggtctcaaagcaaatggtgttcgaccgtcctttcttgcactaaggaagaaccagcgacagctgcataacgtaagtcggcaactagccgacttggctgggcaagtctcgttcaagaagctctttcaatccatccaggagctccgagctgaggcgggtgaagcgtgtccagcctgcttgacgcccttggctcatgcagtcgccaatccatttgaacgtgcagaccatgagctgcggaatcttcaagaattggcagtgttagaagatcaggcaagcacgctcacagaaggctgcaacgagctattgcgccagatccgagcgtatcttgccccaattaaagatcaagcaggatacgaagctctagcaagcaacgccgtagtccgttgggccgtaagtgggcaaggcgctgactggaacatagacggcttgaaggcacaccatgtgcgtgacgtctctaaggcgcttgctgctttggaagcgggtgatttggaactgagcacgcgtgctgagtctcgccaacaggtgatctcggagagggacaagctgagtgacatcgctcaacgtctggcggtcattgatgccaagatagttcagcacgaagctggcttggtggctgataagacgctggtcgaaggcttcgatctggcgaactcagatctcattgaaagcgcgcgtctcgaggctgagtcttacgcgttcgaaacgcgtattcggacgggctatgcggcattcagagctgccatcagagcctatcttgagggtctgcccaggaagttcttggcggacctcaatgatctaacgctagacctctacaacgcgttcaatgaggatgatcacgaaagggacaagctcacctcactatctctccccctcaaaggtggagagaaaattatggttgcgttcggtgcagatccagcccggatgcatgatgcgcttcatgtgctcagcgaggggcatctcaggtgccttggtctagccattcttcttgctaagaacatcaagctggaactaccgctgctggtctttgacgatgctgtcaacgcaattgattccgaccatcgagccggcatacgaaagacgctgtttggcgacgagcggctcaacatcaagcagatcatcatcacctgtcacggcaatgagttcatcaaggatatccaaaatcagctgggcaacgatgtctctaacttgtatgtgctgagtcatcatgatggcgaccatcaaccgcgtgtccaagggggcacgagtaggaactacctcctgcgtgcacggcagttcctcgacgaaggtgatcaaagacagtgcctagccttctgtcgccaagccctcgaaaacgtgaccgccaagacttggaagaagatcagcggtaaatccagggaactcgcccaattgaagcttcccatcgcgccgccaattttcaagccagagctcggtgcgcttacccaagctctaaacaaggctttgaccgagggaatacagcgaggactgctgacggggcaggcgatgacagatctcagcgcgggattccaagaaatactgaacgtcccaaacagtcagctgatatggtcatatttcaacaagggcactcacgacgaggaggaccgtgaggacttcgagatccaagccgttcgccaaacatatgcggcgctcgataggatagctagagcgctacgagagtag

SEQ ID NO: 529721 - DNA, 168 bp, Stenotrophomonas maltophilia
atgaaaatcaaatatgacatcgacacaacgatcaagttttatcagatccattttaatcagaaagaagagcgtgcatcgcgtttaaagaacagggctaaagaccgtggccgtcgaacaatgcattggaaccgccagcaagcgtctaaagagcaggcggtgctcgcatga

SEQ ID NO: 529722 - DNA, 885 bp, Stenotrophomonas maltophilia
atgactcaaacagaaaaactaatccaggccgcacgtcggggggagattaacgctgtcaagaaacttattccagcgccatatccgggtgttaaaagactgtctgctctgcaatgggctgtggaaaacggtcacacggaagtagtcaaagtgctacttcctttttataagccgaaggcaaatgcttcgatagcgttgcgatatgcggctgagctcggtttcactgaaatcgttgagatgctgatccctgtttccgatccaatgtccaaacaatcctgcgcgttaagagtagctgcggagaacggacacaaaaagatcgttgagatgctgattccagtttcagatccgaaagcagataattcagatgcactggggtgcgcggcttttaatgggcacacggaagtagtcgaagtgctacttcctttttctgacgcaaaagacatgtgctcatatgcactgcgtgcggccgcaacgagcggacacaaaaggattgtcgagatgctaattccggtttcagatccgagagaactgaattcatatgcattgggctgggcttcatgcaatgggcataaggaagtagtcgaagtgcttatccccgtttctgatgcaaaagagttgggctcggatgcacttcgtgtggccgcaacgaacggacacaaagaagttgttgaattgttaattcccgtgtctgatgtggaagctgcctgcgaacggcttgatgaatcaggaaaatcacttctgaaagctatagaggcggatttcaggatgaaagagcttcaagcatccactgtccaaatcccacagagcttcaaggaatgcgttgaacaagccaagtctggcagccaggggacggtagcaagtcaaagagcccaagctcgaagactgtga

SEQ ID NO: 529723 - DNA, 282 bp, Stenotrophomonas maltophilia
atgtttgcacagatccagcctattaacttcgcaacgctcgaaggtgacaggaaggacaatccggtgtttgtcattgacgatgagttggttaaacttggcggcggtggcctaaacggcgaagcgtatagaattcgggtcctgacacattgcgggcatcgggcaggaagtatggatgtgaaaacagtaagcgccgttaacgcctacaatctggtcgtcaacgccttaaatcagatccaggaacccaatcgtagagcgaagcttgagaaaattctcaatatgtaa

SEQ ID NO: 529724 - DNA, 384 bp, Stenotrophomonas maltophilia
atgcctgttctttcagccgtggcgggtgctatcagcaccgcctcactcgtcgccctaattcactatgtttggtgtgcccacttccagccacaagcgttcgttcgtcgcgcccacatccagtcgggcatgtcacccctaaagtggacctactttggcctggcgtggctgggacttgcgatcatgatatatggaggcacccagagcgcactcttctggatgccggacgattggggccggactgacgaagagggcgacatccaacctttgaaaaccttcattgcggccggagcagcggtgttgttgaccttccctgccctgggcttcatctaccgtgcagcagcagatcgatgggatgtcattgagcggaacagcactggctcgtag

SEQ ID NO: 529725 - DNA, 807 bp, Stenotrophomonas maltophilia
gtgggaacaggggaagtttgtgcagcacatgagcttgctggccgttggggcagacctggcgtcgtcagacggtcgggccgagatgcggtcaccggcttccggccctggagcaaggtctgtcgtccagcaaatggggctgagctcttgaaaccgagctaccgagatcagataaggatcgctgctcagcagagggatgtggagtgcttgttgcactttacgccactgcccaatttggcctcaatcgtagaacatggtctcctctcgcgagaggcgcaactcgccaaagaggcgttcggctacacgagtagcgcccatcgccttgacgaaaaccattccgccacgtcgatttccgtgtccgcgatcaaccatgacatgttcgtttccaaacggaaggattcgggacggggtgactgggtagtgttgtggctgtcgtcagagatcctttggactcattcttgccggttctatgcgagaaatgcggcgcggcgagagatgcgagatcaccggggattcctgggtgggccatgggctttccaggagatgttcagtgaaagcactacacgtgcaggctctagggaggagcatggcttgcccgccgtcctgaccacccatccggacgcggaagttcaggtgttaggtccgatatcgccttcacatattcttggggcctgggtcagccagccatcccaacagaaggatgtagagttgcagttggcttgtctgacgcttagagatggacgggcaagagaagttgtcgttcgtgatttttcgccacgattcgtagtgggagcagatgcatggggatga

SEQ ID NO: 529726 - DNA, 1491 bp, Stenotrophomonas maltophilia
atggggatgattgaaaagatcaaggggctgatcccgagaagaattctttcggccgttgaatcgcttggactaagtattgcaaggggtgcaagtatggaagtgcaagagcaatccagtccgggcgacaacgacctgattgcggtgaccagtaggatgtttgagaagatccgtgatcagctcgttgccagtgatttccgagttgaacttttcaactgcaaagctacacagtgcgtttccctcaacccaatgatccatgagggcatcggtgtcgtgactcaaggcaaggacggcactctggagtttgcgttgctgtgtcagaagatcgatgctcgatttgattcatttgtagagctcttcgacaacttagagccaggaaagatggttgaggacaagagtcgatacaccatcactggtcacgattcgcttggaattcgctggcgatcagaacgtcaaatgcttagtgtggatcaggggcaggagctcaggctcacttctgatctgacgcatctagtagcggcacaggtgtctccgagaggggacaaggcaaaagagtatcgcggttggtatttccgaggcgacatgaagttgcccatacaaccaaaatcgaaggtatgggagcacgaagttggccctacctcctggaaagggttagtagatacgcatggcaatactgagctttcttttcatgctttagaagagggctcgcacgaaaaagcggaggatttccttcgaggtatcgccattctttgtggtcgtccgctttctgcgatgtgtcgctatcacttctttgatgatcggcagacggttgagatctacggacgacgcagaggccccaatcggaacgtcatggtgcctttcgttccccgcgcaccccatcatgcgaggtcttggaaccagttcttagaggcatggcttgctgctgatcagcaagtcagtggacgccgagtgcagacgttcattttccatcattttgctcgtgtttgctttgcctatcaggaaggcatcgagaacggagcccaggtcctctcatcttctattgaaggtatgttagctgggcttttcctgtccgacgacgacaaggacttggagttcgttcgcatagtggatgaaacattgaccacagcaagtgccagcggatttgttcttgatgaaagagtagtcgatctgttggaaaaaaatagagccaatgcttcacggcctggtatcaaaagcgtattccatcgtctgatccacagaggagtattggacaaaaagctctttgaagcttggaacaaaattcgccacaaggcggctcacggtgaacttctgggcacgtctgactcggatcaccaaaaaatctttgatcgcttcttcgcgtgcgtcgaaacgttcaagcgactcactttcgaagtcataggctatgacgggacaacaaatgattaccatctcccacattggcctcagatctctagaagcgtaatcgctgccccggttgtcaaggagagtttgtga

SEQ ID NO: 529727 - DNA, 288 bp, Stenotrophomonas maltophilia
atgagttttattgatttgactgaattgcagtccgaagattttagtgtcctgatgcaccgcgatctggcgcatatcattcaacgttttcttccgcaggatgttgaaatcgaagatgcttattgcgaaatcctgcgtcatgctaaatgggcgatttgcgtgggggtgttctgcactcgacaaattgtaaatgccatcatcgggtttaatttttttgggcactcaattcgtgttgaagtccacctcgccgcgtgtgggatcctcttggatgtcgcggaggatgctcaatga

SEQ ID NO: 529728 - DNA, 1071 bp, Stenotrophomonas maltophilia
atggagacgacagacaaaattaggatcgagcaagtgaacgaagcgaagcaaagttctcttgatgatccgattgcgattttcagccaagccatctctgaactatcagctcgacagtcattcaatctgccagcaaagcttcgccagcagttgagatcgatgcagacctcctgccccatctgcgcgtgtgacttctcccagcaatcatcaatcgtcgttgctcaaatcgttcccattgagcacggcggcccgaatgacttctcgaactgcttcctgtgctgtgagcgctgcaatcgcaagcgcggcacttcagatttgctcagcatgggcgatgcgttctgcagcccaaccgctgccccaccccttccatcgcacggccgtgcgatgggcttttccccgactgacctggtgcagcgccgtctggagttgctagctcgctctgccaatcactggacgccccatacccgcaattcgatgaagagcactgtgctgagacacctggctaagcggtgggctgagccacgctttcgtgtcttcgcccatcactcttctgacctggccctcattggctttgcacggcgctctggtgatgcagatagcttgggtgtggccaaggtgctgacaaagtttcagggtgctagcgcagcgctgctggacgatgatgtgagcgtctaccaggttgatccaaggcgcttcctgagcctgatttggtcactcatcgatctcaacgcactcatcgtgtccgtgcgactcccaggcaaagacgcacatgcgctcggtagcgagtggcaagacttctggccggaccatgtgcggtctgtggctgctctcagatcgcgcctacggcctggtcatgccagcaagttcggtgagctcgcccgctgccctgatgcaacacgcgcgctatctgacaagcctgacgcactgcggaagcgtcggaaaagtgccgcgagggttgagcgaaaccgcagccagcggctcgctctctatcaccagaagcgtattgaggaggcttcccaggacagcgcttacgccgtcctggaagctcgccttttatctctccaactcagctaa

SEQ ID NO: 529729 - DNA, 426 bp, Stenotrophomonas maltophilia
atgaagctgatcaaaagaaatgtattgcttgagggggaacaattgagatcgcttgcggagatggctattcgtaaaagaacaagtgttaatgagctcgtgcggctagccgtcgatggactgttaaacgatcagctgttcaaggagttcagcgaaaaagcgatgtgtgagctgaaagaatttgctgatagggaagagcggcgattggttgaggcgcggagagagctgatgctcgattttaaagcaggcgtcagtgcattcaatcaacagtcagagcgacacatcgaaaggtctactgatctcacgaaaacatttgtcttaaatctatcggcagtgttgggtggggatgatgttccgctcgactctaaaaagaatacgagccttagcgagaccgacgacatcatcggtcaggctttgaaaaatcgctaa

SEQ ID NO: 529730 - DNA, 609 bp, Stenotrophomonas maltophilia
atgaaaaaaactaaattaattatgaccgcctcattgatcaccatgctctcaggctgcgcaacgcttgaccagctctcaggtggaggttcagaaatcaacaagggcacagtcgttaaaggggcgggcatcggctgcgtagctggtggggcactaggcgcgatcttcgctggcaaggacggcgcgatgaaaggttgcgctgcgggtggactgatcggcgggggcatggcttacaagcaagagatcgcaagagcgcaggaggcagctgatgcggctcgcttggcaggcatgcgagcaacggtggacacaaagaccgagacctcagcagaaggcaaggctgttgaaaagtttcagggcctggtggtcgaatatgaccctgcatctgtgatcaatcctgaccagaaaactaaggctttctttgacaagctcagcacgatcttgaagtcatccaagaacgaactgaccgttcgaacggaaggtggagcagggtgcttggctgttgtcggcgagttgaacggccgaggtgctttgacaaatcacaagctcgacaatcagtgcgggaaggttccatctcaccgaattttgatttcgcctttgcctgatttgaaatga

SEQ ID NO: 529731 - DNA, 828 bp, Stenotrophomonas maltophilia
atgagcatgagcgaatttgaacggcgacgccggcgagcagcgttggagcaatccaatgctgctcaaactcagttggagcagaagaacgaacaggatgagacaaagttagtttcagatcatcaaaaggcggcgcttcaacacgcagccaagctcactggtcggttcgccaaaacggttgcagcagcagcgatggccggcatcgatcaagcacagcacaaggctgaggcaatcaaagcgggtcgagcgcaaaagcgagccgagcaggaagtgtcgaagcggcctgaggtcaaagcacgggaacctcaccagggagggctagagatcaaccaaacgcggtgtcccgtcatccatgcttctgagagaagcactatcgaagagaccaaagctatggtcgaaggccgttccacgttgaagccagtgatcttggcatctgtcgctttagtcttgatgctctcagtgggcggggtgtggttcctgatgcatcaggagcgtgcggcggaaccagatccatctcacgaatcggcgctagggccagagctatctgcgccgcctcctgtcattcatgaggctccaaagttgcctgacaccgtccaggtcacggaggcaattcagcaagtggtagagacatcagcgccgccagcggtagaagagcagaaccgggtggaagaccctcggcctaaacctttgaaagcacctccgtccaattcgatagttcctaaaaaactatcagatccaaaagtaaagccagatgcacctaggaaaaggcaaagtgactgggtggacaaagcaagcgatgacttagaccaatttgctaagcaactgaattag

SEQ ID NO: 529732 - DNA, 3036 bp, Stenotrophomonas maltophilia
atgactctctttgaacttatgcagtttgcgggaaaacttcccggtcttaaaagattcgtggatgtcaaatatcgcatcatggaagagactgtctatgaagcaaacgaagttgttggatcgttcgacaacatggagcgattgccaggacggctgcttgaggatgtcttaccagaagaagagcaggaagttcagtccttgggtgcagttaaagcctggcatcttccgaatgcgaagttcgaaatcctccaggctgacgaaatgggcattccatcaagtgataatgagtggcttgaaatgggtgctgttatgaaatggcgagttccggaaagcattcaagagttggagccatttaagccgtggtttcccaaagttccacgggatctggcctacacacaaatcgaaacaagcaccacaaagagcggtgagcagatttatggatatgtcctaagccaagacagtctgtcgggctcagaaagttctgtcatgcccatgttccttggtatgctaacggtgatttcatgcgttgccttgatggcttggttcgtgctcccgggcatgctcggaactttggcaagccttgcgatcctggcgtgcgcctatccttacctcatatcgatcaagcaagaggacggtggcaaaaaggccctcggcgcagcggcattcgcgttgttcttgccgttcttgctaagtgtcgcaaggcttaaagctagtggcatgccaggtggggcagcgattgctggtaacgctcttgcagctaacgcactgagtgacccaagcaccgcccttatcggcgcaggcatagcactaggtggatttgtgtcgatctcattttttattgcagcgttctacgcaatcgtctggagtggtgctggatggaatgagaagatcttggctttcaagcgtgctttaaagattgaaatctatctcatggtctttctcgctgttttcctttatatgcctttccccgtcaacatcatcttcgtctatgcggttgcatgcctgtgtccattggtctacatcaagcggcttgacctaaaccgtgatgtgattttgacccaaaatggcaacgacaacagcatgggtgactatgatctggcggataagaatcgtcgtcgcgaccttcgtgagcaacaggctaaagacgcgatgaaggacaaaacgcctttcattgcattgggtaagccaactggttacctgcatctaaaagactatcggcacgctgcaacgggtgatgtgatgggtcttaccgtgctcgataattccaagcataagctgacgaccggtcaggtgggctcaggcaaaacatacattgctcgcaaagaaatggcagacgtcaaatgtgcccgtgtgcgcgtgcctcttaatagacccacgatcttgcatgtcacagaagacgtgtgtcttgaatcacagcagttcattgaaacgcgcattggcggcttggttgcagatgctaagaacgtccttgttgcagaaatgggtaggatcatcgataaatccattcgtccaggcattgacttcgctctctgcgaagatctaaatccgtctgagtttgtgcaatcgattaaagaagcagtagacaaaaacaccagcacgaacaaagaaggcgctaataacatatgggataaggcagctaacatggtttacgaccatgcgttgaccatcgtctatgcgctttacaagagtgagctcttcacccgtgagaactctgccaagcagttgagcgagttgcagcggggtctcattcgtctcgaagttgaacgagcgttgtatccacaagagcgtgatgcgtttgaccatacgattgcaagagttgagaaaaacattgggctgttggaggctcatctacggactgagcgcgattgccactggatcgtagacaaccatcagcgttttatcgaaaaattgaatgcaattcgaattgtagagggtgtgccaaagcttgatgcttatgttcgtggtgcgttcgtagcgatcatcaaatcgggctatctggacgttgcaacaaacagcgctcagatcaccggctccatcgcttactttgagaacgagtgggcaccaatggcctcagatacgcgcaccagcatcaccttcaatttggcggtgatgatccaagctctttttcgtggtgagcacttgaagaacgagcatggagtgccctggacggctattgaaaaaggtatcgatctcagtggtgtgttgtatggggattgggtaggtgtggaccttccaactgacatccacggatttgccggtgagatggtttcagagctggtgaagcagcgtgttttccgatacgtaaaaatgcgtcctaacaattggctcgaaatcggtcagtcgttcatctactacttcctggatgaggcccatctcatggtcggtcagtcggatcgcaagctgatctccacatctcgaagtaaaggatttagctttaatttctacactcagaacatatatagcttcttcaatgcgttgggtgagaatcaagcaaaagaacttttggcgaacttctctaacaacgtttgctttttcaacgctgcgagtcctgagacctatggctactatcggaatctgctgggcaaagaacggttgacaaacttcatgacagcgcccgttggcatcaactacttggctcaatcaagacgctatgcagcgtcaccgctacttgaccgaaaacatccacgctacaaagaaatgcaggaactccgccttatgggagtcggaaaaattcagaatgcgggcgcgagcggtgagaagagcaccttccacaacaacagcatggatagcgatgttagcttcacgagctatgaagagatcaagcaaattcagggcttccgcttgcaaaaaacatctggcaagcagttggaggatgtgctgagtgaagatgacttctctaaaaatctattccggggtcgagctctgatcatcctcaatcgggcaggttctctcaaggcagacttctgtgaggtgtctggcctggactttgatgaggttgatgattacctagagaagagaggatatggcaagactgcgtaa

SEQ ID NO: 529733 - DNA, 504 bp, Stenotrophomonas maltophilia
atgaatttaaaagagcagttggataagcgaaatgcgttctacgccaacaatccccagccccaggttttcaatatacatcgtaaggcatatgaagctgatttgatcgagatggagcaaggtgttaaagcctcgatagaacagacacgacaatcgatcagaaacgagagtgatccatccaggcttaaagagatgcaaggcacttacgtcaaaccggatcttgagaaggtagaggccaaaatggcagattcctttgagtcgcgtatcgcgatgcgtcgtctaagtcaggagcaaagtcaaacccaaggtgagagcgcttatcaacggcaattcattacgagggagcgactcgacgagtccaaacgccatgaggaacagttcgacgcattcattcgcgaaaaaggacgtgttcctgttgaaggcgaaatggagaaatttactgccaagcccacactgactcagtcggaaaagccctgggaacaaaagcccaaagcacagtcaatgtaa

SEQ ID NO: 529734 - DNA, 507 bp, Stenotrophomonas maltophilia
atgagccttcttaccaagttctccaacatcttgaaccagcaaaacaaggaagctgtggatcagggactcgatagcatccggggtgaccaagtcgctcaccaggccgaccgggcccgagactatcggggacaggcgcgcacggcccaattcgagaacgtgcagcttgggatcaatctgggcaacgccacgagcgagcttgacgtcactcagaaggcgctcttgaagtccaagtgcgagactgctcggatgcaggggtttgttgagagctacgcagcgactatgagtgtaatgaaggatgtcattgaagaccttcgtcgcgacggatctgagcttcggcgattggacgataaagcctttgctgaaatgctcaacaatgcggtggagaagatgcgaacctcacctcagggcaggctgcatgggaagagtcgtgtcaattatttcgtggagggtgatgagttcaccaatcccgagggtggcttccgtttcgagtatccctactcgatctga

SEQ ID NO: 529735 - DNA, 855 bp, Stenotrophomonas maltophilia
atgagttcaccaatcccgagggtggcttccgtttcgagtatccctactcgatctgatcaatccgtgcttcaccttgaccgccttcgggcggtttttttttgcccattcattgacaaacgtgtgatctggcttttgatgaagagaaccatcaaaggagatcgccatgaaaaacattccacatccactcttgctcgcagccgttgtggcgagcttcgtcaccatgctcgtgctctggccgaactttggagcgacgggcactcagctctctgcatacatggcatcagctgcccttgcactggctctgtgcttgacgcgcttgaagaagatcttggtggcagagcgagtaaaggccaagcgatgaggtctcgaggctttgcactcgtcgagctcagccttgtagtaggactagctgcgatagccggtgtaggtgcctggatggccttcggtcccacatccgctggcacaaggatccaacaagaagcggcgagtcttacccaactggctgacgccatcgctgcggacttcgccgtcgcagaagggcgctatcaacgcgtcagcacagcaagtgccgttgagcgcaagttggccccgtctgtctgggtagtcggtcaggaactgcactcccgaagcttaggcaagatcgagctctcgcccattgatggagggcagggtttccgaatcaccgcgactgccgtccaggccgaactttgccctagtctcgtgcagatctctgccagggcgttttctgaggtccacgtcaacggcgtgctggtctactctcgccgatctctgaatcagaccgcgttagcagagagctgtgctgagggtggggaagtcgcgtttgaccggatctag

SEQ ID NO: 529736 - DNA, 348 bp, Stenotrophomonas maltophilia
atgaatgatcgtaaattttcattgtcaagcttcattgctgaaagcagtgcctcagctggtaaagcgctcccaggcccatcggcatcatccagtggagaacttggacaggtggcaacaaggatcgcggacggcattacgccgatcctggccatctctggcctcaagaaatcagagcaacagaagttcgaagaatcagccgttgatctcgttacgtcctcggaatttattgatggacttagcgaaaaggtcggggttccgctagaaggcgagaccaaggagcagttcgttagccgagcgaagtcggagttgcgaaccctcctgactcagaagttgctcaaaaagaagtag

SEQ ID NO: 529737 - DNA, 627 bp, Stenotrophomonas maltophilia
atgaaatatctattattaagcacggcattagcgctatgcccatttgcatcaaatgcaatgcaagtctcgcccctggctcaaaccatcaacccgagcaggaacaatggctcattgactatcgtcaacacgtcgaatgaaaagaaagaatatcaactccaagcatttaaatggaccttagttgacggaaagcagatccgcacaccaattgatgcgctccgtttcgctccaagctccttctatctcgaagcaggcagatctcaagtggtccgctttatcaacaccgagacatccagcagtgagcttgcttatcgcgtcgtcgtgaaagaaaagaacgtcaagaagctggagacgactggggttgaacccgtcttcaacatgaacttcccaattttctggcgtgcatctgatcgggccatagtgaccgcaaatacttctggatcaaccattgttcttcgcaatgcaagcccgattactgcccagatcgcgaacctcaactatggcagctatcgccgtgatggcttggttggctacttgctcccaggcgaagaaatgatcatctccaagggcaacgcgacatcactcagagcactaattaatggcgtcgctactgagctagtgattgagtaa

SEQ ID NO: 529738 - DNA, 894 bp, Stenotrophomonas maltophilia
atgcgcaaactgctttttagcttactcatactcctcgctccatctacagttcttgccacccaaaaaacctatctggagcagctcacgtcatctaaattcctaatgagcccgagcactgcccatgttcgaatttttgatcagggttcaagtggcatcatcttcggatcctcgtctccactgttctacggagaaatcgtatccgatagcaactcgaaccaagccgaaaaactgaagcctaccaagaagccacgcggacgtatctatcgctttttccaccgagctcaagaacgggtctggaaaggcgtccatcctgatctcagagaaaagatcgaagccattcaagaggtcatgacagatgaaggctttgatctaagaccagttgaaggatatcgaagccctgaacgtcaaaccgccctactcgcctctgcatcgggcgtcaccagtgttggagcctggtcaagctgccacaactatggcttagccatggatgccgctgtctatgtggatggaaagccgagctgggatctgagcgaccctcatgtcatagcgggatatcagcggttcggcgagctggctgaaattcttggcttgaattggggcggccggtggacttcacccaaagactacccgcatgtcgagatgagagctgagtgtggtcagtccaagtgggcgaaacgacacgggcaaaccccacccaagttcgtggcaagcgctggcgaaccatcatctctaattcttgaacgagcgctgatttcgacatggtgcccaattggattggaagccacctgcatcgccatgggtagagatcggtttctttcctggggctggactgttcaaagccaaagcagagcgtgcacagcacgatccaacctctacatctacgctctttcctaa

SEQ ID NO: 529739 - DNA, 165 bp, Stenotrophomonas maltophilia
atggccgaaccgttctgcacgttcggtgccttgcgcccctggttgaggttgctcaggtcaccgacatcgatgctcaacgtgccgttggcggtaatctggccccccagctggccgatcttttcggagatgggctcggcggtccattgcgttcgggtgccgtcgtag

SEQ ID NO: 529740 - DNA, 849 bp, Stenotrophomonas maltophilia
atgacttcaccctatcaacccgatttgttcgcgtccagcgtcccgcgctggctctcctgcagcgacgacccacaacaatggggggtccagtcgttgccccgcgaacgggccttaaaacgcgcctacgtggaccccaaccccgccgcgctggtgtgggcgctggttttcgacatcgaccgccctgacgctgctacggcgtgggaagacgcgcccacggtctgcccccgcccgaactggatagcgcagaacccccgcaacggtcacgctcacctaggctatgcgctggccgctcctgtcccccgcacgctcaaagcccgcgccaccccccaacggttcctagcccggattcaacacggcctgacgctcgctctggacgctgatagggcatacacgcaccgcctgacaaagacccccgaccatccccaatggcgcacctactgggagcgcggccagccctacgagttgggggaactgcgcgactacctgggcgacaaactgccgctgcggatcgcgcggctcgaagcggtcggagaggggcgcaatgtctgcctgttcgatggcctccgacgctgggcatatcgggcgcggctggacttcaccgaccgcgacttgtgggaccgtgcttgtcggtcccacgctgacgcccttaacgcgtttgcctgcccactcccagcgcgcgaggttcagcaggtcgccaagtcagtgagcaaatggacgtgggacaacatcacgcaaaaccgcttttcagccatccaatccgcacgcggagcaaagggcgcacaggtaggccatgcccgccgcgcttcggaaatcatggaccgcaccgccgcaatgttgaggacgctatga

SEQ ID NO: 529741 - DNA, 1419 bp, Stenotrophomonas maltophilia
atggctatcttccaccactccacgcaaatcatcgggcgaagcagcgggcgcagcagcgtcggcgcggctgcgtatcgccttggcgttgagttggtggaccagcgcaccgggcaagcgttcgactacacacgcaaagcgggcgtggacagttggcacaccatcgccccggacaacgcgccggcatgggtcaacgacgccggcgagttgtggaacgcggtcgaagccagcgaaaaacgcaaagacgcgcagttgtgccgtgaagtcaatgtcgccctgccgcgcgagttgaccccggaccagatgaaggcgctggcgctggactatgcccgcgaacaatgggcctcgcggggcatggtcgcggtcgtggcgtttcacgacctggacagcgcaaacccgcacttccacgccatgctgaccatgcgcgaaatcggccccgaagggttcggcaaaaaaaaccgcgactggaacgaccacggcctagccaccgaataccgcgcagcgtgggcggaaaaaactaacaacgctttggagcgtttcggccatgcgtcacgtattgaccaccgcagtctcatcgagcagggcatcactgaccgggagccgacccagcaccaaggaccaacggcggcggcgatggaaaagcgcggcgttatccctgaccgcacacgcatcccctcccccaccccgccgagcatggaacacgcggcagcgttggccgagttgaagcgcgagcgcgagcagcaacagcgacgccaggacatggccgacgcgaaagcgacagcggccgcggcgaagcagcacgccgacgacctgcgccagcaggccagcgcgaagcgggccgaggccaaggccagcgaagccgccgcccgcgagcaggccgggaaaatcaagccgcagcgcgccgccgcccagcgccgacaccttcggtttgtcgaatcgctggaagccgtcgagcgctggcgcaaggcgtggcccattgttgcccggttctacgaacccggcagcgtcagggaccaccgggagcgcagcatgaaagccgctaagggccgcgaccaagccaacgccaacgccgaccgctaccagcacgagcaggagcgccacgaacggcaggcacgccacctacacggcgaagccgacgcgctggccagcaaagccgccaccgctggccagcgtgccgaccatgcgcaagccgaggttgaacggttgttcaagcggcaccgtttcgaggccatgacgcccgagcaacagcaacggcaacgcgacctagaagcggctgaaaagcggcgtttggaagaacagcgcaaagcggtcgaacagcggacgcgcgggcctatgcctaacccgatggtgccgggtcgcccagtgccaccattgaggccccctcgcggcccgtcagggccggggcgctctttcggtcgttga

SEQ ID NO: 529742 - DNA, 1203 bp, Stenotrophomonas maltophilia
atggagagcgatactgagctgctgtcaccggtccagcaccgcagtaatgtatggcgcttggccctggcgcaggcgctcgccggtgcgaactccgtagtgatctacgcgacgggcgccgtggtcggcagtgatctggccccctcgcagacgctggcgacgctgcccatttcagtcttcgtggtcggcatggcgctctgcacattgccggcaggctggatcgccgagcatcatggccgccgcacggcgttcttcgcaggcactgccgccggcgtcgccgccggtgtcctgtccatgtttgcggtgctggcctccagcttctggctgctgtgtgcggctacattcctgggcggggcgtatgcagccgtcgtgctgtcgttccgctttgccgccgctgatggcgcaccggcacagaagcgggcgcgagcgctttccatggtaatggcgggcggcgtcgcctctggggtggtggggccgcaattggtgtcactcaccatgcatctctggcctggtcatctgttcgcagcgacgttcctgttccaaggcttggtcgccgcagtatcggccggcctgctggccggtgtgcggctgccgcatgtcgcgccggcaatcggcacgtcccgcgaaccactgtcctccgtcctgctcgacccgcgtttcatcgctgcggtgatctgtggcgcggtgtcgtacatgctgatgaatttcatgatgacagcggctccgctggccatgcacatgcacggccacgcgcaggagtcgtccaacctgagcctgcaatggcatgtcatcgcgatgtacctgccaagtttctttaccggcaagctgatcgcgcgcgtgggtgcgaagcgcgttgcggctgccggcctcgtactgacgggcgccgccgctgttgctggcttgcatggaatggaagtcttcgacttctccctcagcctcatcctgctggggctgggctggaatttcggatttctgggcgcgtcggcgctggtgttggaatgccatggaaacgtggacaagcggcgtgtccaggcattcaacgatttcctgatctttgcggtgatggcggtcggctcgttcctctcgggatggatcctcgcgcgccatggctggcatgttgtcctgtggtcttcgttcgtcccactggcgctggccatggctgccttgctggtaaccgccagacccagaccgctggagcggagctga

SEQ ID NO: 529743 - DNA, 1053 bp, Stenotrophomonas maltophilia
atgacgcaatccactgactacggcgccatggaatcggcgggtccggggctgctccggtggtcccggcgcccgcgtcccacgccagcagacgatcaggtgctgttgcaggtcgaggcgtgcggtatgtgcggcgcggatgtctctgacatcgctcgacccggcgcatcacaccagcgtcgggtgcccggccatgaagtgatcggcaggatcatcgatcgcggcattaacgtcccggcacgttggcaagtagggcaacgcgtaggcgtgggccgcctgggcgggcattgcaacgcttgcgcctactgccgacagggccgattcgcactgtgcacggatcagaaagtgctcggcgtttcccaagatggtggctacgccgagctgatgcttgcaacgtcgaccggcctggtttccatccctgatgaaatggagtccacggctgcagcgcccatcctgtgcgccggcctggcgacgttcaacgccctgcggcgctgttgcgcagcgcccggcgacaccgttgtgatccacggtgtgggtggcttgggccacatggccatccagtacgctcgccgcatggggtttcgggtcattgccgtgggacggggaaatgacattgccgctggggccatcgagctgggtgcgcaccactatctggacacgaaccatgcagatgcggccgtagagctgcagcgcctgggcggggcgcaggccatcatcacctctgtcggtgacgccgaggctgtgcagctgctgctgcctgggctggccgcgggcggcaccctggtggtgctcggggtcggcaagaccccgttgtccattgcaagtggctacttggttgggggcgagcggaccatccagggctcgattaccggatcacccgatgacagcgagcgggcgttgcgattcagcgagctgaccgatgccatgccctggatcgaatgccttcctctgtcccaagcgcagcaagggctggaacgactgatgtccggcgatgcaacgttccgcatcgtgctggtgcccgatgagcaggcgtcgacgcgggagtcgaataagtga

SEQ ID NO: 529744 - DNA, 1122 bp, Stenotrophomonas maltophilia
atgaccaccgtgaacgtgatcatcgtcggcgctggtcttgcgggcctgcatgccgctcgactgctggaagcggcaggcgtcactgactatgccgtgctggaaggccgcccgcgcatcggtgggcgcatccatgcgtttgagcctgctctgccggggtgcgtaagcgggaacgggggctttgaccttggcgcgacctggctatggcccgggttccagcgtgaactggcgctgttggtacaacagcttgggctgcccgtcgtcccgcaggaagaggacggtgacatgctgttcgagcgtgccgtccacgaaccgactgcgcgcttcgccggcatggccgcgatgccgccatcgttccgcatcgtaggcggcatggggcagttgcttcacgctgtcggttcggccgtccagacggagagggttcacctgggcacgcgtgtcgttcagatccgtgccgaagccgatggggttattgtctccgcaatcaggaacggcgtgccggtcacgtggcatgcgcgaggtgttctactggcactacctccgcgcttggcggtggccacactgacattcgatcctccgcttcccgccgatgctcaccacgcgtggcagtccaccggtacgcatatggctgcacacgccaagtacctcgcggtgtatcccagcaatttctggcggaatcgcggcctttcaggcgaggcacgcagcctggttggcccgctgggagagatccatgatgcgtcttcggacggccaagcagcactcttcggcttctttgcactgcctgctgctgaaagggcgcgtatcccggccgaggagctgaagcatcgctgcagaagccagcttgcgcgtctgtttggcgatgctgcacgcgagccgctcgccgacgctgtccaagactggagcgccgagcctttcaccgctacgccagcctgcgccgcccagaccgccgggcatggctgcattcccggcttatcacccggaggcacgccttgggtggggcgattgttcggggccggcagtgaatggtctccgttcaaccccggttatctggcgggtgcgatcgaggcgtctacccgtgccgtgcaggcattcctctctttgacccatttccgagtacagccatga

SEQ ID NO: 529745 - DNA, 711 bp, Stenotrophomonas maltophilia
atgctgatcaacgccgacttcaattccatcgtgttagtgactcccgatgattacatctgggttgactcgccacaggccggggtgcagcgcgtcatgcttgatcgcattggtgcagagaaggccagggcaacaagcctggtgcgatacgctcctggttcgacatttccgccgcacgttcatccgggcggcgaggaaattcttgtattggaaggcgtcttctccgatgagcttggcgattgcccggcgggcacctacctgcgcaaccctcccggttcacggcatgcaccggccagccgggatggatgcttgatactggtcaagctgcggcagatgagtgcgaacgaggaggcgaccctgaggctggacacgaatgccgcccaggtgtgggaacaccttaccgatcgtcggttgtgcagggtattcgagagcccggaagagcgcgttcgtatcgagcaggtggagcccagccggccgctgtttcctcagatgcaggcgcccgctgagatcctggtcttggacggcgagctgcagctcgccgtcggtagccggacccaaaccattgcggctggaacatggttgcgggcaggtggaccggatgccagccgctgcctcgcgtcaatggtggcgggagctcatggcgtcactgtctacgtcaaacaggggacagtggtggagcgtccgcaccttacggctgcagaggcactctcatga

SEQ ID NO: 529746 - DNA, 282 bp, Stenotrophomonas maltophilia
atggtctatctgcaaatcaccctcgccattgctgaatccaaccgcggagcagctgcggaggtgtacaccaagtacaaaggcccgttcctgtccaccatccccggcgcaacgtccaaagatctccttgtccgcaaggaagacgttcaggtgctgcatggcttcgacagcgagcacggcgcaaaagcctacctggcaagcgcaatgttccagaacgatgtagtacgtgaacttggtccgctgctgtccgcagatccggacgtgcgtatctacagcgctgtctga

SEQ ID NO: 529747 - DNA, 345 bp, Stenotrophomonas maltophilia
atgatgaatgactggaacaactatcgtgagtccctgattgagaaggtcggggagtttggcaaggtcaacccggatgtactgcgtggcctgggaacgatcgatggcgctgcaacaaagagcggtcatcttgaacccaagatccatgagttgatcgctctggcagtggctgtgacaacccgctgcgacggttgcatcacggtgcacaccaagaaagccgtggaccatggtgcatcgcttgaagaaatcagtgaggcgcttggcgtggctatcgccctcaacgcgggcgccgcactgacctattcggcgcgcgttctcgaggcgcgcgaccaactgctcgcgggctga

SEQ ID NO: 529748 - DNA, 774 bp, Stenotrophomonas maltophilia
atgaaaaatatcttcgaaggcaacaaggtcctggtcgtcggtggcaccagcggtatgggcaaggaaactgcacgtaaggtgctggaaggcggcggtcgcgcggtcatcgtgggccaccgtgccgataagactgaggaagcgcgcgcagagctgtctgcgttcggtgcagtaagcgccctcaccgccgatctgacgtccgaaggcgggctcaagggcctcatcgcggacatcgagaattcccattccgatgtggatctgctggtgaacgcggcgggtgtgttcttccccaagccgttcctggagcacaccgatgcagactatgaccagtacatgcagttgaacaaggccttcttcttcatcacgcagaaggttgcggccaacatgatcgcgaacaatgtcgccggctcgatcgtcaacatcggctcaatgtgggctcgccaggcgatcgccgcgacgccgtcctcggcctattcgatggcgaaggctggcttgcactcgttgacccagcacctggccatggagctggctccccagaagatccgcgttaatgcggtgtcgcccgccgtggttcagaccccgatctacgaaggcttcattcccaaggatcaggtccacagtgccctgcagggtttcaacagcttccacccgatcggtcgtgttggtacgccgcaggatgtcgccgaagttgtcgcgttcctgctgtccgagaaggccgcgtgggttaccggtgccatctgggacgtggacggcggcgtgatggctggccgcaactga

SEQ ID NO: 529749 - DNA, 522 bp, Stenotrophomonas maltophilia
atgaacagcccgcgcattaccccttggcaggacggagacccagttcccgcgagcctgctggccgacatccaggcgcgccgcccggacggccagctgatcggcatcgatcgcctgctgctgcgcagcgcccctctggccgagggctggaacggcctgatgcgccgcgtgcgtgccgagtttgaactcacgttggaatacctcgagctgatcatgctccgcgtcgcggtcctgaacggcgcgtcgttcgagtgggatgtccactacccggtttacctgcaggcaggcggcacggaagcgaaggccgctgcactccagcagcctgagccagacgcagagttttcctcgctagagagactcctgattgagctcaccgaccagtcgacgcgaggcgtggtggtggaagccacggtgattgaagcgctcaagcagaccgtgggggagcgccaggccgtggaggcggtggcgaccgtcgcggcctacaacatggtctcccgtttcctggttgctctagacatccgttga

SEQ ID NO: 529750 - DNA, 969 bp, Stenotrophomonas maltophilia
atggtttattctttggaagacgcaaagaaaaactatcccgcgatgaaaacccacctgaatttcaccgcgttacgggcagtcgaagctgctgctcggcatcagagcttcagtggcgcagccgcggagctgcacgtaaccccagccgcgataggccagcttgtgcggagcctggaagagtccctctccgtcgagctgttcgtgcgggagcgcagcggcagccgtcgactgacacccaccgatgcggcagagcgggcgttgccagatatccgcgcaggcttggaccggcttacgcgcgggctgtcgcgcctgcaggaaagtgccagaggcggcttgctgaccgtgaccaccagccctgcgttcgcgtcgaagtggctgttgccccgactggagcgcttccaggccgcatgtcctgaaaccgacgtccgtctccacaccggtctcaacctggtggatttcgaacaggacgccatcgacatcggcgtccgctatggcaagggacagtggcctgggctgaccgctgacaagctcatggatgaggagatcttcccggtctgctcagcaggctggcttgaggcgcacggggccctgctgcagccagcgcagcttgctggcctgccactgattcatgatctgtcagtcgacagcagaaccggtttcatgacgtggagtgaatggctgcaccgtgccgctgcagacaacgtggatgccatgcgcggcatgcaggttaatagctccgcagcagtactacaggcagcggtggaaggaaggggtatcgcattggcgcgtagcgtcatggcgcgcgaggatgtcgccagcggccgcctcgtcaggctgtttccggagatttctgttgccgcgacgcttgcctactacatcgtctatcgccctgagtgtgcatcgcttcccaaggtcatgacgttccggcactggttgcactccgaggcccaggcttcagctttggaccagtag

SEQ ID NO: 529751 - DNA, 1230 bp, Stenotrophomonas maltophilia
atggcataccgatgggcagagggaagcaagcccaacccggtccttgaatcagttatggagtctgtaagcctatcggatggcgcggtggggatcttacggctgagcgtgcacggagacatcgccgtcctggcctcgatgcttcagggtcaacaggccgacgacggcatcgacagagtcgacttgatctgggacgtcctgcacgggatcaacgccccaatttcagcaactaaattgctcagcctagtaaatgtcgcgcgatctgcacagcgaaagggaggtctaaagaaatttagccttataaccacactgtcgacggatggcgcatggctgcctagaagcttgcaaatttgtgagttacgagcacggtttcgaaaaacacttccacgaaaattcaaatctgcgcgcgtgcagctagtaaaggaacagattcggacaggaattattcacgaggaccttgacagctattcattcgttcaaattgatgtagaggcggagagcgctggcgcggcgttcgccaaatcagatcgggagctgagaattcttcgtggcctgatatgtttgctgtcgaatccaagttttgagaagacattgcttggctcagaacacaagcccatcaacgttctgcgcacagggcacttccatacgatccataatattgatggctcggtcgcaaccgatttgatctggtacgagcccaattatagcccgagaatcacgttcacccccaggaagccaagcgttctggttgatgtgctaaagaagaccttgcggagaatgcgcaactgcccatacaacggccgcttggaacaagcggtcattcgcttcgccagcggcttcgatgaaagcgaccctgacgctgcattcctgaagtgctggtccgcacttgagtccatcctctcctcgaacgtggcagattacaaacaacttgtgcgtcgatgcatttttctgtacgaggatcgcgattaccatgaatcaattcttaaacagctcgccgagcacagaaacgctagcgtccatcgcgtatcggacaactcattgactaaatcgttttgctacttacttcagaactacttcgccaccgcgctaaagttccatatccgcaactacactcgcttttccaatttcgaggaagccctcaccttactgtcgggcccagtgagtcaatcagatgttaacgctgcgatggcgcgcgccctgttcgccaagcgatttcttgcaatcaagccatga

SEQ ID NO: 529752 - DNA, 957 bp, Stenotrophomonas maltophilia
atgcaactaaagctattcttccttccatcaaaagcgattgcatcccgaattaccgaaacttttggatttatctggccaacagcggccgcaatctggaatctgagatggcaggttcaagggctagtcggcgcttacccagaaatcagtgagaaggaacttctaggtcgattcgtacaaggcagtggaattgatggcgtgaacctccgaggcgcgtgtatagaaacgagctgggccacccagcaggaacagtttgccaagttccttctttttgaattgtgcgcattgtacgagtcttggtgtgagcttatcaccgatcagcttgcgcttcctgctgcatccaagaagaacttgcagttcccaactagcgtaagtccatcaggcgtcgtaactggagtagctaatgtaacgaacgctgttcatggcagcccatccgctgtgctcagttccacctttcaccaagtgctttctaccaaccgcaaatactcccccaatcacttggaggagatgctgatttgctatcgctacttcaaggagcttagaaattccctgattcatggctcgaagtcggccattaataaacttgtatccgcacagagctcctactccacacttaccccggccagtctcggggttgcggagaaacctcacttcattccctacaattcaagcgttgctccagcgccaagtttgcgcggggttgtcggttttggagagattgttctcaagctggtttgcacgatggatataaaacttgctgaatctagctttgcagagcaagatttcaaacggcgctggaagatcgaaaatggctcacagccttcactggttgcagcttcggaagagcttcgccggaatcgacgcattggcgtcctgaccaagaagctcggcttgccaaatccagcgattactccggcattcgtggcttggctaaggtctcaagggatgattttccactag

SEQ ID NO: 529753 - DNA, 669 bp, Stenotrophomonas maltophilia
atgcctgatgtgctgaagagatatagcgtatgtgtagcgttgaggttccatcaactcatatttcaacagagaaaaaaagtggactggagaaagaccgtcgagtacttgttcataaatgaacttttgcgacaaaatttggacttttttgcgcaccctcttgtgccaagaggcgagggcggtgcggatgacctgatcgcgagtccagcggtttttctatacctagtcgaattcaggcccgatgtaagcagcctcgatttggaatgtgtgagattttatgactatgagaaagcaagactgctcctaaagggctccgactctcaccacctcgtcgcatatggcgaatcgacggagcaaggaattaccttgggtgtaagaagttacttttcgggcagtcagtatcgccatctcctgaaaaatggcagaattgatagactgcactttgaaaagtatatgactcaattgctgttctttcgaaggaaagatgtggaaggtatcggagatgcaggggtgctcaaccacgccatcattattggcgtaactgacagtggaaagtttgcaggctcaatgactctgcaagactatatcagtctagtgtttcccgagtgtcttcaagcaggaatctctcgatctgagcatactgacaaggaaaggcgtccgcaatgcaactaa

SEQ ID NO: 529754 - DNA, 207 bp, Stenotrophomonas maltophilia
atgagtgccgttggacaactgcagactgcaattcgcacattgcacagtgaatcggttggctgggacgacctggttttcaaggctgaatgcgaccgagttcgcgctgaggcgcagaaagccgccgaaaacgggacagaggaagaagtgcaggaagcacttaagctggtgaaggcccaaattgcagagctcgaagagcagcgaaattag

SEQ ID NO: 529755 - DNA, 954 bp, Stenotrophomonas maltophilia
atgcctcggccaaccaagtctactgcgcgattcattgcttacgatcttaggccggcgaagcagtccgagcgcggccttctggtagatgtgttgaaggttgcgggtgactgcggcatccccattcgtgactacaagtacattggcatgggcgcaaatcgcttttacgacttcctgatgctgcacaagcatctgggagtaaaggcgatggtgagcttggagcatgacgcgcagatgtacgagagggcgatgtacaacgtgccctatcgcttcatcgaagttagaaatgaatcagtgctcggcttcttgcagaacgttcggtcggcgaggagggagctgctgtggctggactacgatggaggcattggccctgaggtggtggccgatatcgcatctgttgctaccagggccaagccgggtcacttctgctttgtcacggtttccggtcatcctccgcgagtgattgagagtgccagcgcagcggatcgtttgactcacctgcaagagaatttgggtgatttctcagggggcgtgagggttgccgacaccgagaagtcctcttttgccacagcggtccacaagatactggttgctgcttttaagaatgcattccctggtgatgcagaaaacgagttcgtgttcctgcttcaggttgagtactccgactcgatgccgatggtgactgtcggtggtgggctgctgccggtggccaaggcgaagaaggtgcgcaaggcgctgagctcttcgttgccgtttcttcctcaaggatcgatgtacaggattaggtcgttccatctcaccgagcgagagcgggcgctgtttgatagagcggtgaccggggacgaggcgtcgcctgagcatgagacgctcgagctgctcggtttcaaggagcctgatctccgcgcctactcggagttggtcagatacctcccaaggtatgtcgaagctgcagtctag

SEQ ID NO: 529756 - DNA, 1377 bp, Stenotrophomonas maltophilia
atgagtgcattcgcaacgggctgtcatgggggatccgaggtgaacgaagttcttgcagcggacgccagtccggaaaagcgactatttatctccctgctgaccagggacatccccctggtcgcggcgtttcttgatcttgtagataactccatcaatgcggctgccgagccctacgcggctcggctgaagacggcgcatgactatctgaagctcaaagatgacccaaaggtaaagccatcggcttcaatctctttggagatttctgatcagtctgttgtcatcgtcgacactgcaactggcatctcggctcagaccgccaaggaccacgtgtttaaatttggacggggcgatgagccagcaagcgtaacagaccgtttgtcagtctatggcatcggccttaagcgggcgatcttcaagctcggcaacgttatccatatgcggtctgatcacgttgatggaggctttgacctggccttgaacgtgtcggagtggtcgaaagtcaaaggcagtgaatggaccttcaagatcaccaagcgagatccggttcctgcaggcgagacaggtacgaccattaccgtcactgagctgtacgacgaagtaaagcggcgcgtcaatgatggtgtctttgacgggcagctgagagatgccatttctcgtacctactcctattacttgggtaagctggtcaccatcagcctcaatgatgagcaggtggaaggcaccagcatcgatctcagcgagaatcacgccaccaaacaggtgaagatcaatgatgtgacctgcacaatctctgcgggcttgggtgtgccggttgcgggaaagtatcgcgagaagtcttctggttggttcgtcttctgcaatggccgagctgtcgtttcggctgataagaccgcactgaccggctggggcggtggcgccattcccatcttccagcctaagcaccgaccgttcttggggacggtcttctttgtcgccgaggacccggagaagctgccttggacgacgaccaaatcgggaatcaatgaagactcttcgacttggcagacggctaagcgcgagatggccgccgtcgggcgcgaggtcgtgtcttatttggactctcgctactccgatgtcggaactgaggtggatgccaacgatctacagaccgcctccggtccggaacgggtaagcgtcttggctgccgcggtagcaaagcccaaggccttcaagacgcctaagagaaaggtgatcccaacggtcaagattcagtacgacgcgctgatgcctgaggttgagaagatcgctaagcatctgaagaagccgggtatgtcgggatcagatgttgggcgacatacgttcaactacttcctgcgcaatgaggtcggagagacctga

SEQ ID NO: 529757 - DNA, 1344 bp, Stenotrophomonas maltophilia
gtgagcatcattttcaaggtaatggatcccgaagcccggacggagctcatcagggatctgactgaagaagctatcgctaagcggcagtaccagaaagagttcaagttccgagccggcatggagcttcctgtcattgccgttccgatcgagttgccggtctatcgcctggagaactatcgcactcgcgaccagcagctgacgctgatcgccaagcgggagaaagaggacggcctgtttgatgtaagcaacactgagaatcccgagtcgcagctggcgcagcacgccatcctgctgaagcagtcaaaggacgggagtggagagaccatcaagcccatccatcaggagcttggccgcgtcggccaacagacggaaaacctgatcatctctgccaccggcattgtagtgaatggaaaccgccgattggcggcaatgcgagacctgcgcgggcagaggtctgagggctcggatccgttcaagtacgtcaactgcatggtcttaccagcgtctgccactccgagggaaattcgcgagctcgagattgcattgcagatgcagcctgagacgaagctgccctacaactggactgctcttggccgtgcggtgcgagacatgctcgatgcgaactactcctatgaagagatcgagcggcaaacaaaccgtagcaggagcgagctggaccgggctgccgcaatggtcactgccgcggagctctacctggcctcctggctggagaagccccaggacttcagcaagcttgacgataccgagcaggcatttgcccaagtagtagtgcgaaattatgccaagcaggacgacgcgcagcttcgggaagccacgcgcaagttcgacttctttgtgattgagcatcgcgacttcattagtgatagcgcttacaagctcatcaacgcaattgaatccaaccccgagatattcctgaccaacatggccaaggagttggacgttgacctcgccccacttcaggatgcgtccgaagaggtgctggagatcgacttcggagttggagctgatggcgtagcccctgtcagctacgatgccctgatcgatagtctgatggtcggccgcggtgatgaggtcagagcgaagcaactgataagtaccatcgaggaagtagccttcgcagcggttgagcaaggcagggcccgagacaaggccgcgctcaagttggtccaggcggccgagcgaaagctctcccaggtcgacatcaactcagctggcaccgatacctatgctgaaattcttgatctgcttgatcgctgcgtagctcgcattgaaagcatccgtaacgagatcggacttcagaagcgcgccgggggcacccattga

SEQ ID NO: 529758 - DNA, 1701 bp, Stenotrophomonas maltophilia
ttgcagaagtcacacggctttcgcttcaccaccgacgactcctccggggagagagtccagcagttcatgcgggacttccgcgccacccaggaggcaggcggcagaagcactaccattgatgcgcaagagctcgctgcaaggcttaccgcgctgggatggaacaaccagacgcataagctcaagccctaccagttggacaatctcgcaacgctgctgtccatacgtaatggagccaatttctctgtccctggcgcaggcaagacgaccgttacgttcgcactgcacttgctagcccgaagccctggcgacatcctgatcgttgccgccccgaagaacgcgtttcccgcctgggagggcatcgcagaggagtgcttgctgccgacggcggacgaggagctgatggaggaattcatcccgctggttgatggcgaggtgcgtatccgtgccgcccttgaaggcggcggacgtcgcttcctcatctcctatgatcagctggtgcgggtcgaggctacctttgctcagttcattgccacccacccagtgcacttggtcctcgacgaatcgcatcgcatgaaggccggttacaactcacttcgtggcgccagcttgctgcgaatggcccaccttgctgtgaggcgcgacatcttgacaggcaccccgatgcctcagtccagctcggacatgcaatctcagctggatttcctgtggccgggtgtcgggttgggctggaaggtggccgcaggcactgagcctcgaaaggtgatggatggactctatgtccggacaaccaagacacagctcggcctgcctgagaggcgccgtgagtttgtccaagcgaccctctccgatgcccactgcgcgttctactctgtccttaaggatgacctacggtctagggcgagcttgcttcggaaagggcggacatcccagtccctcatcgcggcccgacgctctgtggtaaggcttttgcaggcagctgtcgatcccaccctggtcgcagagacgatcgatgacttggcaagccaaaacgccaatgggttgctgcgagcagttcaggcggaagcgctcaatgggcgaattcgagccgctgtggatctggccgaacgcttgatcagtgagggcaagaaggtgctgatctggaccatctttacctctacggtccgcaagctgcgcgatgttcttgcccaccacaaccctgccctaatctatggcgaaatcggcatgggtgaggcagatgacctgagcacgcgccaaggcaacctggcccgcttcaagaatgatcctaattgccgcgtgatgatcgccaaccctgcggcggcctcggagggcatcagcctgcacatgcattgccacgatgcaatctacgtggatcgtagctacaacgcgacccacttcctccagtccatcgaccgaattcaccgactggggctgccggccgatgtcgtcactacggtgtacgtcatccagaaccggctaccggctggaatcggctcgatcgacgtgtccgttagccggcgtctgggccagaagatccgagcgatggagaagctcctggaggatccggacctgaatgatcttgccctggacgaggaaaacgctccggcatcgctggcagatgagctcgacgccgaggatatcgatgacatcatcgccgagctcgagggcaatccccctccggcaactgacgaggatctggtgtga

SEQ ID NO: 529759 - DNA, 831 bp, Stenotrophomonas maltophilia
gtgaaccgggaggccgccgcggcctcctttctaaagccctcggtggtatctgggctggcgctactgcgcaagcgggccgctcaggcgccgggtcagccatgggaggtcaccgttcgcttggccgcggcaagccatcaggggcaaggggttgatcttgatcgcgcgtgccagctgcatgagctgttgcctgctgacctggtggacagtcccggcttgtatcgagcggccatactgctcacagccaagcagctgcctccgtggctggggcagctccgatcggggcgggagtttctcagcgacgccggcgcggatctgcgctcctgttttgagagggcgggcgcgctggatgcggcacccgatcagacggtcatcagctggtgggacgacttggcaggcctggcctacggtacgttgaaccaggccaagatggacgtaggcagacgtgcggagcgcctcagcttggaaagggagcaaaggcggctggagtctttccccgggcatcctccgatccagtggactgccctggactccaacgccgccggctatgacatcctttcctggtcaaagcgggatggccattggtatccgatgtacctagaggtcaaaggctttagcacctccccggccaagctctacctgacccgaaacgagtgggaaacggccaagcgccttgccgatgacttccactttcaagtgtgggatgtgggctcgaacaggatggcccagctatccacaagccaaatgcttccccatgttccatcggacgagggcatgggtcggtgggaggtgctctgtgtcgaggtttctgaggactttttcacccccgcgtag

SEQ ID NO: 529760 - DNA, 918 bp, Stenotrophomonas maltophilia
atgccatatcgtcgcgctaccgcagcatggagccatttggacgccaaggagggcagctacgcgctactgaatggcgactgcgttgacctgctccgagccctgcctgacgaatccgtttcgttggtcgcgacctcccccccatattgcatggggaaagagtatgaggcggggaacaccatcgatgactttattctcgcccacgacaagatccttccggaaatacttcgggtggtgaagcccggcggaagcatctgctggcaggtgggttatcacgtcgacaacagtcaggtcatgccacttgactaccttgtcatggatgcgatgcgcaagctcgccgatcccccggtcctacgcaatcgaatcatctggacgttcggccatggctaccattgcgagcgcaggttcagcggcagacacgagaccattctttggtacaccaagggtggcagctatccctttgatctggactcggtgcgtgtcccgcagctttatccagggaagactgcgaacaaggggccgctgaagggacttccaagtggcaaccccctgggcaagaatcctggcgacgtctgggacattcccaacgtcaagtggaatcacgttgagaagctggatcatccgtgtcagttccccgtcgcgctgatcagcagactggtgaactccatgacgctgcccggagacatcgtgctggatccgtttgcaggtgttgcgaccacgggcgtcgcctcactccttgccggccgccgattcatcggggccgagctggacagcaagtacgccgacattgcggacaagcggctgagagaggccgtcgagggaacggtgcgcgtccgggaagacaagcccgttcagcccccgagcccccgcagcaagcttgcgatcaggcccgacaactttaagaatttcgatgcgctttga

SEQ ID NO: 529761 - DNA, 408 bp, Stenotrophomonas maltophilia
atgagcagaccaattgctgcgcccgatggcgagcttgcaggacctgccttgcgagccttcactcagattgccgaggcctggtccctgacagagctggagcagtgggcgattctcggtcaaccagtggacgccgccttcgcggtgatcgacgctggcgatgtggacgacctctggccggacactcttgaaagagtgagctacgtgctcggcatctatcgtgcgctgcacacgatcttttccgatccagagcaagcagattcttgggtgcgccgccccaacgccgcccccgcgttcaacggttcaacagcgctggcgctcatgtctagcggcaggctcagcgaccttgcgtcggtgcgacaacacttggaggctggcggatggatcaatcctgaggcaccagccacttag

SEQ ID NO: 529762 - DNA, 1362 bp, Stenotrophomonas maltophilia
atgatcagcagctcggtggccggggctccctcctcacatctcgtaggtgcaatggaggcgctctggcagcttcccgactccgcgtggaagaatctgacagagacccccctctacgcacagctggtggacgcgattgagccctactgtgcagacgcgcggagattcttcggtggcatatccatgtcctgtgcgctggccggccttggtctgccgtgtgggttgcctgaatccaagaagcacttggcgatgacggcaagggaggctgcggaacggctacaggccgcgctggaagcaacctgcttcacgcgagtccatctgatgcctctggatcttgcagacggccttccaagggcgtgtttcggtaatgcggtggttggcagattgaccaaggacgagcttgccgagcttgttgaccttgatcgcatggagagagtccatccaggaaagagctttgaccttgacgagttctcccagtttcaatggctggtcgtgagggaacaagtgtcgatccgtcgtggccctgaaggccgagagctgttccgattctcgttcgattcgaaacaggactatgggcgcatcgaacctcatcgaggaaagtatccggaggccgttgagacggcactgttctggctagcgctggcaccgtgggaaatttggtcagatgcgccacacattgaatggcgtgggatgcagattccctggttgtactcggtggaccatgatctgttctccaccatgaagcggccgcccagctcggataccctcacttgggaggatcggatcgcccatgacgcggaaggtcgatcggtcgacatctctcagcccgttgcaatgtggctgagagatggatcggcggacgctcttaccgaacatttcgcgggccgcgcccaggcgatcgcacagttgcctcagctgcagctgttccagacacctgtagcccactttttctgccgtgccttcttgactgatggcatcgacgaattcatgtctcatcttcttgccatcgaggcggcgctcggcctgccgttggactacaagcgtaagtccagctcgggcgtcggcactcacgataagcttggggcgactgaaagagtgtgcgctcgtttggtggcgctgctcgatgagcaggccacctccgactacagggagctgttcgagctgcgcagcgagttcttgcacggtagatcgatgcaggcgatcccggcccttctgcgagttcgggcccgtacgcttgccaggcgcgtggttgatagcctggtgttggccaaccagtccgaccaggcattggtgcgcgatgccttcctggatgaattgctggatcggggtgtgcctctgctaccggcgaagaaccagcgggcgtag

SEQ ID NO: 529763 - DNA, 1110 bp, Stenotrophomonas maltophilia
atgaagagagtgctgactgtcggtatgcaatacaccggcaccccgattgaaggtgtggagttcgagcaactcggactttgccgatcagacatcgatgaggccagggctgcgtacccgctctatgagtatgacgtcatcgctatcaatccacagagctacagccacttcctgttcggcaaagagggcgtgcactctggctcagatcaggagcttctggagctgaaagcggacgacagagagcatgatctggacaacgtctttgacagtgtggaccgccagaacgagctggaggccgccatggccgtgggtgcgaccgtggtctggtgcatggccgagccacggcgaatgaacttcttcggctatcgagagacgagcctggggtatctggctccggcgatgacagccgcgattcggcgtgggggtcagataatcaagaagggaaggcgagtgggtttcatagatcccgatacgcccttcgcctcctacttcggggacttggccactctcggcggctggaggatcgcgctggagaacgatcaaccgggcttgactacgattgcggcgacgccggagggttaccaacttggagccagagttgagatcggtgcaaccacaggatggttgataactccgccgttgacgcaggaagcgaccaaccgtctcatcttgggcgctctggccgtgagcaaggcggagccagaagcccccaggtaccatgggatattccttagccataccagtgccgacaagccgttcgtcaggaagctcaggcgtgacctgatggaaagaggcgtgccaaaggtctggctggatgaagccgagatacaagtgggggactcgctgatcgcaaagattgacgagggaatggtaatgagccgatacgtcggtgtagtcctgtcgcagaagtcgatcgctgcgccttgggtcaagaaagagcttgatgtggccatgaaccgcgagatcagtagcggcgaagtcgttgtcctgcccatgctcttcgaggattgcgatatccctgctttcttgcaagggaagctctacgccgacttctccagcgcggagaagtatgaggaaggactggagaagttgctgcggaggctgaagatatga

SEQ ID NO: 529764 - DNA, 528 bp, Stenotrophomonas maltophilia
atgacgacaatgtggaaagaacctgaagcactgggctggaaccgtgccgaggtgtctgcgcttgcctccgatgcggtgaaggaactgggcttctcccctgggcagcccattgagccaatcgtccatcagctcggcggtaagatcgtctacggcgaactcatcgaggatgagtcggattctggctcgattcgcatcgagaacggcaagttcaccatcaacatccccttcaacacgagtcccctgcgcgatcgattcaccatcgcccatgagataggtcactttgttttgcactacctggtgcagaacaagatgaacaagaagaacatcacgcacctgcgcgctcagcggtatggaaaggaccaacctgagatcgaggccaactggttcgctgctgcattcctgatgcccagcgataccttccgcagggtctaccaagaacttgggaaggacacgctgaaggtagcggagtacttcaaggtttcgcccagcgcagcgagcgtgagggcccagtctctcggcctttcctaa

SEQ ID NO: 529765 - DNA, 1284 bp, Stenotrophomonas maltophilia
gtgggctccaccgcgttcaagcagcgctctggcgaaggctctgaacaatggttccgcttggtacgcaccttctacatgatggcggagcgctacttcgcgttccgctggtctttggccaaggataggtatcaggacgcagaacgcccgctgctctttggcgacgccgctcccgagctgtggaagaccgtgggtgatgaagtcctctttaccaaagagatcgcccatccctcggaagccacgatgtgcatgagcatctggctgcaggtcctggaagatctgcgtcagttgctcgataagagcggtttggacgtcaagtcctcggcctggctcgctgacttcccgattcgcaatcgggagattttcctgcacaccggcgcgccgaccaagaccgacgatggcgcgaagaacgaccctccgcctcagactgatgtcgccgaccgctccaacgacccgacggaggatctggagtgggaaaatgacagtctgttcgacagctacaaggcacgcttgcctggggtaacacgcgacttcattggccagtcgatcgacaccggcttccgcgtcagcaccgcggcgtcgtcgcgtaagctcatgttgtcggtggaacttgcgcacatgctcagcatggagtgcgaacgtttggatcttgatccctaccgaatcggtgccttccctgtccgcagcttcacctttcactacgacggacgcaatgctctcaaaggcgtgctcaacggcacgccctatccgctaatctggctcgatgttgagccggcaaaacgaatccacgtcaccgaggatgtcctcagcgccaggcccaagccaacgccgcgacagatccacgagttcaccacggcgctgatcaccgagttccccacccggttctgctcgatgctggagttcctggatggctcatgcccgccggcatacgaagagtttgaaaagagcctcactgattcgatcaagaagctccaccagcagttcaccgaccgggaagcgaacattgagctgaagaagttggccgttggcatgcctgaggacggtccacgcaatgcttctgccgatttcaaatcccttctgcagcccgccgatgccggcaagccgcccagttcctcccgcaaatctcgcccgcggaaagtagctaaggcctcgtcgaagtcggctcggaaggtggtaaccaacgctccgggtaagaccagcgggacgccccctgttgcggcggccaagaaggcttctgcgaagaagacccgtgcgaagaaggcggcgaaggcacccgctcaagactag

SEQ ID NO: 529766 - DNA, 1029 bp, Stenotrophomonas maltophilia
atggaaggcaaagaactagttgcactcagcggtgcgatcatcgcagcgatcttggctatcgccaagctgatcgcagacaaggaatcgcgcacgtctgatttccggaaggactggattggctccttccgaagcgctctggctgaactcctgggcgaagcctatgttatctctggccgcatctggattcgggttcagcacgcccaggtggatgcggaacgctcgggaaagtccgtgggcgctccgctgttgggcaaggctgacactgaggtgctcgaggaacagctgaccagtcactggaacacgttgaggaaagctcatcgtacggtgctgctacatctgaactttggggagacagcttgggggctgccctacattacccaagacatctcagttgagcagaaggtggaggagaggtggaagcttctgattcgcaacagccagttcagtccggcgcagcagccaagtgacatctatcagaccagccagaacggtagcccgtcaggtgccgcagcgttgctggtgtctgaactggaaaggctgatcggtgcaatgctcggtccgtacgagaaagtcggtaccaaggagcagtacgcgctcatcaagcggtctattgacgatgcaacgctactaggcaacctggtgatcaagccggagtggaatcgaatcaagaaaggcgagcggaactatcgcagcgcgatgggctttctgaaatgtttcggcgcaatcggggtcatcatcttgttgatcgtgagtgtgggcgaatccaagcccacagcgcctgccggcggctccacgatcaacgtcagtgtgagcggcgcgccacaagcaatccgctcgtcattgtcacctacgactagctcgcctacatctgggctgatggagtctagtcttgagcgggtgccttcgccgccttcttcgcacgggtcttcttcgcagaagccttcttggccgccgcaacagggggcgtcccgctggtcttacccggagcgttggttaccaccttccgagccgacttcgacgaggccttag

SEQ ID NO: 529767 - DNA, 933 bp, Stenotrophomonas maltophilia
atgtttaagcgttttgatgagagccatgcacagctagtcaacttctttccggatttgacgtttgtttctcctgaagatgcgcgctcggatgaggtgctctctacatccgttgccatcgtcgatcagctttgccgcagcttttttgcctatcgctcgtcacaggttcacggcgtgtgggggattgaaaactcctacgacgagaacgcctttgtgagtaccctcaatggctgttcaagcatcgtcatcactcgtggcgcttgcgttcggctcgcgcgcgtaggaaatttttttgcgactcacgattggataagcaacagtgaacggatgcgtccgttccacgacgctattgacgtaccgcggaacagattgggcgaggccgcgcagatgcttggtttggcggccctgttcggtcatgaagtgggccacgtaatggaccggcacaacgtgcacagcattgccggccaaaagcaggaggctcagctcggcgaggagatatcggccgatggtcgagcaatccttcatgggcttgatatcgtggatgcgtgggcccacagcttggccacggggcatgaatcggagcaggacgcgatcaagcaggtaggtgctgtccttcttgtgatcgcaaatgccgccatcgacagtatccacctcgaccgcagctgggatgttccggccaatcagacgcacccacctggcgcccagcgtcttcttgccacatgcataatgctcgatcagtactttgacggcgtcgctgaagagggatttgggctcaaagtgttcttgaccgccctctcagggctcaaggaaatgggcatttaccatggccctgtcgaggaggaggcgctgaggcaactgctggcgatctacgattcagcagcggtcgtcgcgcagtacaacgccctgcaagcgacactgatcgagcgaggcctctga

SEQ ID NO: 529768 - DNA, 996 bp, Stenotrophomonas maltophilia
atgctcgcaacccttagcccgattgccatcagcatgaccagcgaaaccaccaccaggaccatcttctactcttggcagagcgatctgcccaatgcgaccaatcgccagctgatcaagaagcagctgcgcttggccatcaatgctgccgaagaaaagcactctggcctatccattacgttggatgaggcaactcgcgatacctctggtagccagaacgttccgctgacgattctggagaagatacgcaaggcagattacttcatctgcgacgtatctacgatcaacaagagcgccgcaccatctgacaggagggtgcccaaccctaacgtgattttcgagcttggctatgcggtcgccatgctgggctgggggcgcatcatcctgcttgtaaatgaggagttcggtccgctttcagatctgccgtttgatattgatcggcaacgcgcctctggctacaaggcgagcgagcctgttaccaagaatcagaaggatagcctcctgtcgctattgagcgttgctgttgatacgttgatcagcttggcaccagataagcccggtgcggagaagtcgccggagcagctgaggcgctctcgcgacctggccgcgctgagaagggtgatatctacgcttgatttgaatgttctggatgttcatatgcagtgggcgcctcgcgtgctcacatcagacacggtggatatgtatgagagtttcagcggcgtgcttgcggcaagctcgtttcatctccatgacgcagcggctcatgagcttctcattcaattcgaagaggaatttgccgagaccgtgcgctactggcaggtctatcgccctgcgccggacggaagccgatatttcttctccaatcctggagatgcgtctctttccccagatcaggagatcgtctggcagaagatcgaagtcgcgttggaccggatgcgtctgctacttccgaaactcctcagccatgttcgtcacgagtacgtcgagattgacatctag

SEQ ID NO: 529769 - DNA, 243 bp, Stenotrophomonas maltophilia
atggctacggttccaagtcctgagcagagtgcacggaagattctgaagctgtttgtcgagcacttcgaggctcgagcggggaaggtcctgcgtctgagcaacttcaactcggttatttatgactacgacatcaaggcatcagacttcaacgacggcttgcagtacgcacttgagaaggaatggattgaacactcgcaggggcagtcctacatcttgacacaagcgggcttcgacgaggcctga

SEQ ID NO: 529770 - DNA, 246 bp, Stenotrophomonas maltophilia
gtggaattcaagaacgatgacgttgtagggatcaagaaggcggacgcgctctcctacatccgctctgaactgagcgtgctcgagcagatggggagcaaggaggagttcctcaagtacaaggcccgcgtggaaggcgagctcttgatgatgctacgcctgggtatcatcagtaacgcagagagtcaggcactgggcgaagagctatcgcaggctcgtgagcgcgcggcagcgaaactcggccagtaa

SEQ ID NO: 529771 - DNA, 1245 bp, Stenotrophomonas maltophilia
atggataagacgcagttcgatacgctcccgcttgggcagagcgatgagccggaaccggcctgcatgaagttcgtctatatcgacgagagcgggcacacgggcgacttggtcaacaccggtcggtcgttcgagttcggtgagcagcctcacttcgtgctggcggccgttgggcccatgagcagcgaacaggcgtcccgattgctcgatgacatcgtggccaagcaccgtctgcatcaaatgcgagagctcaaatcagagctgcttcaccggcgccctggagtcgcgcgcgatctggcacgaggattgggggagctggatatccccattttcattgaggtggtggataaagcgttctatctgatcgcctccattatcaactcgcagatcattccgccagggtcgggtcctgagcttgacgagggcgaggtatacctgcgaaaccgtctggcagactacctctacgcaaacctgcccgattcagtgctaggggtctatgtcgacgcctgcaagctaagttctccagaagctgtgcgcgccagtcttgtcaccttgcaggcatgggctgaagaggcggcgctggaggacgacccagaagaccgtcaactcctgtacctgctgcgccagagcatgggtcactccctggaggtattcgacttcgccatgaagcacgatccgcaggggcaccacacctacttgccactgccagatgagggcaagcaacacgcgacctactggctgcttcccaactactcgtcgctgaccaatctatacgcccggatcaacaagtgctgtgcaggtcgcctttcggatgtcaccttagtgcatgatgagcagacgcagtacgatgaggtccttcgtgctgccaaggcgaaggtagagacctttgtcgatacctctggctatgagcaccccggtgccgactactcatttgtcgagcatgccggcctggcctttgagtcctcagcccagactcccgggctgatgattgccgatgtcattgccggacacgtcaggcgggtcatgcgcgagcatgctgcggagtcggatatccacccacaagcttgggatgcgttcctccaagtatgggacgccggtaatcttgaacgaggcacaggcatgaatttggtgttgcctacggcgacggtggaacgcctgcatcatcgagtacttctacgccgccacgagcgagctcgagagacggtggctccgcacttacccaggtcgaaaagcgactcgacggcctag

SEQ ID NO: 529772 - DNA, 885 bp, Stenotrophomonas maltophilia
atgacaggcctatcgatcggactgcagatcaagtccggggcctcctaccgacggtcggacggagactacttcatacctgtcggcgctcatggcagtgtatggcgagattccacggtacccatctttgggatcgtcttcgaccccgactgtggtggcctgttctgggccgacatcacgcgtgtgctgacggagactactacgcttccagcggcgattcaggtctcaaaggtgcagcggttggacagcgccttggggtatcaggggatgctggatgctgtaaagcggcacgcgcagcagcccaccagggacctgggggcacgcctgctcagccaggaccaggctactcagatcgcggccgttgccgagtcttgggcgcttgccagacacgctccgcattctctggtactgctcagacggctcatcaccgagctttccccggcggcgactcgtaacgccatctggctgctggcgctcgcactaggcaatccggacgtctactacgacagcaagacctggctgcccgctcatgttagagatcgcttgagcagagcattgggcttcagcgcgcaggagctgaagcatctgctttcctctgtagacgttgaggaatggcagcgaggcggactggggcaggcgctagatgtgatgcttttccatgatcatgatatttcggaggagatagtgcagatggcctgccgccagctgtccgcccagggcctaactcgcgaggctgttcgtctgatcggatcattcgcatgtcggctcagcgatccgtccggtgctctggacagactctcagtccttctaccaaaccttcttgaggacccgctgatggtgatgtggcgcaacgatgtggcacaaggatatggaattgcgctgtactga

SEQ ID NO: 529773 - DNA, 615 bp, Stenotrophomonas maltophilia
ttgagcatcctcaatgttcttgtaagccatgaacagctcgtggttgccgtggataccctggcccacgatgcgctgacaggggctccatcagcgggggcaaagcttctgctgatcccacattacaatctcgtgctcgcgtgccggggctccgcgcagttcttcctgcgaatgtacgagctatctctgcaggccagcttccgcgcagattttacgatggagcagttgatggccgagttcggcctggtcattgatcaactgtggccgaactatcaaggcgccgcagagcgcgctggtttgcccactgccgagttgggatgcgaactggtacttgggggctggtctccccgaaatggtcgaatgatggccaccgcctatgccaaaagcgacatccaccaccccacggtcgtccagcccatcacaggtcaactagcggcacctggagaccccttaaggcacagacccgccagcatggcgcctgccgacgtactagaggcggggaagcttcaggccaagtttctcaataggcctggaatgccagcgtgggcggggggagacctattgtgcgcggtcgtgaacaaggatgaggtcacagtgcgcaacttgggcgcgatctga

SEQ ID NO: 529774 - DNA, 420 bp, Stenotrophomonas maltophilia
atgaatcttcgagcgatcgtgtatgccagcgaggcgatccctggcctgtccaatgagcggattcatgacctggctcagagcgcctgccgcttcaatcttcaggccggtgtcaccggcgtccttctctacgatggacgccgcttcttccagtatctggaaggtccagaagatgggatggccattgtctacgccagagtcctggctgcgcgaagccaccacgagatcgtggagttgtgtcgcggccggattaccgctcgccacttcccctattggtcgatgcgaatgcttcccgcaaaggcctatgaactgcaagccgcagcaagtttcgactggtatggcgtgaccaggagtgcagggttggagcaactgacgcagatcgtccacccgtacctgcctggcagcgatccccaggctgcctag

SEQ ID NO: 529775 - DNA, 252 bp, Stenotrophomonas maltophilia
atgagagacaagttgaagctggccgaggacgacacccttaagtacaagtcgtcacgaacccggggatttgccggccaaaccgatattacggagtacgacattctggatgcggcagggaacctgatcggtagcgtggagttcaccgaggacgtcgccgtcaggggtctcaggcagaccaatacggtggtgcagagggacgtccaaggtacagttgtggtttctaccagctggaatcctgcactggaaccttga

SEQ ID NO: 529776 - DNA, 438 bp, Stenotrophomonas maltophilia
atgcgcccgatcatccttgctatggatctggagggaaccctgatctccaatgccgtaagccagattccgcgccctgggttgtatcggtttctggagacgatgaatgggcagttcgatcagctggtgatgttcacgacggtcccggagcccctgtttcggcggattgccaacctgctggtgttggagcaacacgcaccagcgtggtttgagcacctcgattgcaccacctggtctgggccaaccaaggacctccgacgggtctcgacggtgttgggccatgcgctcctactggacgatcatgcgccctatgtccatcctggtcagcagccatggtgggttgaagtgccgctgtttggtgcaccatacgacgatgccgatcgtggtctggagatagcttgcgaacgcattgacgccaagctgcaccagctggctggatag

SEQ ID NO: 529777 - DNA, 1707 bp, Stenotrophomonas maltophilia
atgagactgatcatcaaggaattcctttcccagctcggcgaatcgggcgagctggatcgcttgctgcctgaccttctgacgcgcatgagaattgtgcccattagccgggcgcaggtgggagttcgccagaatggtgtcgatgtggcaggtattggtgtggacaccaatggtgtgcggcgactctatcttttcgtgctgaaggtaggcgatctggggcgcagagactgggacggcggggtgaacaccgttcgggtgtcactgaaccagatcctggattcttacctgcagtgcaatgttcttcctgagtatcgtgacctgcctatcacggttgtcatctgctcgaccggcgacctcaaacaggaagtccagacagattttgctggcttctgcgctcgaaacaactcgatttccctggattttaccttctggtcgggcgatcacctcgccgaactcattgatcagtacttgttcgacgagtacgtcatagatccggatcagagggcagatcttcgccgggcattggcgcttatcgggtcacgcgactatgacctgcgccatgcctacgaccttctgaaggcgctactcattgaaggcgcagaggcgtcggtgtgcctcgggcggacgggtcgaaagcgctttgtccgccagttgaagacggccgcgctcgttctggagatcatattccgctgggcagcggatgccgggaatctgctcaatgccttcaaggttggcgagcgctgctgcttgtgggcctgggagggagcgcgactgcgaggtctggccggccacccctcgatcaagcgcgcggtgaaggagattttccgttctcatcagcgcatctgcgaggcctatctgcagaagctgcgaccctactactcggcaagggatggggtctccctgttctcacgcgaaaacgcattgatcaccaacacgctatttgagcagatcggcgtactggcagttatcggtctggtgcacatccaggtggcgcacttttcaacagacgaggagcaggtgaggcgtgctattgatcaggcaggggaggccgccggggcactgctggagctgataagtaacaacccgtcctctgggtccccccggtacgacggcaatgcaatcgatatcgccttggctctcatgcttctctacgtcgcgggggggcatgagcaggcaaagcagtggctggaagatatggctgctcgcatcagcttctcgtggcaaacctcaaacagcttcccaatttccaccgattccttcgatgatctgctggctttggagcttggcattttggatcaagggcagatcagcaagctcaaggatcttagtacattgatccctgtgatcatgcactggtgcgccatgctgggtgagagcgctctctacgagagactcagccaactgcaggccaacgtgttcaaggacgtttgcctccagctctggtatccggaccaagccacggagccactgatctacatgcagcaggcgcagtatgacagcggtacgaccgaggcccctattcggttccccgccgatatcgccggattcttgggagcccagcgcctgagggcacagtcaggaaacttcgttggccccgaggccttctcagcagtcaaagagggcctacctgttctgattccgatggcctgtcggcattttcgcacgccgctcgccccgcagttttggctgccggacgttccggctgcctag

SEQ ID NO: 529778 - DNA, 1893 bp, Stenotrophomonas maltophilia
atgacctcacgcgactccagactggacaagctcgcatggctccttctgagtgctcctcagacagcaacactggaagaggtgggactgagcgaggatgaactgggccaagagttctacctgcaagaaggaagcataggattcagtgaccggtctctgacagttcaaagagccattaggcacatccaagacacggtgatccttcccacgctcgcctctcctcagcaacttttcgctgagctgcagaggatgactgcgcaagcacgtcgagccaggtctgaccgtctggtgggccaagcgctttctcaactcggaaatttaggaaagctggatgccctagacctggcgttgcaggcatcggaaggggccaactcaacggtagccgtgccgagggtgatgagcgaggtgctcccgttgttggagggcctgcagcctgaaaaacttcttacgttgatcgaatgctccgaacagggtggattgctggtctccggtgcgacctaccggatgcagcacgagccaggcctgatcgcccctatcactgaggcctgcgtccagcatccgacgctgaagagcggtctactcctgcgcaatgcgctcatcgaggcgacagtcgcagatcgaaccgatggactcgcccggatccatgacttgatctccagcagtctgcccgcgctttccctgccggccttggaggccctaggtaaggtgaattggtccgccgccgagcagtcacagactgagacggcacttattgtcatccgatcaggattgtcctcggacaaggacgatgtgcgcagaacggcgatcaccgcgtgtctggatctggtcgagacggcgccggcacaacatggccttattgatgagatccttgccctggatgaccccgagctacccggtcgcgttggcgaccatctagcattctccgctcatcatctgaaccaagaatcttggtacctggataaggtcgatctgctcgcgggcaaggctggagtgatgcgcaatggccttcatggcatcgaccatatcctcgcgcagctatttgatgcggacaggtccagatgcatggcgtggatcggtacttgggcggctgcgcacaccgaccgggagctctcactggccaatgagtttccaagtctcttcgagaagatggtggaggagcgtgaggagcttggcgttctactggcgcaatggctcacgcatgatgagtaccgcatgcagagggcggcaagcgacgcactagacgagctcagtcttcatcggatcactgggatggtcttccccgtacgcctgctcgatacaatggccgatgccgagctccagctacttgtgcttcgcacggtcggtcatgtcttgagtgatgagcagcgggtgtctttggtgtggtcgctgaccaaggcaggctctgcccgggggcgtacctatccattggtgttggacacaatggtcaattcgattggctacgactatccaaatgcggtgcggtcgtatctgggcgacgtttccaccggggatgcagcacggcccgaggtcaggttggctcaagagatactcggcgcgatggacagctacgaccagcccctacaagctttgtccccagctgaggagctcctgccctcgtcagaagagcacaatttgttcctcaaggggcgtgccaagcagatgcggcaatcgatggatcgcgccaatgagaactctttcactgcacggattgccacgatgattccgatcaaggctggtcgatcaatgtttcaggttatagaaggccgggttggtcataacacgccgatgatttcaacgtcccactcagccgcctttcccagaagcgaagtcatcgacaaagttggcagcgatatgcagcgcaggcatatctttgggatgaggctggttaggaaatga

SEQ ID NO: 529779 - DNA, 570 bp, Stenotrophomonas maltophilia
gtgagtcggtctatggatgacaacctgttggcgcgttaccaagaatacgcccactcggacgaggcgtttgctgtgctattcatcaagaggcacctgccgcaggcaaggggacactgggtggacccagaggattttcgccggtacgagaagtccacggacaaccttcacttccgattcgtgattggcgggctttatcgccggaagatatccccgaagtatccgccgaaagcggactacaccgtccaaggcgtcttcaacgaacgcaggtaccttgctgtgacccgagccttgacttgggaggcggcccaccaggacatcgcgcagcagaagcgggcaggggcatccttcttgaagtttgaggttgtcggcatcagttatgacagaagccagcgcagcagcggcttcttccgtgacgatgcgcccccgcagatcaaggcgttggcgctcaatttatacgatcggaccgatccgctgtgggacgaggcaatgcaatacatccgggctcccgacttcgtgtacgagattcgcaaggcgaaggtctggagctccgtgcgcgcaagtacctcttaa

SEQ ID NO: 529780 - DNA, 126 bp, Stenotrophomonas maltophilia
atgtggtggcggcttggccagatcgagggcgccactgatggcgagcgcggagcggacagtggcacaatcgcccgcaaggccctgccattggaaggaggaactccgcgtgagtcggtctatggatga

SEQ ID NO: 529781 - DNA, 1128 bp, Stenotrophomonas maltophilia
atgacccaagagttcatcttcgattctttcgatcggaccgaccctcgaccaaggtgcgccaaggagtccctgttccagttttacaaccgctcatcttggccatcgatggctaggctccgccaattcctcacttgcgctgtccagcggtaccccgccgccgagcggaaagaaatgatcgctcggctcaagaaagatgctcacattcgatccgcggagtttgagctgttgctgttccagcttctgacccgctccgggtttgaggttgaagttcaccctgagctcaacaatggatcgactaggcgtccggacttcctggtgcgcgctcccgacggcgagtcgatgctgctggaagcaatcacgatccagcctaccgatgacagtggacttgatgagcatgcgatacaggtcctgatggaaggcctgcgggatgcacgcaatgagcactaccgtgtcaccgtgactgtgtcgggaaatacccggaagacgccgccagcccgtagcttcgtagcccaagtccaacaatggctggccgagctgggatcctatacccagacgccttgggccacccgggactgggtgtttgaggggctaaccctgacgattgaggcgcacgccatcagcccaggtgaagcaggccccgacgaccccctacttgctgcctaccaccgcggcgcgatcatggtcgacgggatgtctcaccttcgggacaagctgcagacaaaagcaggggcatacggtgtcaccggtctgccccttgtcgtggctattaattgccagaacgccttccacagggacatcgactctattgacgcgttgtttggacgcggcggctcgccgcaggacctacccctcggacggcccaatgagggattgtggtcaggcggacgctactcgcgcatgtctgcggcgtggatcttctccaatttcagcaccatcgctttcctgagaagtccccacacgctctatctcaatcccgggtcaacccactgcgtgccacccgcgttgcgtcgattcactcatgctcagatcctatccactggtcaatgggaggctgtcgctggtgccgtacctatgactgagctcttcggtctggacgccgattggcccggcgcatccgggccaggctag

SEQ ID NO: 529782 - DNA, 1839 bp, Stenotrophomonas maltophilia
atgactgacttcaagcactttcccaacgattcgcgactctggttcacacgctggatcgagcgcttcagcaagccgcacaaagcgtcaacctcaacctcagtctgctgctatctgtcgccgcttcccccgtcgctatcggatcccgccaaagcgacgccggcccagatcgccagcctctttgcgcaggaatcagagaccttcgagacgcacatccttgccggagcattgccaacttatcgggtcggtgaggtcttccgccaggcacgccgggtgggtgtcctgcccgcggtggacctcaatcttggtcgggcaatagcccaaggggaactatcagcaaagtatggcagcgatctcacgctggactcggtgatcgccaggtcagctggctatccgatcaaggcagtaccaacgcgccagctgcacctgggccatcgtatccgcgagggtagccaggtgctgatcgtggagcatcaagacattgaattcatcatccctcgtgccttgatcttccgcaccttctacgcccgatcgtctttcttggcctctgtctttacatcatcggcatggtcgacggccaagcacagggcgctattgctggacaaggagtacgccggccaccgaaccgggcgaaacgaggagtttggtacctttgacgtgatcatgcagcgaggaatgcgcctggatgatgcccatcagatggcgttgcttcacttctacgagtacggcgaggcacaggctaacgcactgttcaaccccatgctcaaggcgtttcaggacaccaagcctggaaaggagacgtcctggttcagcaatgcgcggctcccgttggatccgaccttgggtccctatgaaggcaaggtcgctggctacttcctgacaccccacaccgatcagcgccggcagcttcgtacctttctggtgacttccatcgtcggcacctctatgccccatgatttcaaagtcaccagaagaatcctggtgaatgacgggtccctggacggtgacgtcgaagtcaccggcggcccccgtccttacggtgcaaagcctggcagcggcggacgacgccctaacgataagcccagcgatgacggtcacaacggttcaacaaaccatcaatcgttcgactcccctggagactcattcgagtggattaaagcaccggagccggtggagcttgagaagaagcacagcaagaagtattcccaaccgcgagtgccccccgagtcacctgtgacagaagagggttcttacggtgatcgcgacggatcgcaaggctcgcaaagctcctttgaaggccgactgatcactcgggatgccctgacgcgctttaagatgctgatgaaggcaatggatgcgatgatccttgatcgtgtcatctcaagctgcgaagagctcttcgccgacgactccacaaagcgtgtctccgtcggcgctcgtgtctgttggaactttctcgaccaagcccagcgccagaccgcaccgagtcagcggtaccgccgcggctggcagttcgtccaccccatcggcaagagatcgggcggtctagaacgggcggcgctagtcttggaggtcacccttctggacggaagaaccgcctactggatcgaaatacagacgcgacaaggcgcgatgtcccctctgttgatctgcgatggatcttgcaagcaggagcagatatcgactgcgctgaacatcattgctggtgcgcgaggcgcgaacttggaagaagccttcgatcgacccaaagcggcctacttctttacccatcgctacctctcgggtggagagggaccgtgggatctggactggctcaagaagttcttctccagcatcaagtga

SEQ ID NO: 529783 - DNA, 678 bp, Stenotrophomonas maltophilia
ttgcgggccgaagacatgctacgtctcttcgactccaagacattgcgtgcaaacttgaacgcgtccacgtatctgcagcagcagttcgggttcgtgatagatgccaccgcccgatccgatgcccaaaagaggtcgttgattgcctccaagctcagtaccgcacagcttgagccgtggcatccctatctccaagggtatgcgcagagcctggctggacgtgccgcacgaacagcctcgcagtacctggcgaccgccgaggcgttctgccgccagttccaggtgtccggtccgtttagccaggagcagatcgtcgcgttccttgtcgacaagcccggggctcgggcgaatcttgggccctgggtgtcctatgtgaagagggagctcggctgggcggtcaccctcccgccgaaagtaacggcaggcattgcactcaaggcagacgcccggcagctgaaccagctgctcgagcaggtccgcaggcagcccgagccggatctgtcacttctcagtaaggtggttgctttggccttcggctactccgagtcagaactggcgcgcgaagtgacaggtatatccgactccggagacctgatcaccgctaacgggccggttcaggttcccgggccgctcaggtcagccgtcaacggctgggcacgacttcgcggatgggccagttag

SEQ ID NO: 529784 - DNA, 1002 bp, Stenotrophomonas maltophilia
atggtgcccggtgagctcctcagctcctatctggcacgctctgcgctaactcgaggtgtaagcgcgcagagcttggtcgccctggcatgtccggggcgatcggcatggaacagagacattgatgttagtccctcggattgtttcctcctggaactggcaacagcgattggatgtgatgtggatgcgctgatggatatgactctggccggattgatgaagggccatttggagctcgaaggccccggtggcgtccggtcctgggttaacgcggtcggcatctatcaccgatgccgcacccgctatgggctgtgctactgcccgcaatgtctggaagagtccgcggtattcaacgcgcactggcggctgtcctactggacggtgtgccccgcgcacggtgtcgtgctgtgcgattcctgtccacagtgcggtgcagccctggagccccatcgtcagcgggttgacctgcggcgctgcgcccgttgccatcagctcatgacaggacaattggcaactctcgcggcacctacccatacgcagactgccctgactgcagcttcgttgatgagccaggttccaagatactggccgtgcgcggcgacctccggcagcgactacgcgtgggggatgcatgtgcttctatcggcattccacgatgcccgcggcgtcgacttttgctgcacaggccggatgcgggatcggatcgagctcaggcgggtccgcgagcggcacttggacatgcaactgctggacgagcttgtgcgcctttggccgtactcaatgctgtccatcgcagagcgataccatctcacccaacggtccttcaggcgagagtgtccccactggctctggcaagctgtccggtacctcccgccaggacgggtaaacggactgggcgcgcccagcttggccagagtcagggccgcccgatcagcgcaactggcgcgccgggctggctggcgtaccatgcgcgcccagattctcatcgaaatggcgggtcaatag

SEQ ID NO: 529785 - DNA, 1899 bp, Stenotrophomonas maltophilia
atgtccttgtccaacttcttcaaggtggagcctggcgctgaggtctatgtcggccctcgcaagtatcgggtcacgcacatgctgtcgatcgatagcgtgctggccgaagacatggaaacaggtacgagcgcgaagcttcgcattgagaccctgtccacgatcatcgccgccgaatcagccaacgaggctggcgggctgccgatccatcactactccaaggaggaatgggctgttgcacagaagcgcttcgaggcgcttcgcccaatgattgatcatcccgtcagaacgcggagcgaagttgccaagctcgctgcgcaggctggagtccacgttgcgacctattacaagtggctggccgcgtatcacgacgcgggccacgtggccgctttggtgccgcgaaagcgcggtgccatcaaggggcagaaacacttggatccttcccaggagctggtgatcagttctgccgtggaagacatctacttgaagcggcagcgccattcgcccaaggaagtggtagaggaggtggcgcgccggtgcaaactggccaagatcaaccctccggcggcgagcaccgtgaggcgacggctcaaggagctctcgccggctctggcgctgcggcgtcgagggcatcgggacaaagcacgcgacacctatgagccgattcgagggtcgttccctggcgcggactttccatgggcagttgtgcagatcgatcacactccgctggacgtgatggtggtcgacgaagtttaccgtcgccccctcggtaggccttggttgacccttgccatcgacgtctacagccgcatggtcgttgggctgtacgtcaccctcgacaagccctcggcgacctcggttgcgatgtgtgtatctcatgcgatgtcgcctaaaactgagtacctggcagccctgggcattcaaggagactggcctgtatggggacagatcggaacgctgcacgctgacaacgccaaggagttcaagtgcaaggctgtgacgcgtggctgcgaggccaaccatgttgatatgcagtggaggccggtgaagaagccgcattacggcggtcacattgagcggtacatgggagttgtcgccactgagttgaagaaggtgccaggggcgaccttctcgaacacgcagcagcgaaagggctacgactcggagtccgaagctgtcctcaccatgggggaggtagaggcgtacttggtagagttcatcgtgaacaattatcaccaacgcccacatagtcagcttaatagtgcatcaccttccaaggtctggagggaaggtgtgctcggctcggcgggcaagcccggcattggctatccccccatgatccaagacattgatcgtcttcggatggactttcttccgtactttgagatcaccgtccaacgatcaggcgtgaggctggacaacattttctattacgatcctgtcctggatccgtacattggcgcgacgatgcctgacgatcctggtcggaagcgtaaattcctcttcgcaagagatcctcgcgacatcagtcagatctacttcctggacccggcggcgaatcgctatacgccaattccgtacagaacgctgtcccaccccgcaatcagtgcgtctgagctgcgagaagtgactcgattggtcaaggagcagaataagggggaggtcgacgaggagcgtatcttcgcgagcatccagcgcaatcgtgagcggattgaagcatctgccgccagcaccaagtcggcgcgtcgtcaaatggcatcacgtccaaagcgcaagcgagagacacagttgcctgcgaccacggcagaggcgccgtcgcctaccgaatcgatagttgtgactgctgacgcaagtctgtttgaccaagagttggatgtgtttgaagtgggagagctggattga

SEQ ID NO: 529786 - DNA, 663 bp, Stenotrophomonas maltophilia
atgacgcgactgagttcacattctcccgttcgacctttgaaaaatagccgtcgggccctgacaggtaggcttaatttggccggtggaggcgttgcggggttcgagtcgtccttggagagggactggatccgactgctcgacttcgacccgcaagtgcaggtcatcaaggagcagccctttacgatctactacgacgctgaggatggtcgccgtcgctacacgccagacgttctagctgagttgcttgagggggatgtcgctcgcacgagcgtgtatgaagtgaagccgctggagtcgttacgatctgaatggaggcagctgcgtccgcgtttcaaggcggcggttgctcactgcagggagcggggatggcggttcaagatcatcactgagactcacatccgaaccccccgcctagcgaacgtcaacttccttcgccgttatcgctcaatggagccgctgcttgtccgacaggcccagctgaagtacaccgcgtccgttctcggcccgacgacccctcaagccctcctggccgccgcctactggtctgcagaagagcaagccatggcgatccccgcgctctggcagctggtcgcgagtgggcaagtcgtcgtcgacctcagcgtgccgctaacgatgtccacagccattcagttgggtgcttga

SEQ ID NO: 529787 - DNA, 492 bp, Stenotrophomonas maltophilia
atgaaaacgcgcctgatgcttgccggtggcctgttgctggccctgaccggctgcaccacctacgactacgtcggcggtggccgcagcggcagctactaccacggtgcgccgtcggtggaataccgctacccggccggctatccctacaactacggctacccgtactacggcggctatggcggctactacggcggctatggcaatccgtactactcgcgcccggtctaccgcccgccgcacaaccaccgcccgccgccgcgcccgcccggcaatggtggcgagaaccgtccgccgccgccgtcgcggccgtcgtacaacggcggttcgccgtggcggaacatggactcgatgcgtcgcccgccgcagtcgaacatccagccgtcggcgcctccgccgcaggcccgtccggccccggcgcccagtgcgccaaggatgaacggttccccctggcgcaacatggatcgtgggacgcagcgcacagttgagcgctga

SEQ ID NO: 529788 - DNA, 633 bp, Stenotrophomonas maltophilia
ttgagccgcgaccggcaccggcatcgcaccggcctgctgggctggctgtggcggctgttcgtgctgctggtgatctggctgctgggggtgaccgcctggatcgtctgggtgggtgagcgcgaccaggcggccaaggccgacgcgatcatcgtgctcggcgcggcggcctatgacgccaagccgtcgccggtgttcgaagaacgcatccgccatggcctggatctctatgacgcacagtacgcgccactgctgatcttcaccggtggctatggcggcaccggcgcgcgcttttccgaatcgcaggtggcgcggcgttatgcgctcaagcatggcgtgccggacgacgcgatcctgatcgagaccgcctcgcgcaacaccgtgcagaacctggtcgaagccaagcggctgatggaccagcgcgacctgcaccgggtgatcatcgtcagcgacccgctgcacatggcgcgcgcgctgcgcctgagcaaggcgctgggcatcgatgcgctggcttcgtccacgcccagcacgcgcttccgcagcttccacaccagctggcgcttcctggtgcaggaaatctatttcttccaccgcgacctggtgcgcccgccgctgagttcgccggccaatacctga

SEQ ID NO: 529789 - DNA, 885 bp, Stenotrophomonas maltophilia
atgccgtcccacttcgatgcccgccatgtccgccgcgcgttcgcccgcgccgccaacagctatgacgccgccgccgccctgcagcgcgaggtgcaggcgcggctgatcgaatcgctggactacctggaggcacgcaagcccgaagtggtgctggacatcggtgccggcaccggccacgccagtgcactgatgaagaagcgctggccgaaggcgcaggtgatcgcgctggacgtggcgctgccgatgctggaccaggccaagcgccaggctggctggtggaagccgttccagcgcctgtgcggcgacgccgccgcgctgccgctggccgacaacagcgtggacgtgatcttcagcaacctgtgcctgcagtgggtggacgacctgccggcggtgttcgccgggttccgtcgcgtgctcaagcccggtggcctgctgttgtgctccactttcggcccggacacgctggtcgaactcaacgaagccttcgcggccgccgatgaccgcccgcacgtgagccgcttcgcgcagatcgcccagttcggcgatgcgctgatgatggccggcttccgcgacccggtgctggaccgcgatctgttcaccctgacctacgacgacctgccctcgctgatgcgcgagctgcgcgcgatgggcgcgaccaatgcgcgggtggaccgccgccacacgctgaccgggcgtggccgtttcgccgctgcggcagcagcgtatgaaccgatgcggcgcgccgacggcaagctgcccagcagctgggaagtgatctatgcccacgcctgggcaccggacccgggcgcaccgatccgcgaaggcgggcatgacgtggcctcggtaccggtgtcggcgattccgatccggcgcaagcagacctga

SEQ ID NO: 529790 - DNA, 780 bp, Stenotrophomonas maltophilia
atggatctgggtatcaacggccgctgggcactggtctgcggcgcaagcaaggggttgggcctgggctgcgcgcgggcactggtgcgcgagggcgtcaacgtggtgatcgtggcccggggcgaagccaccctgcaggccgccgctgaagagctgcgtgccctgcccggcgctgccgaggtgcgcgcggtcgccgccgatgtcaccaccgaggccggtcgctccgtagcgctggccgcgtgcccgcaggtggacatcctggtcaccaacgccggtggcccgccgcccggtgatttccgcagcttcgagcgcgacgactggatcgccgcactggacgccaacatgctggcgccgatcgcgctgatccgcgccaccgtggacgcgatgatcgcgcgcggcttcggccgcatcgtcaacatcacgtcctcggcagtgaaagccccgatcgacatcctggcgctgtccaacggcgcgcgcagcggcctgaccggcttcgtcgccgggctgtcgcgccgcaccgtggcgcacaacgtcaccatcaacaacctgctgcccggccagttcgacaccgaccgcctgcgcgccaacttcgcccactctgcgggcaaggacggcgatgctgcggaagtggccgaacgccgccgccagcagattcccgccggccgcttcggcacgccggatgaattcggcgccgcctgcgccttcctgtgcagtgcacaggccggttacctcaccgggcagaacctgctgatcgacggcggcgcctaccccggtacgttctaa

SEQ ID NO: 529791 - DNA, 780 bp, Stenotrophomonas maltophilia
atgcatatcgacgtcaccggccaggggccggacctggtactgatccatggctgggccctgcagggcggcgtgttcgcgccgctggtgcaacgcctggccgatcgcttcaccctgcatctggttgatctgccgggccatggccacagccgcgaggacaccacgccgctgcgcctgccgttcgtggtcaacgccatcgccgcggccacgccgccggcggtgtggtgtggttggtcgctgggcggcctgttcgcactgcacgccgccgcaacgctgccgaaggtgcgcgggctggcgatgatcgcggccacgccgcgcttcgtgcgtggcgaagactggccgcatgcggtggaaccggcggtgttcgagcagttcgggcgcgagctggccagcgatttcggcggcaccctggagcgcttcctggcgctggacgtgatgggctcggcacacgcccgcgaggagctgcgcacgctgcgccagcgcctggtcgagcgcggtgcacccaccgaacgcgccctgctggaaggcctgcgcctgctggaaggcaccgacctgcgcggcgcactgccgacgctgggcaaacccagcctgtggatcgccggccagcgtgaccggctggtgtcgccgacggcgatgcaggccgctgcggcactggccccgggcgggcaggcgctgaccatcgcccacggcggccatgcgcccttcctcggccatgccgacgaggtcgccgcggccctgcaacacttcgttgccggcctgtcaccggccgatggcggacaatga

SEQ ID NO: 529792 - DNA, 1224 bp, Stenotrophomonas maltophilia
atggcccgccccgacctgaccgcccgcctccacgcccaacgcgccctgcgcgatgcccaaggccgtcgccgcacgcggcgcacggtcacccgtcgtgacggcgtccgcctggaagtggacggccagtggctgaccggcttctgcagcaacgattacctgggcctggcccagcagttcagcgtggtcaacgcactgcaggatgcggccgcacgcgaaggcaccggcgcgggtgcctcgcatctggtctgcggccaccacgccctgcatgacgcgctggagcgcgaagtggcagagtggctgggctacccgcgcgcgctgctgttcggcagtggcttcgccgccaacctggccgtgcagcaggcgctgctgagcgaagagaacgatgtgtgcgtgcaggacaagctcaaccacgccagcctgctcgatgcgacgcggctggccggtgcgcgcctgcgccgttatccgcaccttgatgccgaaggcgcgatgcgccagctcaagcacgcgcccgatggcgcggcgatgctggccaccgatggtgtcttcagcatggatggtgacatcgcaccgctgcgtgcattgtcgcttgtggcacgcctgcagcaggcgctgttctatgtggacgatgcgcatggcgtgggcgtggtgggcgatggccgtggcgcggtcgcggctgccggactgggcgtggacgatgtgccgctacagctggtcacgctgggcaaggcactgggcggttccggcgcgctggtgctgggccgcgacgacctggtcgagcacctggccgaaaccgcgcgcccctacatctacaccaccgcgatgccgccgccgctggccgccgcagcactggaagcggtgcgcctggcccgccgtgacaactggcggcgttcgaaactgaccgacctgatcgcgctgttccgcggcgaagcccgccgccatggcctggacctgatggcctcggaaacgccgatccagccgctgctgtgtggcgacgaccaccgcgccgtggcgatgtccaaggcgttgcaacaggccggttggctggtcggcgcgatccgcccgcccacggttcccgaaggcaaggcgcgcctgcgcgtcaccctgtccgcgttgcacacccccgagcaggtgcgtggcgtggtcgaagccattgccagcgcgcgcgatcgcgtcgacctggccgcgcgtgaggccgcgccaccgccgctgccggtctttgcctga

SEQ ID NO: 529793 - DNA, 570 bp, Stenotrophomonas maltophilia
atggacagctaccagccctacccgatccgccccgatgcggtgctgtgcagcctggccgaactgcctgacggcggcctgcgcgtggtgatggatgatctgcgccagacgagtgaacccggtcactggcagaaccgcatcttcgtgaccttcaaggactacgcggcggggcagctcgatccctcgacgctgcccgacgaggagttgcaggcgttcggtctgtacgtgctggttcgcctgctggccatcaatggctgcctgcgcgacaccgaggaggagcccgacagcgatgcccaccttaccgagcagcagcggcagaacatcgccgcgctgaccgacgaggacatcgcctggatcgatgcgcaactgctttcccactgcgatgggcagttccggaaaatcgccttcatcgtgggcaacgcgatgtcgctggacccgcagcgccgccccggcattgccgatgtcttctacgcccagcgcgtgcgcaaactggtcgcgcgcggcgtactggaagcgcagggcgacctggcgcgcatgcgccatggcgaagtgcgcatccggcagcagccctga

SEQ ID NO: 529794 - DNA, 1344 bp, Stenotrophomonas maltophilia
atgaccgatctccatcgcctccgcggccgtatcaccgcgctggttctcagtgaggcctggcgccgccgcgccgcactctggggcggcgccgtggccgtggcactggtggccatcctgttcgccaaggccagcgacgcggccttccacctgttccagcgcatcacctcgcattcgccgtggtgggccctgctgctcacaccgggcatcttcgcgttgttggcgtggctcacttctggcgtgctgaagcccacacggggcagcggcattccgcaggtcatcgccgcactggacaagccggatgagtcgttccgcaggaccaatctttcgcctgcggtctcggcgggcaagctgttgctgacgtcgttgtcgctgctgggcggcgcgtcggtcgggcgcgagggcccgacggtgcatgtgggtgccagcctgatgtacctgttcggccgctggttcggcttcaaggacccacgcgagctctcgcacttcctgctggcgggcggcgcggcgggcattgcggcggcgttcaacacgccgctggccggcatcgtcttcgccatcgaggagctcagcggccgtttcgagcatcggttctccggcaccttgctgaccgcagtgattgtcggtggcgtggtgtcgctcggcctgctcggcaactacacctacttcggtcatgtgagcgcgcggctgccgctgggacagggctggctggcgatcctgctgtgcggcgcagtggccggattgctgggtggattgttcgcgcgcgcggtgctggcgagtgcggcgggccgcccgcgttggctgggccagctgcggcagcggcatcccgtgctgctggctgcaggctgcggcctggtggtggtggcgctggcgttgacgttcggcgaaggcgcgttcggcaccggctacgagcaggcgcgcagcctggtgcaggggcaggcgatggtcggccatgaattcggtctgatgaagctgctggcgaatctggcgtcctacgtggcgggtatccccggtggcctgttctcgccggcgctggcggtcggtgccggccttgggcataacctggcggtactgatgccgggcgtggatccgcgagcatttgtactgttaggcatgtgcgcctatctgaccggcgtcacccaggcaccgctgacctcggcggtgatttcgctggagctgaccgacagcggcgacctgctgctgccgatcctggccacggtgctgatcgcgcgtggtgtgtccgggttggtgtgccgggtgccgatctatcgtgggttggcggagttgttgatgatgcccgtcgtcgcgccacactcgccttccagcggaaaggatttcacgaagtga

SEQ ID NO: 529795 - DNA, 663 bp, Stenotrophomonas maltophilia
gtgagctacaccatcgcccctgaacaggtcatcgattacccgcccgagcgcttgcgcgagttccatggcagcgtggtcgagtacatcgacaaccgggtgttcatgctggatccggggcaactggtcggcgaggctgccgcgcaggcctaccgggagaccgcagccgggatgttcaccgccctgggctggcagggagatggccgcatcgagctgttgtggctgcccgcctttgttttcccgctgtcggagcacatggcggatgtcggtgttggcgtctggcacgtcaagcaggaagaagacggcatctcctacctgttgtcgccggtgccgatgccgttcgaggcactgcacaacacgccacactggaaggaggtccgccaggcggcagaacgcaggcgcggtgcacggggccgagcggtggatgaagtcctgcactatgtatgggatccaataggcatccaggccaatccggactgccgtggcgagtacgccgcctacgcagatcgcatcgagtcccagctgctgcgcggtgcaggcgaacaggaactgtgtgcggcccttgccggcatggcgcgcaatgaaatgggcgtcaatccggatgagtacaggacccagcgcgccgccgccgccctggtggcctggcgggcatccctgcgtgactga

SEQ ID NO: 529796 - DNA, 696 bp, Stenotrophomonas maltophilia
atgcctcttgcctacctccctctaccggcggattggcccgcagcgctgcttcgcgtgctcctgccactgcggtgtctggtctgcggcgacccgggccacgatgatcttgacctgtgccgcgcctgccttgccgacctgccgtggtccggccgtgcctgcctgcgctgtgcgttgccgttgcccgacacggcgttgatcgtctgcggcagctgccgcgaggaagcaccaccgcagacggccacccatgccagcctgttgtacctgccaccggtcgaccagctgctggtgcgctacaagtttcatcaggacctggcggccggccgcctgctggcgcagttgatgcgacgcgcaccgccgccctggtcatgcccaccgctggtgccggtaccgctgcaccggcgccgcctgcgccagcgcggctacaaccaggccgccgaactgtgtcgcctgctgccgatgccggtctggcacgggctgtaccggcagcggcatacggcgccgcagtccgaacgcacggccgaacagcgccgggagaacctgttcgatgcgttcgatgtacgcgatccggtgccaccgcgactgaccgtggtcgacgacgtgatgaccaccggcagtacggtgatggagattgccgaaacgctgcgctgcgtgggcgctgaagaggtgcgggtatgggtgtgcgcgcgggtgccgtga

SEQ ID NO: 529797 - DNA, 471 bp, Stenotrophomonas maltophilia
gtgagggttgcgcttccgcttctgctgggggcggcgctggtgctggccggatgcatgccaggtgccgcgcccggtgcgctggcaggcaaggagcatgcgccacgccccggcgtggatgtgcgcctgagcgcggtcgatgcagacggcaagggtacccaagcgcagtggcagggcgagacgctggccctgcgcgagccgccgattgccggcagcgcggacatcgccgatgtgcgctatgtgctggatgaaggcaagcagccgggcctgcagatccgctatcggccggaggcgcaccagcgcatccacgatggcaccgcggccctggtgggccagcgggcggcgatcagcgtggacggccgcgtgctgatggtggcgacggtgcagggaccgttcggcgaatcgatgatgctgagcgggctgtccagcgttgccgaagcgcaggcgctggccaggcacatcacgggcgaatga

SEQ ID NO: 529798 - DNA, 1803 bp, Stenotrophomonas maltophilia
atgaccgcagccgccgcacctgccgtacccgcttccaccaccccgcgctggcccgtacgctacctgctcttcatcggcggcctcggtggcctgctgtacggcatcgacatcggcatcatcgccggtgccctgccctacctggaggcaacggccagccacgcgtggcagctcagcagccagcagctcggcttcgtcgtcgcggcagtgctgctgggcagtgtgttgtcctcgctgttcgccggcatggtcgccgacctgatcggccgccgcggcgcgatgctgctggccggcctgctgttcaccgcctcgattccgatcatggcgctggcttcgggctacacgccgctgctgctcggccggctgctgcagggcatcagtggcggcctgattggcgtggtgattccgctgtacctggccgaagtgctcagccccgaacgacgcgggcgcggcgcggcgatgttccagctgttgctgaccgtcggcctggtgctggcggcgctgatcggcctgtaccaggcccatgcagtggatgccgccgccgaagccgtgcgctcactgccggtcgcgcagcaggcgcaggagctgtttgcggtgaaggaccacgcctggcgcaccatcttctggacctgcctggcgccgggcctgctgttctgcgccggcatcttctggctgtccgagtcaccgcgctggctggtgcggcgcggccgcatcgatgacgcgcgccgcagcctgcagcgcgtgctgccggctgcggaggtggaacccacgcttgcacagatccaggcaccggaatcgcgcagcagcagcggcaagcgcgacccgctgctcagccgccgctacgtggtgccgttcctgctcgcctgcgtggtgctggcctgcacccaggccactggcatcaactcggtgctggcctacgcagtgaacatcctcaaccaggcgggcctgtccggctcggtggccaatggcgctgacgtggcgatcaagctgctcaatgcggtgatgaccgtggtcgcgctgctgctggtcgaccgcaagggccgcaaattcctgctgatgctcggcagcggcggcatctgcgtggccctgctggccgccgccacgctgttcttccaggccgagcgcggccgtaccgacgtgcagccgcagctgcaggcggcggtcagcggcgatggcctgcaactggtactggatgacgcgcagtggcagcgcttgggtgttggcatcgacagcgaaggcaggccgctgcagctgaccgtgtcgtatgcctatggcgacttcaccaatgtgcgcgccctgcgcagcgacaatctgaccgaccgcgagctgcgcatcgagcgtgccggcaccgtgcagccggacagcgtgatcggcgcgttcttccgcaaactgcatctgaacccgttcgccgacccggccaaggccgcgcaggcaccgctgcgcatcgagcaggcacgcatcggcccggtgccgccgccggcccacggctgggcggtggccgcctgcatcctggtgttcgtcgcgttcttcgcggtcggccccggcgtctgcgtgtggctggcgctgtcggagctgatgccgaaccgcatccgctccaacggcatgagcatcgcactgctgatcaaccagttcgtgtcgaccaccatcgccgcgatcttcctgcccacggtgggccactacggctacgccagcatgttcgtgttctgggcggcgtgcaccttcgtgttcttcctggtagccgcgttctggctgccggagaccaagggcaagtcgctggaagagatcgaggcccgcttcgcgcggtag

SEQ ID NO: 529799 - DNA, 1128 bp, Stenotrophomonas maltophilia
atgaccgacacccgcaccctgcatggccgcatcctcaccccgctgggttggcggcgtggtcacgtccacttcgattcgcaggtgcgccagctgcaggtggatgaccacagcggcgctgacgacctgcagctgccggtgatcctgcccggcttcatcgacctgcatgtgcacggcgcggccggcgtggacctgatgcagggcggcgacgtggcacgcaccatcgcccgcacccatctgcgcttcggtaccaccacgctgctggcgaccaccatgaccgccgggctggacgagatcgagcacgcgctgcagggtgtggccgccaccatggcggcgcccgatgccgacgccgcctgcattgccggcgtgcatctggaaggcccgttcatcagcccgcagcgcctgggcgcgcagcccaaccgcaccatcgaggcgacgctggcgctggtgcaacagctgcatgcgctggcaccgatccgggtgatgacgctggccccggaaatcggcgagcacaccgcgctgatacctgcgctttcggcgatgggcatccgcgtgcagcttggccacagcgccggcacctacgaggaaggcgtggccgcgctgcaggccggcgcctccggcttcacccacctgttcaatggcatgaccggcgtcgatcactatcgcccgggcatcgccgcagcggcgctcgcacatgcacagtacgccgagatcatccccgacctgcagcacatccaccccggcgtgatccgcctggccgcgcgtgcgatcccgcgcctgtacgcggtgaccgacgccaccgccgccacgggcatgcccgatggcgagtacgcgctgggcgaacagcgcgtgcacaagtgcggcggctgcgtgcgcctggcgaccggttcgctggccggcagcgcgctgaccatggaccaggcgctgcgcaacctgatgcgggtcggcctggagctggccgacgcgtcgcagcgtgtttccaccttccccgccgcgtatctcggcctggacgatcgcggccgcatcgcgcccgacgcccgcgccgacctggtggtgctggatgccgaactgcgcctgcagcaggtggtggtgggcgggcgggtagtcgatttgaacgccgcaaacgcctga

SEQ ID NO: 529800 - DNA, 777 bp, Stenotrophomonas maltophilia
atgcgcaacacccgctcccgccggcaacagatcctgcagctgctgatcgagcacggctcggtacaggtggccgatctggtcgagcgcttcggcgtgtcggcggtgaccatccgtgccgatctgacccacttcgagtcgcagggcctggccaaccgtacccacggtggtgccacgctcgttcgtacgccgccgcaggaacaggacatccacgagaaggacgcactgaacctgccgctgaaggaatcgatcggtgcgcgcgccgcgcgcctggtgcagcccggcgacaacatcatcatcgactccggctcgaccacgatgaccctggcccgccacctgcgcgcgcatcgcgacgtgacggtgatgaccaacggcctgaacatcgcctgggaactggccaatgccgcaggcatcaccgtgctgctgaccggcggcctgctgcgccagcagtcgctgtcgctgcagggcagccaggccgaggccagcctcaactcgtacagcttcgacaccctgttcctgggcgtggacggcctggacctgcagttcggcctgaccacccacgacgaggccgaagcccgcctcaaccaccgcatggtcgagcgcgcgcgccgcatcgtggtgctgaccgatgcctccaagttcggccgcgtcagcctgcaccgcatcgccctgctggatcagatccacgccatcatcaccgacgccggcatcgacgatgcaacccgcgaagggctgcagcggctgggcatcgaagtgatcatcgccgagcccaccgcatga

SEQ ID NO: 529801 - DNA, 1335 bp, Stenotrophomonas maltophilia
atgtccccgttgcagaccctgcttgcctcccaccgcgctggtgccaacgtcggcctgtacagcgtctgctgcagcaacgagcaggtgctgcgcgcagccatgcacgtggcgcaggcacatggcaccgtgctgctggtcgaggccacctccaaccaggtcgaccagttcggcggctacaccggcatgaccccgccgcagtaccgcgattacgtcggcacgctggccgatgaggaaggcttcccgcgcgagcggctgatcctgggcggtgaccatctcggcccgaatgcctggcagaagcgcccggcggccgaagcgatgacccacgcgcgcgtgctgatcgaagcctacgtcgccgccggtttccacaagatccacctggactgcagcatgtcctgcgccgacgacccggtgccgctgcccgatgccatcgtcgccgcgcgttcggccgagctggccgagatcgccgagcgcaccgccgccgaacacggcctgccgccgccggtctacgtgatcggcaccgaagtgccgattcccggtggcgaagcctcgctggccgaaggcctgcaggtgaccacgccggccgccgccgcgcagaccctggccatccaccagcaggcgttcgataccccgcagctgcgcgacgcgtggcagcgcgtgatcgcgatggtggtgcagcccggcgtggacttcgaccacagcagcgtgcacgaatacgacccggccgccgccagtgcgctggccgatttcctcgaacagcagccgcgcatcgtgttcgaagcgcattccaccgactaccagcgcgaaagtggcctgcacgcgctggtacgcgaccacttcgccatcctgaaggtcggcccggccgccaccttcgcctaccgcgaggcgctgttcgcgctggccgcgatcgaagccgaactgctgccggccgcacagtgctcgcgcctgccgcaggtgctggacgaggtgatggtggcgcagccgaagtactggcagtcctattaccagggcgatgacgccgcgctgcggctgctgcgcagctactccttcagcgaccgctgccgctactactggggcgagccggcgctggtgcaggcggtgcagaccctgttcgacaacctggagcagcacgcgccgccgctggtactgctcagccagtacctgccggagcagtaccgcgccgtgcgcgaaggccgcctggtcaacacccccaccgccctggtgcagcaccgcatcggcctgtgcctgggcgagtacgcccgcgcctgcagcgccaaccaggccggcacccgcgtgcagagcgcaggttcggctgccggcgttcctgcgaacggctaa

SEQ ID NO: 529802 - DNA, 939 bp, Stenotrophomonas maltophilia
atggctgagctgatcgcccacgcctgctacggcatcgacatcggcggcaccaagatcgagctggtggcgtgcgatgcggcgatgcaggtcacctggcgccgtcgcgtcagcacgccgcagggcgactacgacggtttcctgcaggcggtggtggcgctggtggccgaggcagacgctgcacttggccgcagtgatgcggccatcggcatcgccctgcccggcgtgcgtgatcgccgcacgggtcgccagctcagtgcgaacgtgccggcactgaccggccacagcgtcgccgccgatctgcaggcccggctgcagcgcccactgcatttcggcaatgacctgcagtgctttgccctttccgaagcgcacggcggcgccgccgatggctaccccagcatgttcggcgccatcctcggcacgggtgcgggtggtggcttctgcctgcagggccggctgctgtccggtttcaacgggctggccggcgaatggggccactggagcgtgcccgggcatctgctgcagcgccacggcctgccgctgatcgactgcgcctgtggcctgcagggctgcgtggagcgctatgtgtccggcagtggcgtggcgatgatcgagcgccaccttggtggcagcgccgccgacgccagtgcggtgatcgccctggccgaagccggtgatgcgcgcgcgcgcaaggcgctggacatccatcgcgacctgctcggccacagcctggccgcgctggtgctggcgttggacccgcacgtgatcgtgctcggcggcggtctttcgcagtacgcgccgctctacgagcacctgcccgccgccatcgccgcccatctgttcaagggcgtgcaggtgccaccgatcgtgccgccacgctttggcgatgccggcggcgcacgtggtgctgccctgctcgcctgccaaccctcgttttcctga

SEQ ID NO: 529803 - DNA, 1155 bp, Stenotrophomonas maltophilia
atggacgtcaccctgctttccgatgtgtccgcctggcagcgccttggcggagccgataccgctaccgaaatcgcccagcagcctgcgctgtgggaagccctcgcacaggacctgtcgcgtgcgcgcgaccgcctgcaggccttcctcggcgacagcctcaacgatcccaaccagcgcgtgctgttcaccggcgccggcagctccggcttcattgccgagatggtggccgacgcgatcaacgcgcagtggccagctgatgtgcgcgtggtgcacaccaccagcctgctgacccacccggcgctgtacctgcagcgcgaccgcccgaccctgctggtctcgttcggccgcagcggctccagcccggagagcgtggcggcagtggaccgcgtgcgcagcgacgtggatgacgcgcgcttcctcgacatcacctgcaacgccgatggcgaactggcccgtcgtggcgccggccgtgccgacacctgcaccctgctgatgccctccgccagctgcgaccgtgccttcgccatgaccagcagcctgacctgcatgctgctggccgcattgaccgtgttcgatcgttcgccgtgggatgcgcgcgtggcgcgcctgaagcagatcgccgcgctggcccgcgaaggccaggcacagtgggatgcaccggtggcggcgctggcgcaacgcccgttcaaccgcatcatctacctcggcagcggcccgctggaagcgctggcacgcgagtgcgcgctgaaggtgctggagctgaccgccggccgcgtgctggcgctggccaacaccccgctgggcttccgccatggcccgaaatcgacgctggacggcaacaccctggtggtggtgctgcgcagcgtgcagccgctggcgcgccgctacgaacaggacctgctggaagagctgcgccgcgacggcgtggccggccaggtactggcgatcggcccgcattcggacatcggcgccgatgacgaataccccctgatcgtgccggcactggacgatccgtggctggcgccggtatggctgggcttcgcgcagctgttcgcgctgcagcgctcggccgcgctcgggctgaccccggacaacccgttcccggacggcaccgtcaaccgcgtcgtcaagggcgtcaccatccaccatggctga

SEQ ID NO: 529804 - DNA, 3360 bp, Stenotrophomonas maltophilia
gtggaaaactgcgttcgtcgctcgccgctgatgctggccctgttgccggcattgatgctggcgtccatgccggcccgggccgagccggtcggcaacctgcgttcggtggccgccagcgacagccgcgacggcgtgcagggctgggacctgcagaccgacaagggcgcgcgcatccgcatcgagctgccggccaccgacatcatccgcgtgcaggccggccgcaacggcaagctcaccggtgcaggcgacaaggccgcgccgatcgtgctgccgcagcccaaggcgaacgtgcaggcgcagctggaagaagacgcgcaggaactccgcgtgcgcaccgatgcactggtgctgcatgtacaacggcagccgctgcgcctgcgcctggagcggctggacaacggccagcccaccgccctctggcaggagctgcaaccactggacctggatgccacgcagagcgtgcaggtgctgtcctcgcaggccgacgaaggctattacggcggtggccagcagaacggccgctaccagttcaagggccgcgagctggaagtgtcctactccggcggctgggaagagggcgaccgccccagcccggcaccgatgctgctgagcagccgcggctggggcatgttgcgcaatacctggagcgatggcagctacgatctgcgcgagcccgaccaggccacgctgctgcatcgcgaagaccgcttcgatgcctattacttcgtcggcgccgatctgccgaagctgatcgaacgctacacccagctgaccggtcgccccaacatggtggcgcgctgggcgctgtcctacggcgatgccgattgctacaacgacggcgacaaccgcaagaagcccggtaccgtgcctgaaggctggagcgacggcccgaccggcaccacgccggatgtgatcgacagcgtggccaagcagtatcgcgccaacgacatgcctggtggctggatcctgcccaacgatgggtacggctgcggttacaagcagttgccggaaacggtgaagggcctggcctcgtacggcttccgcaccggtctgtggaccgagaacggcgtcgacaagattgcctgggaagtgggcaaggccggcagccgcgtgcagaagctggacgtggcctggaccggcaagggctaccagttcgcgatggatgccaaccgccaggcgttcaacggcatcctcgacaattccgattcgcgcccgttcctgtggacggtgatgggctgggccggcatccagcgttacgcggtggcatggaccggcgaccagagcagcagctgggactacatccgctggcacgtacctaccctggtcggttcggggctgtccggcatggcctacgccagcggcgacgtcgatgcgatcttcggcggcagcgccgagaccttcacccgcgatctgcagtggaaggcattcaccccggtgctgatgggcatgagcggctggtcgtcgaatgcgcgcaagcacccgtggtggtacgacgagccctaccgcagcatcaaccgcgattacctgaagttgaagatgcgcctgaccccgtacatgtatgggctggtgcacgaggctgcgcagaccggtgcaccgccggtgcgtggcctgatgtgggacaacccgcgcgacccgcacgcgcaggatgaaacctacaagtaccagttcctgctcggccgcgacctgctggtggcgccggtgtaccgcagccaggcggccagccgtggctggcgccgcgacatccacctgccggccggcggctggatcgactactgggacggccgccgcgtgcaggccaccgccgatggccgccagctcgaccgccaggtggacctggccacgctgccggtgttcgtgcgtgccggtgcgatcctgccgatgtacccgtcgatgctgttcgatggcgaaaagccactcgatgaggtgacgttcgacctgtacccgcagggcgattcgcagtacacgctgtacgaagacgacggcaacacccgccgctaccagcagggcgaatcgagcacgcagcagatccgcgtgcaggcgccggcacagggcagtggcccggtgcaggtgcagatcgacgccgtgcaaggccagtacaacggccagctggcgcagcgccgctatggcctgcgcgtgctcagccgccaggcgccgcgcgcggtgcaggccggtggtcgcgcgctgccggcgctggccgatgccgccgccttcaacagcgccaacgaaggctggtacttcgacgcgcaggagcgccgcggcacgctgcatgtgcgcacggccacacaggatatccgccagccgctgcagctgcagctggatttcgcggtggccgccgcagccgccgacgatgcctatccggccgcgccggtgctgggccgcgaactgccggccgacagcctgctggtggtcaaccgcccggccgaagagcccggccatgcgctggaaaatgccttcgatgatgatccgggcacctggttccgcagcgtgcgcaaccaggccgtgcgcaccggcgcgcatgagtgggtgatcggcttcggcgagcggaagatgatcgatggcatcgacatcgcgccgcgcaacgacaagaactggaagcacggccaggtccgcgactacgaggtgtacctgggcgacagcaatggcgagtggggcgagccgatcgcccgcggccgcctgcagctgaaggaaggcgtgcagcgcatcgacttcccggcccacgccggtcgcctgctgcgcttccgcgtgctgagcgtgcagaaccccgaaggcgacggcgccagcagcaccgacccgatggtgaccgccgcacagggcagcgcccgcgcgttcgatgcattgcagccgcgcgatgtcggcccgatcgcactgtccaccttccacattcttgaacaccaggaaccggagcgaccggcccggcagcgctatctctccgagctgccggtgccggccgcgctggccagccaggtgcgcaccgaccagtccttccgtggcgacgccggcatgcgcatgaacgggctgcagttccgccgtggcctgggcgtcggcgccaacagccgcatcgacctgcgcctgcagggcggctggcacctgctgcgcgccgacctcggcatcgacgacgcctgccgcaacgccggtggcctgcagttccaggtctggggtgacaaccgcctgctgtacgacagcggcctggtgagggcgcccggcgtggtcaagccggagctggacatccgaggcctttccaccctgagcctgcgcacgctgggtgcgcagggcagccaacccgcccaggtctgcgccaactgggccaacgccgtactgatcggccaggagggcgactccgccagcatcgtcgccccatga

SEQ ID NO: 529805 - DNA, 2976 bp, Stenotrophomonas maltophilia
atgttgcccgcccgccaccaccgccccccctgtcgttcgatcgctccgctgtcgctggccatcgccggcgtgctgctgtcggtcgccgttcctgccttcgcccaggagagcaaggacaaggccaccgacctggcccgcatcgaggtcaccggctccaacatccgccgcaccgacgttgaaaccgcgtcgccggtgcaggtgatcagcaagcaggacatccagaacatgggtgcgcgcacgctgctgcaggtgctcgacaacctgcccgccgcacgcccggcgcaacaggacgcgcgttcgctgttcaccggctccgacggtgcctcgcaggccaacctgcgtggcctcggcgcacagggcacgctggtgctgctgaacggtcgccgcctgtcgtactacggtgcgccggccggcttccagacccagttcgtcaacatcgatgcgatcccggccgcggccatcgagcgcatggaagtgctgaccgacggcgcctcggcggtgtacggcactgacgcggtggccggcgtgatcaacgtgatcaccaagcgcaacttccagggcgccgagatcagcttcaccaacgacacctcgtcgcgcatcgattcctacggcgagcgccaggccagcatcaccgccggcttcggtgacctgaccgagaaccgcttcaacatctacggcgcggtgaacatgtaccgccgcgacgcgattccgctcagcgacttctacgacaagcggcccgaccagtactacgtcaacaacccgaactacctcaacaacctgcgcctgggcgtgggcagcaagccgggcgaattcaacccgggcagctacttcgcgttcgatccggtcaccggccgtcgcgtgcaggaagcggcaccgggctgcaagaacgtgctgaccagtgaagcggccggaccgcgttgcgtctgggaaacctggatgaacaacgagatcgatgccggcgccaagtccgagcgcaacacggcctacctcaacggcacgttcctggtgggcgacagcaccgagatcttcgccgaggcgacctacaccgacatcgacctgcgtgccaacggcggcacgccgcgcacctacggcaccaccaccggcaacccgaccagctggttctcgcgcaacaccggcaacaacgtcaaccagttcctgtacccgttcctgggcccgaacaacgagtacaaccacgccagcccgcagatgaaggcgatgatgggcggcgtggtcggcctgaattacctgctgcaggatgctggcccgaactacttcggccagcgcaacaccgacaagagctaccgcgtgctggccggcgcgcgtggcgacgtgggtgactggaactgggagaccgcgttcgccagcgccggtacgcactccaccacgtaccagacgatcaacgtcaacatcaagggcttcgaaaaggccttcggcccgtactcgatcgatccgaccacgggccgcgtgatcatctccgaccacccggcgtacaagttcggcgagatcagcgaagccaacgctgcgctgatccgtgaagcgttcccgaccttcgacatccagtcgtggacgcgcctgcacaccctggacggcaagatcgaaggcccgctgttccagctgccggccggtgagatgcgcgccgcgttcggcttcaacgccagccgcgaaaccttctacaccccgggcaacgccgatgcagccaatggcctgatttcccagcagggcggctcgtggttcgacggcaagcgcaacacttacgcgctgttcgccgagaccgtggcaccgatcaccgacaagctggaactggatgccgcggtgcgcgtggacaagtacccgaacttcagtgccaacatcgcgccgaagatcggcttcaagtaccaggcattcgaccagctgatgctgcgcggtacgtactccaccggcttccgtgcaccgagcctggccgagtccggcaatggtggcgtgttcgctcagctcggcggcttccgtgacgagctgcgctgcaacgagaccaacgccatcgccaacctgttgctgaagtcgcagcggccgggtgatgtcgatctcggcaagaccctgctcaacgtcgactgcagccgcaccgtggcgcgcatgacccagccgaacaaggacctgaagccggagaaggcgaagatcgccaccctcggcttcgtctacgagccggcgagctggctgtcggtgtcggccgactactggttcatctaccgcaacaatgaaatcgtcgcgccggactatcgccgcatggaagacatcatctcgatgtcgcgctcgccgatcaccgacagcgaccgcgccaacctggcccagctggcggcgatgtgcgccgacccggccagcggcgtgagctgtccggcgaacctgccggggtactcggccggcaacgtggccagcgtggtgggccagtacaagaaccgcggcaagaccctgatcgacggcttcgacatcgatgcgcgcagccgcttctcgctgggcgactggggcaacctgaacatcggcctggccgccaccatcgccaaccgcaaccgcttctacatggatgccgagaacggctggtactacggcgatgtggtgggctactacaacaacccgcgcctgcgtgccacgctcaatgccgactggacctacaagcaggtgaccaccagcatgttcgtcaactacgtgggcggcaccaagtgggccaccgaccaggtcgatgaagtgagcaacaacaaggaaacctgcaccggcggctacctggccctgcagaagagcaagtgtgacggtgcaccgtcgtggtggaccgccaacatgagcgtcacctggcgcccggatgatgcgtggaacctgagcttcaccgtcaagaacctgttcaaccgcctgccgttctacgacccgaacagcttcttgggtgactccagtgactacgcaaccatcttcggccgtggttacagtgtgaccatcggctaccggttcaagtaa

SEQ ID NO: 529806 - DNA, 1356 bp, Stenotrophomonas maltophilia
atgaagcgtagggaattcatcgcggccagtgccgctgtcgccgccagcagtctgctgccgcagaccccggcctgggcacgcgggcgcaaggtgcgcctggccatgatcggtaccggcttgcgtggcctggtgctgctgaaggaactggtacgtcgcgacgacgtcgaagtggttgccgtctgcgatatcgagccgatcatgctcggtcgcgccgtggacatggtggccaaggccggcaagccagcgccgaagacctacggccaggaccgcgacaccaatgcgtggaagcgcctgctggagcagaagggcatcgatggcgtgatcatcgccacgccgtgggaataccacgcaccgatggcgatttccgcgatgcaggccggcgtggccgtgggctgcgaagtggtggccggcatcaccctgcaggaccactgggacgtgctgaagacccagctgagtaccggcaccccgtacatgctgctggagaacgtctgctaccgccgcgacgtgatggccgcgttgcagatggtgcgccagggcctgttcggcgaactggtgcacctgcaggccggctaccagcacgacctgcgcggcgtgaagttcaattccggcgacccgaaccagccgtacgacagcggcgtggaattcggtcccaagggctggagcgaagcacgctggcgcaccgagcattcggtggagcgcaacggcgagctgtatcccagccacggcatcggcccctgcgcgatgtacaccggcatcaaccgcggcaaccgcttcacccacatcaacgccttcgcgaccaaggcgcgcggactgcatgaatacaccgtggccaagagtggcggcgccacccaccccagcaccaaggtgaagttcaagctgggcgacatcgtcaccaccacgctggcctgcgagaacggcgagaccatcctgctgcagcacgatacctcgctgccgcgcccgtattcgatgggcttccgcgtgcagggcaccaagggtttgtggatggacgtgaaccattcgatccacatcgaaggccgcagcccgccgcaccagtgggaagagttcaagaagtaccaggacgagtacgagcacccgctgtggaagcagaatgccgacaccgccgccagcgccggccacggtggcatggactggttcgtcatccatgccttcgttgaagcactgaaggccaaggcaccgatgccgatcgacatctacgacgcggtgacctggagtgcgatcaccccgttgagcgagcagtcgatcgccaaaggtttccagacgctggagttcccggacttcaccgccggtgcgtggaagcagcgcaagccgatcttcgcgtttgacgggaagtactga

SEQ ID NO: 529807 - DNA, 135 bp, Stenotrophomonas maltophilia
atgttggaacgactgaagaccatttcgtgtgccgcactggcgatgatcgcgctggggagcttggctccttgggctgcgcaggcgcaggaggtgcagaagaagtgggagagctacctgtcgatgggccagccgtga

SEQ ID NO: 529808 - DNA, 201 bp, Stenotrophomonas maltophilia
atgactgatcttttcagggtggtagcaaatgctccacggaagatgtttcacgccgacatgatcgatacgtacgacacattcttctcgcaatgcgagatcgctcgagccgttgggctggcggcggtctccatctctagacgtgacctcaatcgcgcgaagatcgttttgcagaacgggttgcagatggtgctcagcatttag

SEQ ID NO: 529809 - DNA, 693 bp, Stenotrophomonas maltophilia
atgtctatggctggcgagtcgacccgcagtgaccccgatgtagaagattgggagtggaacaatatgagtgaagcgtccggtgttcgggcatcagccagtagtcccgatgggatgggcctacccaccagcgggcatctgatcggtttgtggtgcggcaagcgcagggggatccggggtgcccaagcaagaaacggcgtcaccatgccgaaggctggcatcttgcgtgcagcggtgctgctcttgccaatgctggggggctgcagcattcaccagtttcaacatacggaatggaagtcggactgggtagatgtttcgtccggtgcgattttccctggcaattcaacgaccctgccgcttgaccgcatttccacgcttgatcctgatagtgaagcagccattgcggagtggatgttgaagcattcgctggccgtggtatcggcatcagaggttgaagggaagatcggtccaatgccgttgagtgacctggagccagcgcccggggagagcgtctatttcgtcagggccgcttcggatgaaagtaggggcaagttcatcggctacgtcaacgacaagggacttctcatcatgtatggggtgatggggggctgcggtgagcagaagcaacgggtggttgccgtgagccttcgggagaagcccgccagcgttttcggtcgatgctcggcggcgctatag

SEQ ID NO: 529810 - DNA, 267 bp, Stenotrophomonas maltophilia
atggagcttgaagcgaaaagggtagttttcttttctcaacaggatgaacggctcttctttgagtggattggtcgaatcggctgcatcgggaatgtggtcggcagaggggatgtcatctatctacccctggatccagatgcggttctggaggaggaggcctgggaactggccgcactgttcaggaggtatcggattccactggtccagctgcaaatgctggaggcaggcaggtactctcgagcgctgcgggatgcgttgcgcgagtag

SEQ ID NO: 529811 - DNA, 471 bp, Stenotrophomonas maltophilia
atgggcagcatcgaggtcaccggcctagtcggtgacctgtccagcaccgacaagggcgcgctggccctggccgactatggcgcgattctcggtggcggcgtgctgcggcgcttctccatgggcatcgactacgatgccaaacgtctctatctggtgcccaacgctgaaagcacgcaggccgatgccttcgaccgcagcgggctgtggttgcaagccgagcacggtgcactgcgtgtggccgatgtggcgccgaccagcgctggtgcgcgcgcggggctacgaagggatgatcgcatcgtcatgatttcaggcgagccgattgccacgcggagactggcggactggcgtgcgctgctgcgtgagcgcccggttgggacgcgcgtgggcatccgttatctgcgcgatggccggcaggtggataccgagctggtgctggcggaccgggtggctgcgggatggcgtgccgattga

SEQ ID NO: 529812 - DNA, 1434 bp, Stenotrophomonas maltophilia
atgcgatggcaacggatgatgttcggcctgctgtggatgctggcggttcccgtgcaggctgcggtgggggatgcggcgagcgtgctggcccgggcccgtgcagccagtggcggcgagccgtggctgtcggtacagcgcctgcaggcggagggcgagcagtcggtgggcggcctgcacgggcgctggcagctcaaccaggacctgcgcgccgggcgctatgccgaacaggcgcaactgggagacttcaccgtcgcccaggggttcgacggccagctgtcctggcggcgcgactatggcggcgaggtcggcctgctggatggcagcgtgccacgtcggaccgcgcgcacgcaggcgtggctggccacccgcgcctactggtccagcgcctatccggcctcgcgctttgcgggccctcgcaccgaggcccacgacgggcagcgctatgacgtgctgtcgacgacgccggagggcgcggacccgatcgaactctggttcgacacccgcagcggcctgctcggccgggtggtcatcgcctccgcgcgcacccccaccgccaccacgctggaagactaccgggcggtcgatggcctgctgctgccccatcgcctcatcaccgatacgctcgatgcccagggccgtgctgatccgcgactgcgcagcgacgtgcaggtgcagcgctaccgggtggatttccccgtgccggatgtactgtatgcaccaccagcgatggccgacgacagctacatcgaggatgccagcggcaccacccgtgtcccgttcgacctgatcaacaaccatgtctacatcgaggccgaagtggacggccagccggcgcgcttcctggtggacaccggcgccatcaacctgctgacaccgatcgccgccaaacgcctgggactgaccacagcgggccgcctgagcgtgcatggtgccggcgacaacgccagcgacctgggcctggcacaggcccgccacgtgcgcatcggtggcgcgcaccttgcaaacccggtgttccacatcatcgacctcggccagcagatcaactcgatgggcgtgccacacgatggcttcatcggctacgaaaccttcctgcgcttcgtcaccaccttcgactatggcgcgcgtgtgctcagcttcacccggccaggccactaccagccacccgccaacgcggtggtgctgccgttcgagcaggatgaccgcgcaccggtactgaatggcgaactggacggcatcccgctgcggttgtggctggacaccggctcacgcaactcgctgagcctgagcagcccgttcgtgcgtaccatggtctgttggagaagtaccacgccagtgaggaggcggtgcttgggtggggcctcggaggcccgggccgcgcgcgaccggcccggctcggtgtgctgcgcatgggcagcatcgaggtcaccggcctag

SEQ ID NO: 529813 - DNA, 1128 bp, Stenotrophomonas maltophilia
atgacgccaccggatctgctgcagctggcggcaggcgctgcgattctgggcctggccgccttgtcaaccggagtgagcttcggccgcgctcggcgtggcagtcatctgctcaccatcttcttcgcctgtttcgccgccgccaatctgttcggactggtgctgttgggtggccaggcctggctctcggccgacgcggtgcgctggctgcgggtcatcgaagtgccgctggtctatctgctcggtccgctgctgtatggccatgcgcgtgcgctgctgttgcccgcaccgggccacacttcgttgctgccgctcgcgcatctgctgccggccatgctcgcgttcgtcgtttccctgttgaacgctgttgcgcctttcgacgtctcgccgctgggcaaggcgctgttccagctcagcttccatggctggctgctgcagggcacgccctacctgctggccacgctgtggctgtcgctgcgtacgtcttcggccccgcgcggaaccgcgatccaacgcagcggactgcgcgggctggcgatcgtgatgacaggctgctggcttgccagcgcgatgaaccgatggccgccgcacgccgctccgctgctggccagcatcgggctcagcctgctgaccaccgccggcatgtatctgctggcctgccgcgtggtgcggcagcagctgcgcgcgcctgtgaatgccgccgcaccgggcgtggggaatctcatccccgcgcccatcgaggacgtcgccgtcgcacgctacgagcgctcgggcatcgacgccgcgcagtgcgcggccatcgccagcgcgctgaccgcattgatgcgggacgaacgcctgcatgaagcgcccgggctggaccttcagtccctcagccagcgcagcgggtggtcacccaaccaggtctcgcaggcgctcaaccagggcctcggccagagcttttccgagttcgtgaacagcttccgcgtcgctgccgcgagggcatgcctgtccgatccgtccgacctccgcagcgtgctggacatcggcctggccgccggcttcggcagcaagtcgaccttcaacagcgcgttcaagcgcgccaccgggcagacaccgagcgagtaccgccgcctcaccacgtccgactga

SEQ ID NO: 529814 - DNA, 894 bp, Stenotrophomonas maltophilia
atggctgatacccccctcacttcgccgcagtcgccggcgacgccgcgttggcggcattactggagtctgatgcgcgctgatcgcccgatcggcacgttgctgctgctgtggcccacctggtgggcattgtggctggccgcgggcggcctgccgccgctgtggacgctgttcgtgttcaccgccggcgtgtggctgacccgctcggccggttgcgtcatcaacgactacgccgaccgctggctcgacccgcatgtggaacgcaccaaggcgcgtccgctggccaccggcgcaatcagcggccgtgccgcgctggcactgtttgccgtgctgatgctggtggcgttcggcctggtgctgaccctgaacgggttgaccatcggcctcagtttcatcggcgtgttcctggccgccagctatccgtacctgaagcgctacacccatctgccgcaggtctacctgggcatgtcgttcggctggggcatcccgatggcgttcgccgccgtgcagggcgaggtgccgatgctgggctggctgctgtatgccggcaacatcctgtggtccaccgcctacgacacctggtatgccatggtcgaccgcgaagacgacctgaagatgggctcgcactccaccgcgatcctgttcggtgatctcgacctggtcatccagggcgtgttgtacgcgctgttcctggccaccatggcgctggtcggcgtgcgtggcgggctgggcgggtactatctggccggcgtggccgtcgccaccgcgctggtggtgtacgagttctggatctgccgccaccgcgaacgcggcccgtgcttcaaggcgttcctgcacaacaactgggtgggtgccgcgctgtttgccggtatcgcagtggacctggcgctgcgttga

SEQ ID NO: 529815 - DNA, 1425 bp, Stenotrophomonas maltophilia
atggcctcgacggcagcagtacaggacggctggatggcgcgtgcagcattgcgctcggccgcctgggcggaaaagtggttccccgacgcgtatgtgttcgcggtgctgggcgtggtcattgtcgcgctggccgcgatgggcttcggctcgaccccgcaggccaccgccagcgccttcggtgacggcttctggagcctgattcccttcaccatgcagatggccttcgtggtcatcggtggctacgccgtggccaccgcgccggtggtcgcgcgcttcatcgacttcctggcccgggtgccgcgcactggccgtggtgcggtggtgtacgtgggcctggtcagcatgctcgcctcgctgctcagctggggtttctcgctggtgttcggcggtctgctggtgcgcgcgctggcccgccgtaccgaactgcgcatggactaccgcgcggccggtgcgtcggcgtatctcggtctgggtgcggtgtgggcgatggggctgagctcatcggccgcacaactgcaggccaacccggccagcatgccgccggggctggtggagatcaccggcgtgctgccgttcaccgaaaccatcttcctgtggcagtcgatcgcgctgacctcggtactgatcctggcctcgctgctgattgcctggttgaccgcacccgccgccggcagcgcccgcaccgccgaggagttccccggcgctgcgcaggccgagccggagccgctgcagcgacgcacgcgcccgggcgaatggctggaatacagcccgttgctgaccgtgctgctctcgctgctggcgttcggctggctgttcaacgagttcgccaacaagccggtgatcacggcgatcgccaacctcaatacctacaacttcctgttcatttcgctgggcctgctgctgcactggcgcccgcgcagcttcctcaacgcggtggccaaggcggtgccgagcaccaccggcgtactgatccagttcccgctgtacggcggcatcgcgatgatcctcacccacgccgctggcggtgacggtcagaccctggcgcaccggctgtcgagcctgttcgtgcacgtggccagcaccgattcgttcgcgctggtgatgggcgtctactcggcggtgctgggcttcttcgtgccgtccggtggcggcaagtggatcatcgaggcgccgtacgtgatgcaggccgccaacgaactgaaggcgcacctgggctgggcggtgcaggtctacaacgcggccgaagcgctgccgaacctgatcaacccgttctggatgctgccgctgctgggcgtgctgggcctgaaggcgcgcgacatcgtggggttcaccttcatccagctgctggtgcatatcccgctggtgctgggcctgctgtggctgctgggcatgaccctggcgtatgtgccgccggtgatgccctga

SEQ ID NO: 529816 - DNA, 159 bp, Stenotrophomonas maltophilia
atggcacagcagaaccagaacccgaaccagaagcaaccgggtcagcagaatcagcaggaccagcagcagggacgccgtgaccagcagcagcaacagcagcaggatcagcagcgcaaagagcgcaaccagcagcagggcggccacgacgaagaagaatga

SEQ ID NO: 529817 - DNA, 627 bp, Stenotrophomonas maltophilia
atgcgtcgcctcctgctcctgatcggcctgctgctgcccgccctgtggccagcggtggcgatggccgtcgatgtccacgagggcgatctgctgttcgtcaccgccggccgcagcgggctcagcgccgccatcgacgatgccaccggcaagcagggcgcacccagcttcgatcacgtggccctggtcgccgcggcgtcaaacggctgggaggtactgcatgcggacgagaagggatcgcgccggcaatcgctggtcgagttccgccaggatgcccgggccaagcagcggcagatcgtgatctatcgcctgcgcgcaccgcagcaggcaacgatcaaggatgcggtcgccaccgcgcgcacgatgctcggcaaaccgtacaacacgtcatacgtgttgaacgaagacagctactactgctcggacttcatcgaacgcgcgttccgtgcgcaccacgtgttcgcactgcagccgatgaacttccgcaacccgcagaccgggcagatcgcacagcactgggtcgatctttaccgcggcatgggcatggaggtgccacaggaccagcccgggaccaatcccaacgacatgtcggcggcgccggtcctgcagcgcatcggcgtgctggaataa

SEQ ID NO: 529818 - DNA, 513 bp, Stenotrophomonas maltophilia
atgcgtcgaaaccgttccgctgccgtgctggtgcttgcctgtggcgtggcgctggttgcctgcacgcccgagccccaggcgacgcccgcggaagccgcacctgcacatcccgcgccgtcgtccacgacggcagcggtccagcacgcaccggtgcctgccagcggtgaatgcccctatccgcagttcgatgcgttcctgaagcacttcggcaacgagatcacgctgcaggaaaaggccactgccgatccgctgctggacagctacatcgatgccgaggccgagccggaaccgcgcaaggtggaaagccgactggcgctggccgatgtcgagtggccggtgatgcccgatcccgccgcgttggccgggcagggccgtgagatgcaggtcagcacgctggccgatgggcaacgacaggtacagatccgcacgccggacagcagcgaccagcagacctacaccttcgcgcagtcgccctgctggacgctggtcaagcgtgaggatgagtcgatctga

SEQ ID NO: 529819 - DNA, 1848 bp, Stenotrophomonas maltophilia
atgcaggctcgcaggatgcgtaccatcaccgccaccatggccgtcgtgctggcgatggcgcccttcaccggcgcccaggcgcagtcgctgcgggccgacgatcgcgcctacttcgccagtgccaccgccgaacaggccgcgcgtgacgaacttggcaagcgtgtcgaggccctgcagcaggcatccacccttgcgccggcggagcgcttccatcaggccgaagtgctggaggcgcagtgcctgcgccatcacagctatctgcatctgcaggccgcccgcaacgcgcgcgatcttcgcccggcgcaggcgctggatcaggtgatggggctgtgcagccgcatcgcccgcactggtcgcgcggcgctgcgcgaagcgcctgcaggcgcggcgtgggcagcaccgtatgccttcctgcgcgcgcgtgcgctgaaggaagctgcagccccggccaataccgcactggatgaggccgtggaggcgctggccgatccggcgctggacagtttcgcgcggctgcgtgggcagatcctgcgcagtgccgagtacccgcagatcgagcgtgatggtcggcactgggacaccgggcacgacaagcaggcactggcccagcagcaggaccgcgcgttgcgggaagcgggctggaagggttactggcagggccttcactcgcgccgtgagccgatggcctcggtgctgctgggcctggtgcaggtgaacgatgccgccgcgcgcctgcagggcgatggctccgcaccggcgcggggctaccagcggatgggcctggatgcatcggcggtggatgcgacgctgcaggcgatcgaacgccatgcaggggatcgtcgcgcctaccaggacatgctgctgcaccacgctgcgcgctccggcatcgacgcgccgcagatctgggataccaccgtgcccgataccggttacacgccaccggtgctgacgctggcgcagttgcgcgacaatgccgccgatgccatgcagcaccttggcccgacgtatgttgccgagctgcgcgcgctgctcgatccggtcaaccagcgcatggacctggccaccgagcaaggcaatcgcagccatgatgcgttcgcagtgaatgctcctggcgcgccggcgatgctgtacgtcggggtgcgcaggggggatctggaaagcgatgttgaaatcgcccacgaagctggtcatgccatgcacggtgagtggatgcagcgcggccatgcgtcgccgctgcagcgcaatggcagccagtggctgaccgaggcgttcgcgatctacaacgagctgcgcttccgcgaccagctgtaccagcaggcacaggacccgcgcgccaaggcctactacctgaaatcgctgctggacgacatggtgctgcagctgttcacctcgtccgaggaagcgcagctggagcagtcgatctatcggggcgtggccgcgggcaccttgggcaccgccgatgatctggacgcgctgaccggccaggtgctggcgcgcttcggtcaggatccggagcgctatccgcaactgcgcaacagctggatcggcaagcgcttgatgtttgaagatccgaactatctggtgaactacctctatgcagggctgctggcagtgcagctctatgtgcaggaccagcgcgaccccgaagggttccgtgagcgctatcttgccgtgctgggcgaaggcttcgaccgcgcgccgaccgagcaggtgacgcagctgttggggcacgcgcccgactggccggcattggtcgatgccgatctgcaggtgttcaaccagacggcggcgcagctgcaggcgctgcatgcgcaggttgaagcggggcagggtgtgcgcacgcggtag

SEQ ID NO: 529820 - DNA, 672 bp, Stenotrophomonas maltophilia
atgcgcctgcttcacctcaccctgccggtgtccgacgtcaccaccgtcgccgcgtatttccacgatgtgctgcagcagcgcgtggtcggcaatcatgtgcacatcggctggagcacgatcgaactgcagcctgcggctgggcgtccggtcggaggcgtgcacctggccttcaacgtgccggacaaccgcttcagcgaggcgatggcctggctgctcgagcgtacgccactacagcgcaacccggcaggactggattacttcgcgctggaaagcagctggcagtcgcagtcggtgtacttcaccggcccggacggcctgatcctggaactgatcggccgccgccgcctgccagccagtgcgcgcgaaggcgttttccatggcagcgagctgacctgcctgagcgaagtcggcctgcccagccacgatgtcgatgcggtgcgcgaacagtcctgtcaacgtttcggcctgcaaccgatcagcccggcttcgccgcagttcgcaccgatgggcgacgacgagggtctgctgatcgtggttgcggcggatcgtcgctggttccccgagcagaaggacctgccgaatgcgcagggactgttgctgcgtgtgggtgacgtcgccggcaccggcgaactccgcgacgatgccttgggctggcgggttttctcgacctga

SEQ ID NO: 529821 - DNA, 1080 bp, Stenotrophomonas maltophilia; identical to SEQ ID NO: 514885

SEQ ID NO: 529822 - DNA, 828 bp, Stenotrophomonas maltophilia
atgagcgcggcaggcaaggcgttgtggtacatcgaaacccatgcggaccggccattggcgctggccgatatcgccgccgtagcggggctgtcgccgttccatctgtcacgcctgttccaggcccgcaccggcacctcggtggtgcgctatctgcggggacggcgcctgaccgctgctgcgcagcggttggccaacggggccggtgacatcctgcaggtcgcgctgggcgcgggctacaccacccatgcggcgttcacccgcgccttcagcgaacagttcgggcagacgccggagcgcgtacgcgaacagggcaccgatggactggcgctggtacaggcgatccgcgtggaggatgcgccggctgcctgcggtgaggcgccgcgactgctcgacacgcccgctttccaggtggcgggcatcggtatgcggcatacccgcgacagtggcggtgcgattcccggccaatgggcgcagctcaaccgcgaatggccgacgccggcaccgatcagtttcggtgtgtgctgcaacagcgacgacgatggcggctttgattacatcgccgcactgcccgccagcacgctgccgaccgtgccggcgcactggcaacgagtggacgtgccggcgcgtcgctatcttgtggcctggcacggcggacatatctcgaccatccgctcgacctggttctggctgctggatcattacctgcccagctccggcctcagcctggccgatgcaccagacctggaacgctacgacacccgcttcgacgagcacaccggcaacggcggcgtggagatctggctgccggtggacgaacgcccacgctga

SEQ ID NO: 529823 - DNA, 387 bp, Stenotrophomonas maltophilia
atgatggaactggtacttgtctacctggtgctgcccgcggtgctgacactggccttgctggtgctgatggtgaagcgcgcgtcgcgctggaagggcaatccctggctttatcgcgccggcttcgcgttcctggccgggttgctgtcacccacgttgctgatgggcggtcacggtgggcttcccggcccgaccatcggtgggctggtgatggtgctgacgcggttggaatggatcggtgacctgcgtgccagcttcatcgggtttggcagcaaagacttcgggttcctgtccgctcccttcctggtggtgttcgccctcgcgatgtttgttccgctgcgaacggcacggccggcccgcttcggtttcgacgacgacagcaacggctga

SEQ ID NO: 529824 - DNA, 2358 bp, Stenotrophomonas maltophilia
atggccagcgcaggaggcgcgatcgcagcggaggccgatgcggtcgatgccgcaggcggcagccgcgccgcacccacccagctcgacgcgatgctggtcaccggcacccgtgcctccaaccgcacccagttcgaaacgctggcgccggtggacgtgttcaccaaggaagacatcaagtcggtggaatccaccgacctgaaggacgtactggcccagctggtgccgtcgttcgtggtgcagcgcctgccgatggcggacggccaggtgttcgtgcgcccggccacgctgcgtggcctgtcgccggaccagaccctggtgctggtcaacggtcgtcgcttccaccgcagcgcgctgctcggcaaccgtggtgcacaggccgctgatctggcacagattcccaccagtgcgatcaagcgcatcgaggtgctgcgtgatggtgcgtcggcgcaatacggctcggacgccatcgccggtgtcatcaacatcatcctcgaggatggtccgggcaccgagatcaccgccggctattcgcagtacgcacagggcgatggcgcgtcgcgtgatttcagcgcacgtaccggctggtcgctgggtgactacggcagcctggtgctgttcgccgaatcgtcgaattccgacgccacctcgcgcacccgccagcgcccggatgcgatcgccttccaggccgcgcatccggatctggatgtgcccaatccggtacagcgctggggccagccggaactggaaagccgccgcgtcggcttcaatgtgaaggccaatgccagcgacacgctggagctgtatgcgctcggcctgtacagccacagcgatggcgtcagcgatttcaactggcgcaacccggacaccaccaccggcgcgtatcgcaccaccgccatcttcccgggctggaacctgcgctcgctgtatccggtcggcttcagcccgcagtacggcaacgtccagaacgacctgcaactggtcggtggcctgcgtggcgagatcaccccgaagctgcgctgggatgtcagcgcgtcgtatggccgcaacgccatcgactacaccctgaagaactcgatcaatgcctcgctcggcccggccagcccgaccgacttcgatcttggccgcctgacccagaccgagaagaacgccaacgccgacttcaactacgagtgggaggtgggcgcgctgtccaagccgatcaacgtcgccttcggtggcgagttccgccaggagacctaccaggtgcgtgccggtgatccggcctcgtacgcggtgggcccgggcgcggccgcgggcctggaggccaactccaacggtgcaccgggcttctcggccagccaggccgggcagtggagccagcgcagcaaggcggcctacgtggatatggaagtgccgctgggcgagcgctggagcatcggtgcggccagccgttacgaggacttctccagcttcggcagcacgctggacggcaagctctcggcgcgatttgcgatcaccccggacgtggccctgcgcggcaccgtgtctaccggcttccgtgcaccgaccccggcgcagctcaacaccaccagcaccacccagggcctggatacgcgcaccctgcagatcttcaccagtggccgcctgtcgccgaacgacccgctggcgcagatgctcggtgccaggccactgaagccggaagaatcgcgtaccgcgtcgctgggcctgacctggcgcactgacctcggcctgtccggctcggtggatgtctaccagatcaagctcaccgaccgcttcagccagtcggccagctttgccattccggcaggcacgccgaatccgctgggctatacctcggtgaactacttcaccaacgatttcgataccaccaccaccggcgtggacgtggtcggcaactacctgcgcgacctcggcgcgggccgcatgacgctgaccctggcctacaactacaaccgtacccgtgtggacaacggcagcacctcggtggccaccaacgaaacccagcgcgtgctgttcgaagaccgcctgcccgagcacaagggcagcctcaccggtagctgggatatcggtgcctggtcgctgatggcgcgcatgcgctactacggtgcctggaccgattccagcggcaatgcagtgggcgatatctaccagcgtttcggtgcgatgagcttcctcgacctggccgtcggctatcgcatcaacgaacaccacagcctgcgcgtgggcgcggacaacgtgttcgaccgctatccggacgaagcgaccttccaggccagccgcggcctggtctactcgcgcaacgcgccgtacgacaccgacggtgccaacctgtatgcacagtaccggctgagcttctga

SEQ ID NO: 529825 - DNA, 1302 bp, Stenotrophomonas maltophilia
atggaccgcaaccgccgctccctgctgcgcgccggtgcactgctgccggttgcagccgcgctgtcttcactgcccgccatggccgccacgcgttacgctgcgcccatgcagattcccgcaacgaccgtagcgccggacgtgctggcccgcgatgaaggctactggaccgccgtcgccagccacttcgacatcaccgacgaagtgaaccatctggagaacggctactggggggcgatgggccgcgaaacgctggccagctaccagcggcacaccgccgaggtgaaccgtggcaacgcgtggtatggccgtcgcgagtttccggcgcagtacatggcggtgcagcggcaggtggccgagttgctgggcgtgggcgccgacgagatcgcactgacccgtggcgccaccgaggcgatgctggcgctgatcggtggctacaaccgcctgcagcccggcgaccaggtgctctacgccgacatcgactacgacagcatgatcggcgcgatgcgctggctgcagcagcgtcgcggcgtgcaggtcgagcgcatcgcgctgccggccgtgcccgaccacgcgcagatcctgcaggcctacgaggccgcattcgagcggctgccacgcctgaaactggtgctgctgacacaggtcagccatcgccatgggctggtgctgccggtagcggagatcgccgagcgtgcgcgtgcgcgcggcatcgatgtgatcgttgatgcggcccatgggtttggccagatcgactacgtggtgccgcagctgaaggccgatttcgtcggcatcaacctgcacaagtggatcggtgcgccggtcggtgtcggcgcgatgttcgtgcgcaaggggcgcgtggccgacctggatccctacatgggcgaaaccgacgatggccgggtgggcagccgtgtgcataccggtacggtcaacttcgccgcctacctggcactgccggacgccattgccctgcatcagcgcatcggcgtggccaacaagcaggcgcgcctgcgctacctgcgtgagcgctggaccgtgccggcgcggcagatggcacatatcgaagtgctgtcctcgccggacccggcgctggccagtgcgctggccagcttccgcctgcgcgggcgcaccagcgtggctgacaacctcgcgctgcagaagcgcctgctggatgagcatcgcgtgttcaccacccatcgcgatggcttggactccggcgcctgcgtgcgggtgacgccgtcggtgttcacccggccggagcagatggatgccctcgtgcaggcgctcgtggcattgacctga

SEQ ID NO: 529826 - DNA, 1515 bp, Stenotrophomonas maltophilia
atgacatcactgatgctggccggtgcggccgctgcaaacaacaacggcggtcacctgtccgaaccgaccgatggttatggacaggctcccgccgttggaagcaacgatacgccccgacatgctccgtacatgccgcgaccggatgtcgcagcccgcgaatgggtgcaggacgtgctcgcgcacaacgggccgatctatctgcgcatcgtcaattcgctggaacgcacggtgcgccgcggtggtcttgcaccggggcaacgcctgccctcgcagcgcgcgttggcgcagcagcttggcgtcgatctgaccacggtgacgcgggcgtttgatgaagcacgcaagcgcggcctgatcgaggcgcgtggtccgcagggcagtttcatcgcaccgcccaaggccggcttcgaccaggtggtggacctgagcatgaacgtgccgccggtgcccgacgccgatgcgctggccgagaccctgcgccgcggtgccgccgccgtgcttgcgcgcagcaacgcaccgaacctgatgacctaccatctgggtggcggcaacccgaccgaccgccacgcggcagcgcgctggctgcagccgatgctgggcgcggtggacgatgccagcctgttgctgaccgaaggcgcgcaggtggcgttggccgccatcctggtcagccagggtcgcgatggcgacgcgatcctgtgcgacacgctggtctacccggggctgctgcaggccgcgggggccctcggccggcggcttgtaccggtggaatgcgatgagcacggcatgtgccccgaggcgctggtgcggcaggctcgcgggagtggcgcgcggttggtctatctcaatcccacctgccagaacccaaccgcgctgaccctgtcgttgcagcggcgcgaagcgctggcacgtgtgctggaatgcgaaggcctgctggcgatcgaagacgatccgtactggcaccttgccgaagagacgccgataccgctggcaacgctggcaccgcgtcatgtgttccacgtggcgacgctgtcgaaggtgatcagccccggcctgcgcaccgccttcgtgcgctgcccaagcgccgcgcatgccgaggcgatggtgtcggccctgcgcgccacccggttgatggggcatccgctggtggcggcgctggcaagccagctgctgctggatggttcggcacagtcactgctggcgcaggtgcgcaccgaggcacgcgagcgcatgcgcatggcgcggtatctgctggcgccgtcgctgctgcagcgtgccgagggcctgcatgcctggtgccgggtaccggcgccgtggaccgatgccacgctggtgcgtaccgcacagctgcagggcctggcgatcgcaccgtcatcggcgttctgcccgccgggggtagtgcatcagaacggcgtgcggttgtcgttggggctggcggcggaccgccggcagctggaaagtgcgctgcggcggattgaccgcttgttgttgtcggatgcgttgccggcgatcgagcggtag

SEQ ID NO: 529827 - DNA, 600 bp, Stenotrophomonas maltophilia
atgggcgcagctgcgccgcgtcgccgctggctgctgcggacgatgatcgccctcgcctgcctgttcatggccggcgtcgcggctgcgctgtggcagtacttcggctacagcgcgcagtccaccttcaccgagcaggccatcgtcttcgacgactcgcagctgcgcctgccggccgatctcgccggtgacaccggccgcatccgcgtggtgcatttctgggacccggcctgcgccgtgtgcaaccgcgagaccggtgcgcacctgagctacctgatcagcatgtaccgccgcgccggcatcgacttctatgcgatccgccgcccgggtacccagggcgagctgcccgcgccgctgcgcaacaaggtgatcaacctgccgaccatcgatggcatcgaatacatcccggccagccctgctgtcgctatctgggaccggcagggccatctggcctacgccggcccttacagcatcggcatggtctgcaactcagccaacagcttcgtcgaaccactgctggacaaactggtgcgcggcgaaaccgtgcgcccgaaaggactgcttgccgtgggctgctactgcccctggcaggccaagcgctga

SEQ ID NO: 529828 - DNA, 261 bp, Stenotrophomonas maltophilia
atgcgcgccgagaaactgaagttccacctggtgatggccggctgtggcggctttgtggtgctgatgctggctgcgctggcctgggtctgcctgcagccgcagaccgtggacgtgcaggccgccgagcgccacgccatcgaacagtgcgtgcagcgcagcgaggatccatcgcgtagcgagatccagcgccgcgcacaggccgattcctgccgtgagatgcgcaagcagtacgtgcacaagttcggccgggaagattcctga

SEQ ID NO: 529829 - DNA, 1416 bp, Stenotrophomonas maltophilia
atgacgccacctgccgccggccgccgcctgaagcaccccaatcgcacctgggttcgcccgttccgcgagggcgccggcccgctgtacctgcagattgcccagcaggtgcgcgaggcggtggacgatggggtgctgcgcccgggcgaccgcctgccgccgcagcgcgacctggcccagcaggtgggcgtggacctgaccacggtcacccgcgccttcgccgagctgcgccaggccggcctgctcgatgcgcagggcgccggcggtaccttcatcgcactgtcggccggcaaccgcagcacctcggtcgacctgagcatgaacatcccgccgctgctgggcagcgcgccgttcgcgcagggcatggaggccggtctccagcacgtcggccagcagctgggccagggcgaactgatgagctaccacgtcggtgccggcacccgcgaggaccgcgccgccgccgtgcagtggctggcgccgatgctgggcacggtcggcgccgaccaggtggtgatctgccccggcgcgcagaccgcgctgtgcgcgctgatcctggcccgcacccagccgggcgagctgatcgccgccgagcagctgacctacccgggcctgctggccgccgcgcgcgtgctgcagcggggcgtggtgccggtggcgatggacgccgaaggcatgctgcctgaagcgctggaagaggcctgccagctgcgtcgcccgcgcctgctgtacctggtgccgaccatccagaacccgaccacggcgacgatgtcggcacagcgtcggcaggcgctgctggcggtcgcgaagcgccacgacctgaccgtgatcgaagacgatccctactggttgctggccggagacgccgcgccgccgctggccgcacaccgcgatgcgggctgcccggtctattacatctccaccctgtccaagtgcctggcaccgggcctgcgcaccgcctacctggtggtgccggccggcgaaccgatggaaccggtgctggacgcgctgcgtgcgatcgcgctgatgccgacgcagtcgatggtggcggtggcctcgcaatggatccgcagcggccaggccgaggacatggtgcggcgcttccaacaggagctgcgcgagcgccaggcgattgccgcccgttacctgccggcccgtgcccaggcgcatccggccggcctgcatgtgtggctgccactgccgccgcggctggaccagtaccggctgatccaggccgcacaggaacaggggctgggcatcgccagctccgatgccttcagcgtggaagagccaccgccgggcaacgcgatccgcctgtcgctgggcggcgcggtcgaccagggcgcgctggccggggcgctggccaagctgaacgagatcctgtccgaggcccccgaggcacggcacaacgccatcgtctga

SEQ ID NO: 529830 - DNA, 906 bp, Stenotrophomonas maltophilia
atgaatatctgctggaaccgcatccgcctggcgctggtcgccctggcctgcgtcggcctgtcgggctgtgactgggtgctgctggattcgaagggcatggtcgggctcgcccagcgcgacctgatcctgatctgcatcggcgtgatgctgatcgtggtgataccggccatcgtgctgaccttcgtgttcgcctggcgcttccgtgccggcaacaccaaagcgaaatacacgccggactggtcgcactccaccaaggtggagatcgtggtctggggcgtgccgctgctgatcatcgccggtctggcggtgatcgtgtggaagtcgacccacgagctggacccgtacaagccgctggacgtggccggtgaaccgctgcacgtggacgtgatcgccaccgactggaagtgggtgttcgtatacccggacctgggcatcgccacggtcaaccagctcaacttcccggccaaccgcccgctggcgttcaacatcacctccaactcgacgatgaataccttcttcatcccgcagctgggtgggcagatctacgcgatggccggcatgcgcacgcagctgcacctgatcgccaacgagcccggccagttccgtggcatgtccggcaactacagcgggcatggcttctcgaacatgaagttcatcgccaccgccagcagcaacgaagagttcgagcgctgggtggccgaggtgcgcagcgcaccacaggcgctggatttcaaccagttcaaggcgctggccgcaccgtcgaagaacgcaccggtgcagcacttctccagcgtcgaaccgctgctgttcaagaaggtcatcgaccagttcatcggcgtcggtgagaacaccgctgctgctaccccggcgggtgctgccggcggtgcccaggtttcccaggagtaa

SEQ ID NO: 529831 - DNA, 1977 bp, Stenotrophomonas maltophilia
atgttgggtaaattgacgtgggaggccgtgccgctgcacgagccgatcgtcgtggtcacactggcggccatggtgctgggtggcctcgcgctgctcggcgcggtgacgtacttcaagctgtggggcccgctgtggcgtgactggttcaccaccgtggaccacaagaagatcggcatcatgtacgtggtggtggcgctggtcatgctggtgcgtggcttcgccgacgcgctgatgatgcgcgcgcagctcgccgcggccgggccgggcagtgacggcttcctgccgccggagcactacgaccagatcttcaccgcgcatggcgtgatcatgatcttcttcgtggccaccccgttcgtggtcggactgatgaacatcatcgtgccgctgcagatcggcgcacgcgacatggcgttcccgttcctcaacgctttcagcttctggatcttcgtggtcggcgccgcgctgatgatgatctcgctgggcgttggcgaattcgccatgaccggctgggtggcctatccgccgctgtcgggcatcgagttcagtccaggggtcggtgtcgattactacatctgggcgttgcaggcttcgggcatcggcacattgctgaccggcgtcaacctgttcatcaccatcctgcgcatgcgtgcgccgggcatgaccctgatgaagatgccggtgttcacctggaccgtgctggtcaccagcgtgatcatcatcgccgccttcccgatcctgaccgtggcgctgggtgcgctcaccctggaccgctacctggacttcaacttctacaccaacacattgggtggcaacccgatgatgtacgtgaacctggtgtgggcctggggccatccggaggtgtacatcctggtgctgccggcgttcggcatcttctctgaagtcaccgccacgttcgcgcgcaagaagctgttcggctacaagtcgatggtcggtgccacgctggcgatcggcatcctgtcgttcatcgtctggctgcaccacttcttcaccatgggttccggtgccagcgtcaatgccttcttcggcatcatgacgatgatcatcgccattcccaccggcgtgaagatcttcacctggctgttcaccatgtacggcggccgcgtcgagttcagcgtgccgatgctgtggaccatcgcattcctggtcaccttcaccatcggtggcatgaccggcgtgctgctggccatcccgggcgcggacttcctgctgcacaacagcctgttcctggtcgcgcacttccacaacaccatcatcggcggcgcgctgttcggctacctggccggtttcgcctactggttcccgaaggtgttcggcttcaccctcaacgagcgcctgggcaagtggtcgttcgcctgctgggtgatcggcttctacctggccttcatgccgctgtacatgctcggcttcatgggcatgacccgccgcatgaaccagtacgacaacccggcgtggacgccgtacctgatcgccgccttcatcggtgcactgttcgtgttcgcgggcatcatcctgatgctggtgcagatctacgtgagcgtgcgcgaccgcaagcgcaacctggacctgaccggcgacccgtggaatgcacgcacgctggaatgggccacgccgtcgccgccgccgttctacaacttcgccgtggtgcccaaggccgatgagctggatgccttccacgaagcgaagaagcgtggcctgccgccgccgccgaagaagtacgcgccgatccacatgccgaagaacacgggcgtgccactgatcctcaatatctggatcctggtgttgtgcttcgctctggtctggcacatctggtggatggccgcggccagcttcatcgcgatgatcgtcaccctgatcgtgcggtcctacgacgaggacgtggactactacgtcagttccgaagaggtggcgcgcaccgaagcggccagcctggccaagttgaaggaggtacgcgcatga

SEQ ID NO: 529832 - DNA, 636 bp, Stenotrophomonas maltophilia
atgaacctgttgacccgcccggagctggccagcgacacgcaggcgcaagaggaccaccacgaacacgaccatggccacgaacagggcggcatgaaggtgttcggcatgtgggtctacctcatgtccgacctggtgctgttcggttcgctgttcgcctcgtacgcggtgctcagcaccgcctacgccggcggccccaccggcaaggagctgttctcgctgccgttcgtgatggccgagaccttcctgctgctggtctccagcatcacctacggccaggccgtgctggcgatgcatcgccacgacacctcggcagtgctgcgctggctgggcgtgaccttcgtgctcggtgcctcgttcatcggcatggagatctacgagttctcgcacctgatccacgaaggcgcgggcccgagcaccagcgcctacctgtcggcgttcttcgcgctggtcgccacccacggcctgcacgtggccagcggcctgatctggatggcggtggtcatgcaccaggtctaccgccgtggcctgaccccgaccaacatcacccgcgtgtcgtgcctgagcctgttctggcacttcctggacctggtgtggatctgcgtcttcaccttcgtctacctgatcggagccttctga

SEQ ID NO: 529833 - DNA, 333 bp, Stenotrophomonas maltophilia
atggcccacatcgaaacctcgcgcgccggcaatgcgcacggttccaccaagtcctacctgatcggcttcgtgctgtgcgcgctgctgaccgtggtgccgttcgcactggtgatgaacccggtgctgtcgcggccgctcacgctgttcctgctggtcggcttcgcggtggcgcagatcctggtgcagctggtctatttcctgcacatggaccgcaagtccgaaggcggctggaacctggccagcttcgtgttcaccctggtgatcctgttcatcgtcgtcgcactgtcggtctggatcatctggagcatgcactaccacatgatgatcaactga

SEQ ID NO: 529834 - DNA, 681 bp, Stenotrophomonas maltophilia
gtgaaaggcattgcgttcccccaacgtggcctgcggctggccgcaggcctgctgctcggcctgctggccggctgcagcgcgcagtcgcgcatggacttctattccaaggacatcgcctgcgaagaactcggccagcactggtcgatgcccgacagccacggcaccgtgcgtggcccgaacgacctgcaggggcaggtgacctacctgttcttcggcttcaccagctgcccggacgtgtgcccgaccacgatggtcgagctgagccaggtgaagcacctgatgggcaaggatgccgatcagctgcaggtggtgttcgtcagcgtcgacccggcccgcgacacgccggaggtggcgcgtacctatgtggaagcgttcgaccccaaggcgatcgcgctggtcggcaacgaagcgcagctggcagcgatggccagcgacttcaaggcgttctacgagaaagagcccggccaggtaccggatacgtacaccatgagccacatcgccggtggctacgtgttcgaccgccagggccgcctgcgcctgttcgcgccgtacggcatgccggtggacaagctgttctccgacgtgcagcgcctgctgctcgagcccggccacccggccgccggcaacggtccgctggccagctgcagcccaaggcacagcgacacactcgccgcccgctga

SEQ ID NO: 529835 - DNA, 579 bp, Stenotrophomonas maltophilia
atgatgaagacgaccattctgttgagcacgctcgccttcgcggcgatgacctcccctgcctgggcacagagctcggggcagactcctccggccaggaccctgtcgaccgtggatgcgcaggaactgaaggcgtccgctacgggccgctcgttcgatgtgggcggcacgcgcttccagctgtctccctcgaccacggtgaagcaggccagcggtggccagttcacgatcaccccgcaggcggcggcgaccaccagctcgcgtaccaagcgttcgctggatagcgcggcggccgcgcctgctgatgccggtgccggcaagttcgcggcggcggtctcccgtgacggagcgccggtggtggcgacgtcgcgggtcaaggtgttcttcaccgatgcagcctcggcccagcgcgcggccaccgccaccggtggcaccgtggtgaaggtgtcgaaggcgtcgggccaggccatcgtggagtacccgtcggtgaacgcggcgctggatgcgaccaccaagctgctgtccaccgccggcatccgcgccaccgagccggacgtggtgcagtgggaagaaaccaagtaa

SEQ ID NO: 529836 - DNA, 1767 bp, Stenotrophomonas maltophilia
atgaagcgacacacgcaacgctccgcgcctccgcgctccgcgcgcctggcccttgccactgccctggtgctgggcagcctggccgccaccgcccaggcccaacaggccgatccactggcgggcatccagtggcacctgctcaacaccgggcagacggtcccggccgacacgctgccggtggccggcaacgatctgaacgtggatggcctgttccgcaacggcatccgcggccagggcgtcaccatcgccatcgtcgatgacggcctgcagatcgcgcatccggacctggccgccaacgtggcggcggtggccggcaagaacttcaccaatggttcgaacaaccccaccccgaccaacccggatgtcgacaaccacggcaccatggtcggcggcatcgccggtgcggtgggcgccaacaacctgggcgtgcgcggcgtggctccggcggcgacactgaaaggcttcaacccgatttcgcgctcagccctgggcaaccagcagagcaacatcgagtacgcctggtgggacggcgcggaatcggccgacgtgcaggtgttcaacaacagctggggcgccggcccgggcaatccgaacctgccgctggcgtacagcgaaaacacgattcgctcgtacgagcaggcactgtcaggcacgcgtggtggccgcggcggcatctacgtgaagtcggccggcaacaacttcaacaatgcctcgatcagccagacccaggatgtctgcaccaccgacaccaagaaccgcaacaccggctgcgtgccggccggccgcgatccgcgcaacaacctgttcaacgtgatcaccgtaggcgcggtgcgcgccgatggcgtgcgctcgtcgtactcctccaccggctcggccctgtgggtgtcggcctttggcggcgagtacggcctgcaggcgcagtacgcccccggcctggtggcacgcgcctacgacccggccatcgtcaccaccgacgtgaccgggtgcgcgcagggcagcaacaagaacaccaaccgccagaacacgctggacagcaacctgtcggccatcgacagcacctgcaactacaccgccaagatgaacggcacctcggcgtcggcgccgatggtctcgggcgtggcggcactggtgctggaagccaacccgaacctgtcctatcgcgatgtgaagtacatcctggccaccaccgccacccgcaaccacccgaaccagccggcggtgacgctggccgatgggcgcacgctggtgccgggctggacggtgaatgcggccaaccgtgcctacagcaactggtacggcttcggtgtggtcaacgctgcgcgtgcagtgcaggtcgccgagaacttccagtcgctgggaccgctggtcgacagtggctggcgcaacacgacgcgtaccgtggccatcggcaacacctcggctgccgccgcacgcctgaccttccagttggccaacggcgcgcgcaacatcgaaagcgtgcagctgggcttccgggtcaaccaccgcaacacgcgccagctgcagttcgtgctggtgtcgcccagcggtacccgcagcgtggtgcaaccggcgttcaccgcgatcggttcgggcacgggtggcgcgcagagcaacttcaccagctgggacctgctgtccagcaatgccttcctggatgagaatgccagcggcacctggacgctggaagtgaccgacatggggcaggccgcgaccgcagcatcgcgcggcaacctcgaattcttcaagatccgcgttctggggcactga

SEQ ID NO: 529837 - DNA, 423 bp, Stenotrophomonas maltophilia
atgaccacacacatgaagaacgaacggctgcgcggccgtgcgcgcgcagatcagaccccgctctcggttgccgccatccgcaaggtggtgctggccgtgcatacgcgcagccacgactatggcgacgatgccgatatcgccgagttgctgcccgaactggcagcattcggcatcaccacggtgaagccgctgcgcctgttgatgaagaagcaccgtcgcgcgctgctgcaggaggagcggatcgtcatgcggcgcgcggagacgctgcatctgcgcgccgaatggcggcccggtggcatcgacgtgcatgccaacaccagccgctacgccatcggcggcctggtccgcaccagcatggaacacgaattcggcttcgagacgatgctgcccttccacgaggtgcgcgaggacgaatccacgtag

SEQ ID NO: 529838 - DNA, 441 bp, Stenotrophomonas maltophilia
atggtcaatccgctcgcccaggcccatcgcggcctcggcaccacgctgttcagcctgttgaacccgatacccttcggcttcttcgtcggcgcgctgatcttcgacgcgatctatctcaacagcgccgaggtgatgtggggcaaggcggccgcctggctgatcaccttcggcctgctgatcgccatcattccgcgcctgatcaacctgttcgcggtctggcgccgcaacggcaccgccacccgcatcgaccgcatcgacttcttcctcaacctggtcgcggtcgtgctggccatctggaacgccttcgtgcacagccgcgatgcctatgccgtcgcggtgccgggcacgatcctgtcggcgctgaccgtggccctgatcgccctgggcctgatcctgctgtcgatgcagccgccggtgctgcagggaggtcgtcatggctaa

SEQ ID NO: 529839 - DNA, 1311 bp, Stenotrophomonas maltophilia
atggctaagcacatcctgcccaccgtgggcgccctggcgctggccgtgatgctgtcggcctgtgccggcaaagccgaataccatcccgctgaccagtccggtgcacaaccgccgttgccggcaccgaagaacttcctgatgccgccgatgcaggtgcccacgggcgtcggctgggccgaggggcagtcgcctacggtggccgaaggcctgaagatcgagcgcatcgccgccaacctgctgcatccgcggcggctgctgaccctgcccaacggcgatgtactggtggtggaaggcaacggccccggcgaagaaccggtcaccacgcccaagcagtggattgccggcaaggtgaaggcacgctcgggcaaggccggcaagggcggcaaccgggtcaccctgctgcgccgcacgccgggcacgaacacctggacccagcacgtctacatcgaaggcctgcattcgccgttcggcatccagctgatcggcgacacgctgtacgtggccaacaccggcaacatcgtgcagtaccactacgtacccggtgaaacccgcatgtccgacaaggggcgcgagttcaccgacctgcccagcaccatcaaccaccattggaccaaggaactgctggccagccgtgacggcagcaagctgtacgtgggcgtgggctccaacagcaacatcaccgagaacggcctggccgtcgaataccgccgcgcggtggtgctggaagtggacgtggccacccgtggcagccgtatctttgcgtcgggcatccgcaaccccaccgggctggattgggagccgagcaccgggaagctgtgggcggtggcaaacgaacgcgacgagatcggtgccgacctggtgccggactacctcacctcggtgaaggaagatggcttctacggctggccctacagctactacggccagcacgtggacgagcgcgtgcagccgcagcggccggacctggtggccaaggcgatcgtgccggactacgccatcggctcgcacgtggcaccgctgggcctgctgttctactccggccaggcactgccggcgcagtatcacggcggcgccttcatcggcgaacacggcagctgggaccgctcgccgctgagcggctacgaagtggtctacgtgcctttcaaggacggcaagccgaccgggcggccgcagacggtggtcagtggtttcgcctcaaaggacgagaagaccctgatgggcgcaccggtgggcatggcgatggacgccgaaggcgcactgctggtcgccgacgacgtgggcgacgtggtgtggcgggtgtctgcgaaatag

SEQ ID NO: 529840 - DNA, 663 bp, Stenotrophomonas maltophilia
atgacctaccgtgcccccgaaaccaacgacagcgcccctctggcccagcagatcgagcagatgatcgacgagctgcccggcgaccaggtgagcgtcggcaccctgctcagcgcgctgggcgatgagggcctgctgctgatcgtgatcctgctctcggccatcttcatcatcccggtgtcgattcccgggctgagtacggtgtttggtgcctctatcctgctgatcggcctgagccgggtgcgcaaccgcccgctgtgggtgccgcagaagctggcgcgccgcgagatcgccaccgacaagctgaaggccaacctgggtcgtgcgctgaagtgggtgcaccgcatggagcggttgtcgcggccgatgcggctggcggtgatggtgcgctcgaagaggatgatgcgcctgaacaacctgatgctggtgttcgcgaccctgctgctgatggcgccggccgggccgattccgttcagcaatacgctgccggcgctggcgctgacgtcctttgcgattggcttcatccagcgcgatggcgcggcggtggccgccggttacggtttcgtggtggccacggtggtgtatttcggcgtgctgctgggtggcgtggggtttgctgccgagtccgtgttcagcgggctgcgcgcggcgccttcggaagtgtag

SEQ ID NO: 529841 - DNA, 834 bp, Stenotrophomonas maltophilia
atggacatgggccgcaggcaatcgaccatcgaactggtcgccatcgacatggatggcaccctgctggaccccacccacacgctcaccgcccgggccaagcgggcgatcgcgcaggcgcgcgcgctgggcgtgcacatcgtgctgaccagtggccgcccggttccgggcctggaaccattcctgcacgagctgggcatcaccggcgacgacgactactgcatcgcctgcaatggtggcctggtgcagcgcatcggtacgcgcgaaaccgtggtcgagtatccgctcagcttcgacgacttcctgttctgcgagcaggtggcccgcgacctgggcgtgcacttccaggcgctggacagccagcgcatgtacacgccaaaccaggacatcagctactacaccgtggccgactcgcatctctcgcggatgccgctgtcgtatcgccgcgtggccgacatggacccgtcgatgtccttcatcaagctgatgatgatcgacgcgccggacgtgctggatgccgccatcgcgcgcctgcccagcgagctgaccgagcgcttcgcggtactgaagagcgcaccgttcttcctggaagtgttcgaccaccgcgccggcaaggggccgagcctgcagaagctggccgagcacctgggcatcgagcgcgccaacgtgatggccatcggtgaccaggagaacgacctgaccatgctgcagtacgccggtaccagtgtggcgatgggtaacgccatcgatgcggtgaaggcggtggcgcggttcgaaaccaccagcaatgccgatgacggcgtggcacgcgcgatcgagcgcttcgttctgcaatga

SEQ ID NO: 529842 - DNA, 270 bp, Stenotrophomonas maltophilia
atgatgtttgcccagtcctttgtcaatgagcggatgtcgcaggttttctctcagtcctacattgagctatggaaggtcgagcgcgatcttgacttgctggctttggatgacgcagcgctttcaacgtgcctgtccagcatcttctgtgctgccgacatgtattgcgacgaagaggtagatcgccatgcgtatgagcttgatgccacccagctgcatgctgccgttgtggctcagatcgatgagtggaagcagtccacgactgctctctag

SEQ ID NO: 529843 - DNA, 2319 bp, Stenotrophomonas maltophilia
atgaacaccccacccacgacgcgcctcgccctcgccatcatcgcggccatcaccgcacctgcgtacgccgcagaaacgcacgacgcagcacatgacacccccaccaccctgaacgccctgcaggtcatcgccaccccgcgcggtgcggccgttgcgcccacccaggtggtcggccccaaccgctacatcatcaaggccgaagacctcgacgccatggtcaccggcaacaacggtctggccatgctcaagcaggtgccgggcgccagctacaccgccaccgatgggctgggcctggatatctcggccaccagcctgttcgtgcgcggcttccgcatgaatgaaatgggcatcaccttcgaaggcgtgccgctgaacgacaatggcttcctctcgctcaccggcaccagcgtggtgaacgtgggcgtgcccgatggcatcggcgcgatcacggtcagccccggtggcgccccggtcagcgtgttctccagcagcgtcaacggcggcagcctggaataccggctgcgcgacctgcaggacacgcccagcctgcgcgtgaagcagggcgtgggcagcaacagcacgctggtcaccaccgtgtccggccagagcggccagctcggtgagcacggcccgaaggtgctggtcgacctgcagcgcgtgtccgccgacaagtaccagggcgagggcacgcagaacttcctgcgcggcgacctgaagctgcagcaggacgtcgcctggggcgatttcaccgtgttcctgtctgacagcaaggccaaggtctggggctacaacaacatttccttcgacatgatccgcaagctgggctggaaggccgacatcttctatcccgattatgcgtgggcgtggtacgtggcctcgccggagaatgcggacaaatcctgcggcgcctacacctgcggtgagctgtccgaactgatcccgtacgacaccggccagatcacccgcgatcgcgtgtcctcgatcaaccatcgcttccagatcagcccggccctgagtggcaacgtgcagctgtacaacgccaacagccacacccaggccacgctcaccgacccgaccgtgccgtcgccaaacggcgcaccgttctccgaacaggtgcagacgccgcgtgtgaatcggctgggtggcatgttcaacctgcagttcgagaccggcgcgcacacgttcaccgccggcttctggcaggagaagagcaaggctgcggccaagaccgagtggtaccagcagccgctgctgggcgagggtccgccgctgaaggccaccggtccgttcgatgtgtatggccccgcgttcaagaccgacaacgcgtcgagctgggtgacccgctcgcgccagttctacctgcaggacgacatcgtgttgaacgacacgctgaagctgggtgtcggcttcaaggccgtggacttccgcaccagcggtggcggcctgggggatgccaaggacgggccggtgaacggcacgctgcgcgccaagagcaacttcctgccgcacgtctcgctgttctggagcccgaccgaatccaccgacgccttcatcgacctggccaataccatgaacggttaccgcgtggcccagcgtggcaacatcggctacaccgcctcggcatggaccatcaccgaccaggaagagttcgaccgcgtggcgggcaccctgcgcccggaaaagaactggaacctcaccgtgggcgcatcgcaccgcttcgaccggctgacgatcaccggcgatgtgttctacaacgacatccgcaaccgcctgctgtcggccgccatcggcacccagttcgcgcagatcaacaccgtgcggttgatgccgaagatgcacgtgatcggcgccgacctcggcatcaccgccgacctgaccgaccacctgcagttctaccagggtgtggccgtggcccgttcgtactacgacagcgatttcgtggtgggcgacacggtgtacccgatcaagggcaacgcccaaccgggctacccgcagatctcgctggtcagcgacctgtccgcgcacttcggtgactggcgcttcggtgccaccagcacctcctacctgcgccagcctttcacctacgagaatgacatccgcgtgccgaccttctggcaggtcaacacctatgccgcctaccgcttcggtgcggacagcgtggtgcccggcctggagctgcggctggacgtgagcaacctgttcaaccgccacaacatcggcaccgccaccatcgccggctcgtcgttctcgggggattaccagaccctgcagcgcagcgccccccggcagctgatgttcagcacctcgatggcgttctga

SEQ ID NO: 529844 - DNA, 387 bp, Stenotrophomonas maltophilia
atgttgctgggtcatgctgtcggcatggcacagcacaacccgcgaaccccgctgttcggcatccggggcccaggacggccccggcaggcgctgtccgtggcgcctgccatcgacctgcgggccgagtaccagttctggcaggtctacgaacgcgtggtccgcccgctgcccggtggcgggctgccgcaggcgtggctggtgtgccagaaggtctatcgcgaccgttggcagcacccggaggacagtgaggcggcgggactgtcgcgggtgctgttcggcgacaacatgacggctggccgggcgtcggagctggcggagctccacgcgctggtcagccgtcgggtggcgttgctggcgaagcgtgggcgggtggattccgcggcgtga

SEQ ID NO: 529845 - DNA, 663 bp, Stenotrophomonas maltophilia; identical to SEQ ID NO: 529786

SEQ ID NO: 529846 - DNA, 1899 bp, Stenotrophomonas maltophilia; identical to SEQ ID NO: 529785

SEQ ID NO: 529847 - DNA, 888 bp, Stenotrophomonas maltophilia
atgaacgcctacccacatctgttagagaaggttgcagagcggatggatgcatcggtccctgagcgcgtggagttcacgcgcagtgaccgatggatagcatatccggttgcgaaggatgtcctggatgatctggatcagatcatcgcctacccgaccactcagcggccgccgtgcaggctgatcgtgggccgtggcgacaatggaaagactgcagtgttgaggcagttccatgccaggcatccaattttgcttagggaagatgggaccacgaacgcagccgtggtgatcatcggtatgccagcgactcccgatctatctcagctttggtccgagatactggactcgtgcgcggtcacgcatcgccgtagcgataccgctcctgccaagtacagccaggtactggcgatcctgagatacctgaagacccgggtcctggcgatcgacgagttcaacaacgtggtcaatgcacgcaagggcgctgcagacgtgctggccggcattcgaaagctgagcaatgatctcaatctcagcatcgtggcggccggaaccgaggctgccatcaatgcgctgtccttcgatgcgcagatgcgctcgcgattcaaaccgctcgcactggcacggtggcagatggatcgctcttaccgaggcttccttaatacgtatgagaagttgttgccgctggccaagccttctgggctggccgagatggagctggcgtctctgatcttcaaggcgagcggtgtggcgattggcggcacggtctacctgatcaaggaggcggcggtgatggccatgcgttcgggtgaggagcgaatcaccgccgagatcgtgttgcaagccgaactgcgcctcaagcagaactaccagggtgtggtggcagccacctga

SEQ ID NO: 529848 - DNA, 1002 bp, Stenotrophomonas maltophilia; identical to SEQ ID NO: 529784

SEQ ID NO: 529849 - DNA, 678 bp, Stenotrophomonas maltophilia; identical to SEQ ID NO: 529783

SEQ ID NO: 529850 - DNA, 1839 bp, Stenotrophomonas maltophilia; identical to SEQ ID NO: 529782

SEQ ID NO: 529851 - DNA, 1128 bp, Stenotrophomonas maltophilia; identical to SEQ ID NO: 529781

SEQ ID NO: 529852 - DNA, 126 bp, Stenotrophomonas maltophilia; identical to SEQ ID NO: 529780

SEQ ID NO: 529853 - DNA, 570 bp, Stenotrophomonas maltophilia; identical to SEQ ID NO: 529779

SEQ ID NO: 529854 - DNA, 1893 bp, Stenotrophomonas maltophilia; identical to SEQ ID NO: 529778

SEQ ID NO: 529855 - DNA, 1707 bp, Stenotrophomonas maltophilia; identical to SEQ ID NO: 529777

SEQ ID NO: 529856 - DNA, 438 bp, Stenotrophomonas maltophilia; identical to SEQ ID NO: 529776

SEQ ID NO: 529857 - DNA, 252 bp, Stenotrophomonas maltophilia; identical to SEQ ID NO: 529775

SEQ ID NO: 529858 - DNA, 420 bp, Stenotrophomonas maltophilia; identical to SEQ ID NO: 529774

SEQ ID NO: 529859 - DNA, 615 bp, Stenotrophomonas maltophilia; identical to SEQ ID NO: 529773

SEQ ID NO: 529860 - DNA, 885 bp, Stenotrophomonas maltophilia; identical to SEQ ID NO: 529772

SEQ ID NO: 529861 - DNA, 1245 bp, Stenotrophomonas maltophilia; identical to SEQ ID NO: 529771

SEQ ID NO: 529862 - DNA, 246 bp, Stenotrophomonas maltophilia; identical to SEQ ID NO: 529770

SEQ ID NO: 529863 - DNA, 243 bp, Stenotrophomonas maltophilia; identical to SEQ ID NO: 529769

SEQ ID NO: 529864 - DNA, 996 bp, Stenotrophomonas maltophilia; identical to SEQ ID NO: 529768

SEQ ID NO: 529865 - DNA, 933 bp, Stenotrophomonas maltophilia; identical to SEQ ID NO: 529767

SEQ ID NO: 529866 - DNA, 1029 bp, Stenotrophomonas maltophilia; identical to SEQ ID NO: 529766

SEQ ID NO: 529867 - DNA, 1284 bp, Stenotrophomonas maltophilia; identical to SEQ ID NO: 529765

SEQ ID NO: 529868 - DNA, 528 bp, Stenotrophomonas maltophilia; identical to SEQ ID NO: 529764

SEQ ID NO: 529869 - DNA, 1110 bp, Stenotrophomonas maltophilia; identical to SEQ ID NO: 529763

SEQ ID NO: 529870 - DNA, 1362 bp, Stenotrophomonas maltophilia; identical to SEQ ID NO: 529762

SEQ ID NO: 529871 - DNA, 408 bp, Stenotrophomonas maltophilia; identical to SEQ ID NO: 529761

SEQ ID NO: 529872 - DNA, 918 bp, Stenotrophomonas maltophilia; identical to SEQ ID NO: 529760

SEQ ID NO: 529873 - DNA, 831 bp, Stenotrophomonas maltophilia; identical to SEQ ID NO: 529759

SEQ ID NO: 529874 - DNA, 1701 bp, Stenotrophomonas maltophilia; identical to SEQ ID NO: 529758

SEQ ID NO: 529875 - DNA, 1344 bp, Stenotrophomonas maltophilia; identical to SEQ ID NO: 529757

SEQ ID NO: 529876 - DNA, 1377 bp, Stenotrophomonas maltophilia; identical to SEQ ID NO: 529756

SEQ ID NO: 529877 - DNA, 954 bp, Stenotrophomonas maltophilia; identical to SEQ ID NO: 529755

SEQ ID NO: 529878 - DNA, 207 bp, Stenotrophomonas maltophilia; identical to SEQ ID NO: 529754

SEQ ID NO: 529879 - DNA, 342 bp, Stenotrophomonas maltophilia
atgcagtgcattcgagtactgatggccctctcgctcgccatgggcctgccggggtgccgggatgaggtggagagttcaacgtatcccattggccagacgggagagacgtgcacagcctacaagggcttcgagcgccagcctcctgaagtagttgtggccgagcttgccaagcgagggttggatagcagccgtttggtgcataggacagtctgcggcccgatcacaagttgggacattctccccgcaggggcgtcgatcgatcggatacctccgccagacgcatatgtaagcgtccacctgctggaagacggctcggtttccgtcagtacagaccgcccctga

SEQ ID NO: 529880 - DNA, 399 bp, Stenotrophomonas maltophilia
atgtacagattcaaggccgaagtcgtttccatagaggaagatgactactgcatcgtagttggcttggccgacagctcgacgaatccgtctcgttacgtggtattgcagaacgcgaaggcgtatgacgaccaggacgaagagttgggcatggcgcacgcccatatcgaggtcggtggaggtcttgagccttgctatggcggtctggtgcatatctctctgcggcgcatggagcttgagctgtctctctccgaaagtgcacagaggaagcttgggatcactggtgggattgcagtgacactgaaaacgttggaaaacggcagcaagctggaggccgcgttgcggaaaatctgtgttgcggaggatattccgcttgatctgaactcgtctggacgggattga

SEQ ID NO: 529881 - DNA, 339 bp, Stenotrophomonas maltophilia
atgaaagctgacgaatttgtatccgctatccagcgctatgtgcttgaatcatccgtgcgtagtacgatctcgaacctggggtatccaccgggccgtcgggtggccccagacctgttggcacggtccgaatggttcaacggcttgtccgctgtagaagccgacatgttgcgagccgttgccggtgaagctgcccgttcggcggtcttcgggtttctggcggtgcttgatggcacccgtgtcatcgattcagagaaaggcaccttcgagcttcaccatgtgggtcgcgagaagcgcctggtgaatccgtctggcatcgatctacacgacctgatcgaatag

SEQ ID NO: 529882 - DNA, 441 bp, Stenotrophomonas maltophilia; identical to SEQ ID NO: 505644

SEQ ID NO: 529883 - DNA, 372 bp, Stenotrophomonas maltophilia
ttgcagcgctatctttgtgatctggatgtaacaggcaatctttcggcgggccgcgatgtcgagcagctgctccccgatcgatatgagttggatcagcgtgtgattcgctttgtctccattgagcaggccaatctgaacgcctggagggttcgtctttgcgaagtatttgacaatggagcgcctggcttcatcgatgtgtacgagttcgaggcggtggatccggatcatccctttggtaccgagtggacgtttgattcggttgacggcgccttgaggttcgcgcgggacgtgttgaggaccagtcaggggcgctatgtgaaccaaggactgattcaagacgagtacaaggaccgctatcatccggaatggtga

SEQ ID NO: 529884 - DNA, 558 bp, Stenotrophomonas maltophilia
atgaagacacgcagactcatcttgattgcgctgggtatgttgcctgcagcagcaggcttccccgcagggaatccacgcgtggactttgtatcgaaagccttccgcgatgggagtttcatcccgcatgtctacagcgagagggatttcctgcgccgctatggtgatggcgagctggtcgtggacgccacaggactgatgcggcgtagatacctggatcccactacccgattggaggtgctgatcacctcaaaccctgacgtggctccgcagttccgaaccattgatgagatccgcgtttcatcgatcagcgcggcgcaacccactgcaggtagaaccgagagcctgcgcggcgtgaagctgaaaggcgttgcgatgggtgatccggcgtccgaggccatcggcacagcacgcagatatggccaggggaagacagagcaggcaacgctggggggcttcgatgtcgagcgcacctgtggcttctcggaaggtggatcgaacatttgcttctacgtccgggatggaaaagtggttgcgatggcactggggtttggcccctga

SEQ ID NO: 529885 - DNA, 531 bp, Stenotrophomonas maltophilia
atgaagatgcacggccttgccgctgcggtggtgtgcatcgcggtgatcggcgcgatgtgggtggagtggcccgagccagcgggcgatcaggtctgggcctaccagaagctgcggccggccgattaccgcctgctgcgcagtgatgcgctcggcttcgttaccgcgaaggcatacgagggctttgaactgtatgcgcgccatgccggagcgacgtccttcgagatccggtgcaagggcgtgctggtgatggacgtggagaacgcaccctcgcgcgtgctgatccgcatgcctgccgatgcacggtggcgggcgccggatatcgaacgcctgcgcagcagcttcgagcgttggctggatctgcaccagagccaggggcgattgcttgtggaaagcgcggggccttcgtggattgaggcgcggtttgggcgcttcactgggttggtgcctgatgagcagcggtgtctgcttgggggcccaggccatcgccaggccgttcccaccaaccatgtccgcgctgaagtgccttcgtag

SEQ ID NO: 529886 - DNA, 357 bp, Stenotrophomonas maltophilia
atgaccacaccgcactccccgcccccgcgccccatccaggaagcgccctcgaccgctccggccccggaccccaacagcctcatcgccatcctgcacgccatcggcgcgggcgctgcggccgacggccagccctggcccgagcggcaccatctacgcagccggcagatggcgctatccgacgccgactgcgcactcaccggccagcgcatcgtgcaggagatcctgctggcggccgagcgcacgcgccagaacggcgagccggagcagtacgtgggcgaccgggtgatggaggggctggtgatggccgatctcgcgctgaccgccttcatccacgagcggatgcgacccaaggactga

SEQ ID NO: 529887 - DNA, 603 bp, Stenotrophomonas maltophilia
gtgtcacgccgcagccgactgcttctctgcgcgggtctggtcccgcttccgtggttcctgttctggaccagcgttgccgccgtgttcgcgccgggctacaacccgcttgcgcagcacgccagcgagctgctgcaggcaaccacgctcgcaagcatctgcgccaggattgccgccatcggctccggcgtgggcttcgtggcgttctccatcggagtatggcgggagtccggccgccggattgccgtaggtgcaatctgctggttggtctttggcatttccatgctgaccaacgggctctggcccatgggccatccgatgcacggcttctacaccatcggtatcgcaaacatcattgcacccgcgatgtcgcatatcgaattgagcgcgtggtctgcaaaccgaagggcgtacgccgtgaccgctatggtgagcatcgcgggcatcgtctatctctggttgaacctggtgggcgcggacccggagggcttcagggggctgacacagcggctgttctcgtcaatcaactcgttgtggccattcgtggttgcgctgtatctgctgcgcaggggttcaagcgcgctgaaggcggagcctgcgcattga

SEQ ID NO: 529888 - DNA, 669 bp, Stenotrophomonas maltophilia; identical to SEQ ID NO: 529753

SEQ ID NO: 529889 - DNA, 957 bp, Stenotrophomonas maltophilia; identical to SEQ ID NO: 529752

SEQ ID NO: 529890 - DNA, 1230 bp, Stenotrophomonas maltophilia; identical to SEQ ID NO: 529751

SEQ ID NO: 529891 - DNA, 969 bp, Stenotrophomonas maltophilia; identical to SEQ ID NO: 529750

SEQ ID NO: 529892 - DNA, 522 bp, Stenotrophomonas maltophilia; identical to SEQ ID NO: 529749

SEQ ID NO: 529893 - DNA, 774 bp, Stenotrophomonas maltophilia; identical to SEQ ID NO: 529748

SEQ ID NO: 529894 - DNA, 345 bp, Stenotrophomonas maltophilia; identical to SEQ ID NO: 529747

SEQ ID NO: 529895 - DNA, 282 bp, Stenotrophomonas maltophilia; identical to SEQ ID NO: 529746

SEQ ID NO: 529896 - DNA, 711 bp, Stenotrophomonas maltophilia; identical to SEQ ID NO: 529745

SEQ ID NO: 529897 - DNA, 1122 bp, Stenotrophomonas maltophilia; identical to SEQ ID NO: 529744

SEQ ID NO: 529898 - DNA, 1053 bp, Stenotrophomonas maltophilia; identical to SEQ ID NO: 529743

SEQ ID NO: 529899 - DNA, 1203 bp, Stenotrophomonas maltophilia; identical to SEQ ID NO: 529742

SEQ ID NO: 529900 - DNA, 447 bp, Stenotrophomonas maltophilia
atggcagcattcgatcattccctggtaaccctccgattcttcggggacgacctcctgcccgaagaagtcagtgccttgctcggagcgaccccgaccgcttcgcatcacaaaggccaggaactcagaggcaaccaatcaggcaccgtgcgtatcgccaggactggcagctggcaacttgatgcggagcgtcgtgagcctgaagatctggacgctcagatcttcgaaatcctcgatcagctcaccggcgatctcgccgtatggcagtctctggcacgcttccggcctgatctgttctgcggtcttttcatgggcagcagcaacggtggtgtctcgctttcgccccgcgcgctgctcgcccttggtcagcgcggcattgagctagggctggacatctatgaagccgatgaagaagcgcgcaacgcccaacgccaacaggtcatcaattga

SEQ ID NO: 529901 - DNA, 435 bp, Stenotrophomonas maltophilia
atggcgcaggacaccgaatggacacccgtttcgcatgacacctgcgaccaggtcgccgggccgttctaccacggcacccgcgctgacctcgcggtgggcgagctgctgagcgcgggcttccgctccaactatcgcgatagtgtggtgatgaaccacatctacttcaccacgattgccaagggcgccgggctggctgcggagatggccaagggtgaagggcggccgcgtgtgtatgtggtggcgccgaccggtccgttcgaggacgatccgaacgtgaccaacaagaagtttcccgggaacccgacgcgctcgtatcggagtgcgcagccgttgcgggttgttggggagattgtggagtgggagctctacgatgcggagtttgttcggcagttgagagcgtttgttgcttcggggagtggggagatcatcaattga

SEQ ID NO: 529902 - DNA, 252 bp, Stenotrophomonas maltophilia
atgatcgacctgaaccaaatcgatgacctcgcccgtcgcctcagcgacctggtgcccccgggcctgcgcgaatcgcgcgaggaactgcaggccaccttcaagagcgcgctgcaggccggcctggccaagctggacctggtcacccgcgaggagttcgaagtgcagcgcgccgtgctgctgaagacccgccagaagctggacgcgctggaaaccgccgtgcgcgagctggaagggcgcggcgccgcagaatga

SEQ ID NO: 529903 - DNA, 339 bp, Stenotrophomonas maltophilia
atgaagatggtcatggcggtgatcaagccgttcaagctcgacgacgtgcgcgaagcgctggccgagcgtggggtcaccgggatcacggtgacggaagtgaagggctttggtcgccagaagggccataccgagctgtaccgcggcgcggagtatgtggtcgatttcctgccgaaggtgaagctggaagtggcggtgaccgatgaccaggtggaggcggtggttgaggccatcgtgaaggccgccggcactggcaagattggcgacggcaaggtgttcgtgtacgacctgggcagtgtggtgcgtattcgtaccggggaactggacgcggacgcgttgtaa

SEQ ID NO: 529904 - DNA, 660 bp, Stenotrophomonas maltophilia
atgtatcttcctgctctccccccctcctcctgcggcaatgacgccgcctccccgctgctgctcaagcgcggcgagcgtttcctggcccccgacgtctaccgcacctgcctggacgggcgcgaggcggtcatcaaggactactcccgctaccgcggcacccccgtttcgctgatcgcgcggctgatggtgcgccgcgaggcccgcatgctgcagcgcctcggcggctggaagcatgcccccgcgctgctcggcactctgggcggcctggcgctgggcatggagttcatccccggccagaccctcagcaccgcgcaggccgtcggcaatgacgtgttcgagcagctgcagcacgcgctcagccgcctgcatgccgccggcatcacccacaacgacctgcatggcaccaacgtggtggtcagtggcggcgtgccggtgctgctggatttcacctccgcctggcgcgtaccccgctggctgcgccgcggcccgctgagccggcagatgcgccgcagcgacatgaagaacctgctgaagatccgccagcgcgtgaccggccaggcgccgagtgccgcgcaggctgcactggtggccgacccgggttgggtagcggccgtgcgccagggctggaagcggttctacaagtgggccaagcgccggtaa

SEQ ID NO: 529905 - DNA, 909 bp, Stenotrophomonas maltophilia
ttgatcatcaaaatcgtcattgcagcgctgttcgtggcctgcgtgctgtacatccacttccgtggcaaggtccgcgcgcgctggtcgcgccagctgctggaccactccagtttcatggccccgatcaacgtggtcatgtacatgttctcgaaggtgccgaccacgccgttcctggacccggcgaaggagttcccgcagctggagccgctgcgccagaactggcagatgatccgcgacgaggcgctggcgctgcgcggtgcgcagaagatcgccgcctccagcacgttcaacgatgccggcttcaattcgttcttccgccgtggctggaagcgcttctatctgaagtggtacggcccgtcgcacccgtcggcgaaggcgatgtgcccgaagaccacggcgctgctggagtcgctgccggatgtgcgcgcggcgatgttcgcgcagctgccgtcgggcagcgaactgcgcccgcaccgcgaccccttcgccggttcgctgcgcctgcacctgggcctggccacgcccaacaatgacggctgctacatcgaagtggacggcatcaagaagagctggcgcgacggcgagtggatgatgttcgacgagacctacatccaccacgcgcacaacgagacgccggatgaccgcgtgatcctgttctgtgacatcgcccgcccgctgcgcttcggcctgccgggtctgttcaaccgcgcggtggcggccacgctgctggccggtggtgcctcgccgaacctgccgggtgacccgaccggtggcgtcaacaaggcgttcggcagtgtctacaaggtgcgcctgaaggccaaggcactgcgcgagcgcagcgtggtggcctaccagctgatcaagtggggcctggtggtggcggtgatcgccggtatctgggcgctttga

SEQ ID NO: 529906 - DNA, 852 bp, Stenotrophomonas maltophilia
atgactgacagcaacaactggtacatcgaacacttcgagcgcaccggctcggccatcggctaccgcatcaccggcaagctggacgaggtgcagtcgccgttccagaagatcgagatcttccagaccaccgactggggcaacctgatgaccatcgacggggccatcatgctgaccagcaaggacaacttcttctaccacgagatgatcagccacccggtgctgttcacccacgccgcgcccaagcgcgtggtgatcatcggtggcggcgactgcggcaccctgcgcgaagtgctcaagcacaagggcgtggagagcgtgacccagtgcgatatcgacgagcaggtcaccgtgatggcgcgcaagcacttcccggaactgtgcgattccaacgatgacgcccgcgccgagctgctgttcgacgacggcgtggcctacatggccaactgcccggcgggcagcgtggacgtggtgatcgtcgattcgaccgacccggtcggccccggcgaaggcctgttcaacaaggccttctacgagagctgcttcaaggccctgaaggacgacggcatcctggtgcagcagtccgaatcgccgctgatgcagctggacctgatcaacgaaatgcgcaccgagatgggcaaggccggcttcggctcgttcaagaccctgccgttcccgcagccgtgctaccccaccggctggtggagcgtgaccatggcgcgcaagggcgacagcagcttcgacttccgccaggccgactcggccgccaagaccttcaacaccctgtactacaccgccgcgctgcacaccggcgtgctggtgaccccgccgttcgtgcaggcggcgctgaagtaa

SEQ ID NO: 529907 - DNA, 1890 bp, Stenotrophomonas maltophilia
atgaccgattggtccctcgaccaagcccgcaagacctactcgatcccgcattgggcggacggttacttcgacgtggatcaggccgggcacatggtggtgagaccgaccggggcggacggcccggtggtgtcgctgcccaaggtggtggacgcggcccgtgcggccggcgccaagctgccgctgctggtgcgcttcccggacatcctcggccagcgcctgggcaagctgcaggcggccttcggccaggcccagcaggactgggagtacagcggcggctataccgccgtgtatccgatcaaggtcaaccagacccgcggcgtggccggcaccctggccagccaccacggcgagggcttcggcctggaagcgggcagcaagcccgagctgatggccgtgctggcactgtcgcgcccgggtggcctgatcgtctgcaacggctacaaggaccgcgagtacatccgcctggccctgatcggccgcaagctgggcctgcagaccttcatcgtcatcgagaagccgtccgagctgaagctggtgctggaagagtccaaggcgctggacgtgaagccgggcttgggcgtgcgcatgcgcctggcctcgctgggcgccggcaagtggcagaacagcggtggcgacaaggccaagttcggcctgtcgccgcgccagttgctggacctgtggaagtcgctgcgtgacaccgagtacgccgactgcctgaacctgctgcacttccacatgggttcgcagatctccaacgtgcgcgacatcgccaacggcatgcgcgaagccacccgctacttcgtggagctgtcgcgcctgggcgcgaagatcacccacgtcgatgtgggcggtggcctgggcgtggactatgaaggcacccgttcgcgcagcttctgctcgatcaactacggcctgcattcctacgccagcaacatcgtgcagccgctggccaatgcctgcgaagagttcggcctgaccccgccgcgcatcgtcaccgagtgcggccgcgcgatgaccgcgcaccacgcggtgctgatcgccaatgtgtcggaagtggaagaagcgcaggaaggccgcgtgccggaccagcacgacgacgagccggcggcgatccgccacctgcgcgagatccacgacgagctggacgtgcgcccggcggtggagctgttccaggaggcacagcacttccacgccgaaggtctggccagctatgcgctgggccagatcgacctgccgcagcgtgcgcgcatcgacgatctgttctacgccatcgcccacggcgtgcgtgcgcgcctgagctatgacgagaagagccatcgcccggtgctggacgaactgaacgagcgcctggtcgacaagtatttcgtcaacttcagcgtgttcgaatcgatcccggacgtgtgggcgatcgaccaggtgttcccgatcgtgccgatcgagcgtctggacgaaaccccggaccgtcgcggcatcatcgccgacatgacctgcgactcggacggcatggtggaaacctatgtcgagaacgagagcctggacagctcgctgccgctgcacaagatgaagccgggcgaaagctatcgcattggcttcttcatggtcggcgcctaccaggaaatcctgggcgacatccacaacctgttcggcgataccgacgcggtggaagtgctggccgatgccgatggctacgccatcacccagcagcgccgtggtgacaccaccgacgtgatgctggattacgtgggttaccgcctggacgaactgcgcgcgacctatgcgcagcgcgtggccgaggcccagctgtcgccggaacgcgcgcaggagctgtcggaggcgctggaagccggcctgaccggttacacctacctgtccgacgaaccgctggtctga

SEQ ID NO: 529908 - DNA, 321 bp, Stenotrophomonas maltophilia
atgagcgcgcgcgcgatcttccacctgttcctgcatgccgccgtgccagcgctgctggcatggctgttctggcgcaagcgcttcgcctcggcgtggctgctgatgctgctgggctggatcattgatctggaccacctgttggcggatccgatctatgcaccgaaccgctgcagcatcggttttcatccgctgcacaccgcaccggccatcgcggtctatgccgggctgtgcgtgccgaagaaaacgcggttgttcggcatcggtttgatgatccacatcgtgctggatgcgattgattgctggtggatgcatcaccgttga

SEQ ID NO: 529909 - DNA, 1320 bp, Stenotrophomonas maltophilia
atgaaccggcaaccgtcgctgcggcggcgcctgctgctggccgggggcgttggcctgctgctggtctcgctgctggccagcgcactgctgggcgagctgttcaagcgcagcgcgcgcgaccgcctcgatcacgaactgcagcaggacatgctgaccctgctggcacaggccgaagtggacccggaggggcagctgcgcctgcgccaggaaccgaatgacgcgcgcttccagcgcgtgttctccggggcctattggcagatcgccggtgccgatggccgcgtgctgctgcagtcgcgctcgctgtgggatgaaaccctgccggcgccggctgccggtccggccacgcgcgatctgcccggaccgctgcagcaatccctgcgcacgcgcgtgcagcaggtgcgcctgccgcgcgccagcgaacggttcgtggccgtggtcgccaccgatcgcagcgcactggatgcggatgttgccgcgttccgcaaacgcaccgccatcgccctgggcgtactggttgcggcgtggctggcggtgctggccagccaggtgcacttcggcctgcgcccactgcatcgcctcggcgcgcaactggaacgggtgcggcgcggcgatgcacaacgcatcgacacgcaggagctgggcgcggaagtcgcaccgctgggggaagaactcaacgcgctgctggaccaccagcaacgcatggtcgcgcgcgcacgcaccagtgcacaggatctggcgcatgcattgaagaccccgctgagcgtattggccaccgaagcggacggcgacggcacgcactggcgtgccaccgtgcgcgaacagagtgcgcgcatgcaggccagtgtcgaccgctacctggccgcagggttggccgccgaccatcgccagcgcaccggcgtggcggccgtcgcacaggcaatgtgccggctgatggcacgcgtgcatggcgaacgtggcattgcattcacggccgcagatatcgatccggcgttgcagttcgctggtgccagtgcggacctggaagagatgctgggcaacttgctggacaacgccgggcgctgggcgaaacagcaggtcactgtcgaagcggaaaccagcgaagggcagttgcgcatcgaagtgcgcgacgacggccccgggctggctgcggacgccctcgaacgggtcacccagcgcggcgtgcggctggatgagcgcgagggcagcagtggattggggttggcgatcgtaggtgatatcgccgccagttatggcgggcacgtggcgttggagaatgcgcagcccggcctgcgcgcaacgttgtggttgccggtggcgtga

SEQ ID NO: 529910 - DNA, 660 bp, Stenotrophomonas maltophilia
atgcgcatcctgttggccgaagacgatgccgcactggcacagcgcctcgttcccctgctggaacaggccggctatgtggtggaggtggtcgccgatggccgccaggccgaagagatcggccagatcgaggacctgcaggccgccatcatcgacctcggcctgcccgggctggacgggctgagcgtgatcgagcgctggcgcggcaacggccgcagcttcccggtgctggtactgaccgcgcgcgggcgctggcacgacaagctggccggcttcgatgccggtgccgacgattacctcaccaaaccgttccaggccgacgaactggtgctgcgcctgcgcgccctgatccgacgcagccatggccacgccagcccgcgcctgcactgcggcccgctgcagctggacgtcaacgccggccgcttcgagctggatgggcagacgctggcgctgagcccgcaggagttccgcctgctcagctacttcatccaccacagcgggcaggtgatcggccgcgaccggctgggcgaacaggtgttcgacggcggccatgacccggactccaacgcactggacgtgctgctcggacgcgtgcgccgcaagctcggcatcgacctgatccagaccgtgcgcggccagggctggcggctggccgagccatga

SEQ ID NO: 529911 - DNA, 291 bp, Stenotrophomonas maltophilia
atgctcaccaccctgcccctgctgctggccctggccaacgccccgatcgccgccgcgcccgtacaggacccggcgcagcaggtcgcgcgccgtgccgtgcagcagggccgctacgtaccgctggaaagcgtggtacgcgatgcactcaagcgttacccgggccagctgctggaagtggagctggacgacggcgtctacgaagtggagatcctgcgcggcgacggcgtggtggtggagctggactatgatgcgcgcagcggaaagctgctgaagacggagctcgacgactga

SEQ ID NO: 529912 - DNA, 435 bp, Stenotrophomonas maltophilia
atgttgaagtcgctcaccctcgccaccgttgccctgctggccatcgtaccggccgcacaggccgcgccgctgggcatggcccaggtcgaacagaccctgcgcaaggccggctacacccagatccacgagatcgaacgcgatgacggcctgtgggaagccgacgtgagccgcgctgatggccgcttcagcgaggtctacgtggacccgaagaccggcgagatcttcgatgagcacagcggccgcacgctgctgaccaccgagcaggtactggcacgtgcacaggcgcatggcctgcgcgaaatccattcgctggaacgcgatggtgcgacctggtcgctggaagcccgcaatgcccgcaaccagaaggtggaagtgcgcctgagtggttacgacggccgcatcctgcacagcgagcgcgatggctggctggattga

SEQ ID NO: 529913 - DNA, 192 bp, Stenotrophomonas maltophilia
atggcgctcacgcccccgcaaccggacccaccccgccttcgacagttggccgcgatctgttggaacctgctgctgctgatgatggtgatggtgatggtgatggtgatggtgatggtgatggtgatggtgatggtgggtgccgaccgttggtcggcacggggtcggatcccgttgctgtgcaacgggctctga

SEQ ID NO: 529914 - DNA, 222 bp, Stenotrophomonas maltophilia
atgaggctggtcagcaagcaccgcgagatcggctacatggttccctctcagcgtgatggatgccggaactgcgtccgcctgactgtgttgggcgaggaaaacggcctcggcatcgctatgcgccagggctgctctaagcatggcgtcgaggtgacttcaggcggaatctgcgccgatttcagcgctatttggccgcgtgcggaggtgaatcgtggccgttga

SEQ ID NO: 529915 - DNA, 1362 bp, Stenotrophomonas maltophilia
atggcgatggctgatgaaggcgaggcctacgctcgttgcgagaccaatcgtggcgcatccgaggcggcttttcaaaacagccctgatccggccaagttcaagtgcgatagatcagtggattcggcgacgatcatgtttcgctgcattcgcgcggagtcgggcgtcaatggcgtttgcatcaaggacaacggcgtctacatgtattacgcaccccgtgagaacacgtgcgccacgcgcctggacggcgaggcgggcatgatcaacggcacgctctacagcggtggcgtctgcaacaagggctgcaagatgcagccgaaccttgatccttctgtcaacttcaacatcagcgactcggccaacccgaacggtatccccattcgccgtggcacatggaaggcaacaggcgggctgtgtagttccgaccttccggcacagcctgagaacaaggatgagtattgtcaccaatcgggtagctacaaggtctgcaagtccaaggatcgcacttgcatcagcacggcgagtgggttccgtacatgtgctagcgatactgccaacaagaccggtcacactcagaccaacaacccgcgaaccgaggcggcgagcatcagcgccccggatactgccccgaacgcaccggccaataggcccggcgaaaactggcagcccagcgggggcactacgaatatcacgaataacaacaccggcagcaccaccaacaccacgacctacaacaaccaaggcacgcccaacggcaaccagccgacgccaggagatggctccggcccggggcaggggggcagtaatggaaacggcaatgtgcccggtgagggcgggaacgagggcaacggcaatagtgccggtggtggcggtgattgcaagacgccccccacgaccagtggcgatccgatcctcggcatgatcgcgtcacagacctgggcaacgcggtgcgcgacggagaagggcaactccggcacggtgaccggcgacgtaggcaactgcgatcaaccgttcactgttaccggcgatagcctgcaggccaaccagcttcgcgcccagcgtgcacagctgtgtcgtggcggtccggggcagggcgagggcaacaacggcaacccgcatgagggcgccgaagacgtcgacggccccggaaagtggtcatggaagttcgatgagagcctgatcgacaagagcggctttggcggcggctcctgcccgcagttcggaaccgtggactttggccgattcggcgcggtgtctctcgacagcgtcacgtggtggtgcccactggttgcggcgatgcgtgccgtgatgctgctactgggcgccttcatttcattccgcatcgtctttggagatggatcatga

SEQ ID NO: 529916 - DNA, 291 bp, Stenotrophomonas maltophilia
atgcctgccgcctacgccccagccctgagtactctcgctgtcctgatcgctgccgccctcgctgcgacgcccagccatgccgcggaagccgatgcggatcctgccaccaccgcggcgacggccaacgttgctgcatccacgctggatgcggtggtggtgaccggctcacgcaccagcacgcgcacggtgaagaacagttccacgccgatcgatgtgatctccgccgaggacctcgtgctaccgggcagggcaacctgctggaagcgctgcagcgcagcctgccgtcgctga

SEQ ID NO: 529917 - DNA, 1053 bp, Stenotrophomonas maltophilia
gtggcgcttgcgccattgcttgagcacggcggtgcgcagcgtcagcagcagcaaccagcacaggaagccgatcgccagccagccgctcagcgtgaacacatcattgaagccgcgcacgttggcttcgcggcgcgcggtctgcgccagctgcgcgctgccctgcgcgctgcgcagcaccgggtcggtgatctgtgcgctgtacagctgctgctggaggcgcaggcgctgcgccaccaccgggtcggcggggtcgagctggctggtcaacgcactggagtacagctgctcgcgatgcagctggaacgtgcccagcaccgccgaaccggccaggccgcccagggtctgcgtgatcgacagcgtcaccaggaaggtgatcatgtggtccacgccctgtttcaacgcggccgagatgccgagcatgatcagcgggcccatgaacatgccggcaccgaccgaggccaggaactggctggcgtagaaatcgtgcggccggtccaggctggtgcggtgctggtcgaagaacgcggcggcacccagcagcaggatcgccatcaacagctgcgcgatcagccgtttcgggccgaaggtcagcgaggcgccggcgatgccgacgatcaccccggccaggatcaccacgaacagcggccgcatctggtccggccccatgcccagcgtgcgcatcaggttgaccacgccgtaggactgttcggtggtgaggaagcggatcaggaaggcgccgacgatgaaatgcagcaccggcagtgtcgacagccagcggatctgcagcagcggattgcgccggtagtgttcgatgatcagtgcgacggtggtcagcgcgatggaggcgatcagcgcccagcccagccacggtgtattgagccaccagcgcgtatagccctgcgccagtacgatcaccagcagcgcgaccgccggcgcaagcagggcgaaggtgaggaagtccaatggctcgaacgccttcacctggatgcccggcggcagcttcagcaccaccactgccgcgaacgcgcacagtgccagcccggcttcgaatga

SEQ ID NO: 529918 - DNA, 1104 bp, Stenotrophomonas maltophilia
atgagggacagcgttagtgatgaaattggctttccaccaccgaagtggtggcagcgcctttgggtgatgatctcaagccctaagaaggtctatccctttacgttccttcttggatgcgttttgattttgttttatctgattatcccccatttgctgggatttgaggcgaattggtctttaagctttgtaaaggagctgggtttcgcttatgtgattgcggccatattggggtttagcattgaagcctttaaccatgcgcgtcacctgcttcacgagaaaactagggaggcggagttggaggctcaaggtagacatcttgtcgcgatgattgaagacgggcattccaaaaacctcgattcgttcggaaataaggttgcgaaagatgtaattgaggctgcttatggagttacagttcccaaggaggtcctcaatgcgttgagtcagttcgtgttgcaggcgcgaaggatacggagggaattttccatctcaattgacattcaacttttggataggtttagggaggaacgaaatcacgtttacagtggcgaagacgagcgggccaaggatgccaagagggttgctcttacatattcagctacttgggaggacgaaaatgttctggctggcgcgtgtgaccttcctatccccgttgagatcgtgaaggaggggccgatgctggatggcgtcgtcgggctaaaactgttctcagcaaagatagatggggaggagggtgactttagagcagaatcggtcgaaggcctgaggaaactcgggatcgatgttgacgatgatcaagagaaacttcagttttgctacacagtgaagggtttgccttcgaggtcacgggcacgcttttctttgaagcacgttaccgtccaagacattaatgacgaaatcatagtgatgtcactacctccttgcgttaacatagagttggctgtccagcatgggaagggattggatgtggtggtgtcgtctatgcattcagagaaagcgatagagctaccagccagcgcgctgtggaaggagggagagcgtcgatggaaactcgcgactgcttcacttccttctcagggcttcgttgtcacttggaaaccagtttaa

SEQ ID NO: 529919 - DNA, 1341 bp, Stenotrophomonas maltophilia
atgagtcgcctccaagtaacgcttgacgctatccagcacgtggcgcatctccacttggacgtggatctttccaagagcggactgatgtgccttgtcggccgaaacggggcaggcaagacgaccttggtgcgagctcttcggaacctgtccaactcggacacgttcatacggacagcgacaccctatgccttctctcagaaaagccggatcgtctacgacttagacggcgaccaagcaacgttcacctataacagcgcgctccgctctctggactgtcgagacaagatatccagggaactgcgcgatcttatcgctgccgagcttccaatgccttatggcgctcgattcaactactttagaagcgccagcgaggcagaccaagacatccgaaccgctattacgcttgggacctgtgatcgcccagatgagctcatctcattcttgaacgcagtctatgagactgaccgctactcggcgctggtcgaggttcgactaaaaggcaagagctactacgccctagtcagagaagatcagacttacatccgagaggactatctgagctccggtgagcattttctcatcaacctattccgcaccatcaaaggcccctcaaggctactggtgattgacgagattgacctttcgttagacgcagcagcccaagcgaatcttccaggttggctgcgtgggttttgcgcaaaatacgatcgcaagatcctattcacaacccactctctcgcgcttatgcggcagttagaggttgatgagctcttctacatggagcgggatactacccaagtctcaataaagcccatctcctacagctacgcgatggcgaggctgtttggatttgaagggtatgacagatacatcttgacagaggacaagatgcttactgccttcattggtcacatcgtatctaagcattgcgaaaaaactcttcttcgccacaagatcatcttcatcggcggcggctctcagattgccgagctcatcagtaggaatcgaacggaagagttcttggccccaagtgataaggtcatcgcgatcctggatgcagaccagaagaacgaaaaatttgctggggacccgggcatttacacaatcccgctggatagcgtagaaaaagctctgctaagcgcgagccgagaggatgcagacttccccttcaggacacacaagagcgattacaccaacggtcggagcttgaactacgacatcagagaccagaggatcgctactcaagaggatatctttgactaccttcttgaaaggcatagggatgatttccaggacatagttggaaccatttgtgccttcttgcctcaaccacacacctag

SEQ ID NO: 529920 - DNA, 957 bp, Stenotrophomonas maltophilia
atgaccccgcagccgttgcataagctgttcgacgccatgtatcacggcaaataccgcttcgaagaattcttggccctttcccctggagagaactacagcccggtcagctggaagagccgcaccatctacaagccgtccaaaatcctgaaggacttccatgccttcctcaacggctttattttagagcacctgcctgtcgacacttcggtctcttttgcatatcgcaagggagcgaccctcattcaggcggtcgaaccgcatgcgaacagccgagccttcttccagactgacctagaaaggtttttcgatagcatcacgacgccgttggttcgcaaggttctgatggagagcgcgacacccgttgcagaccttcatgatcacctggagcatatcctcgggttgcttaccatcgatgggaagctgcctatcggctactccacctcccctatcgtgagtaacgcctgcctgctcccttttgaccgtcgcatgacccaaatcagccaggaccggggatggatttacacgcgctacgccgacgacatcatgctatccactcaggagcgcaccaatctttcggatgcagaggctgtcattgaagactgccttgctagtgagctgggcgatgaattcaatctcaacccggcaaagagcaagctgacaacagtaggcaggaaggtcaagctcttggggctggtgatcctgcccacgggtgccattgccattgatcgggatgttaggaaccgaattgaggcctggatccacttttacctcagcgaccgggcgcggctattaagaatatttgaggaaacgtatagccaaggaatggaagaagggttagagcggctcagtggcctcatcagctatgcccacgccgccgatccagcctatcttgagaaacttaggagcaagttcggcaccaccgtcattgacagcctcctgcataggtctgcccaatga

SEQ ID NO: 529921 - DNA, 153 bp, Stenotrophomonas maltophilia
atgacaaccatgcttccgcaggcgtcaaagcacgcctgcttcactaccactacgtcgctgcgcccgggccaccacgtcatcgtaccgcgcggccaggagcggtatcccgtaccaccccctcttcccattgccgcacaggagcacaccccatga

SEQ ID NO: 529922 - DNA, 462 bp, Stenotrophomonas maltophilia
atgaagcgcgtaggggttctactagtcgtccttgttgtcctggcctggatcgggtcagggctggtgccgcgcagcgagcctgcagatgcctccacgcctgccgtagtggccgaagcgccgcagaagcaagcccagcaggcagaagtgtcgaagccagagccggagcgcccgctgacggtagcggagaagaaagcgcagcacgagaagtggttcggcgctgagatgatcgtggcggccgagcgcgctgtgagggccgagctgaaggacccggacgccgcacagttcaaggaggtgcgcgccaactacaccgaggagttcggtgttgtcgtctgcggccgggtcaacggcaagaacgagttcggcgggtacaccggctttcggcgcttcgtttcgggcggcaagagcgtgatccttgaggggcgggacaacatcgctgatgcttgggctagagcttgcttgtag

SEQ ID NO: 529923 - DNA, 1098 bp, Stenotrophomonas maltophilia
atgaaggctgtatcccttttcacaggcgccggtggcatggacgtcgggttccgcaacgcggggttcgaggtcgcctgggccaatgacttcgacaaggacgcctgcgagacctaccgcctcaaccacggtgaccacatccaccatggcagcatcgatgacctgatgcccgagctaaaggctctggggcgcgacggggacgtcgcctgtctgttcggcggccctccgtgtcagggcttctccgtggccggcaagatggatgcccacgatccgcgcagcaagcttgtctggtcttacatggaggcggtcaagctgattcgacccgccgcctttgtcatggagaacgtcaagtcactagccacgcttgagaagttcagcgcggtacgagagggtctcttcaaggaggcaaacaagctgggctacaacgtggagctggtggtcctcaactccaaggacttcggcatcccacagggccgcgagcgcatgtttctagtcggcttccgtgacaggcccaatcgcttccgcgacttgatcgacgatcacagacgctcggctccgaagctccgcgatgttctgctaggagtaggcaagatcggctcacccactaacaaccggatatgccgcgcgaaggtcaccgccgccgcgagtcccgtgatgcgccgctcaccgtatgcagggatgctgttcaacgggcaggggcggccgcttaacctcgacgggcacgcgtccaccctgcccgcgagcatgggcggcaacagaacccccatcatcgacgacgcagcgctctacggcaacgagacgccgtgggtcgaggattaccacgcccacctgatggatggcggcgacccgatcgactggcagacggtgcccgagcgactgcgccgcctcaccgtggatgaggctatcgcgatccagaccttcccgcaggactacaggttcgccggcccgcagagttcggtgttcaagcagatcgggaacgcggtgccatgcctgctcgccgaagcagtggcctcagtggtgttcgagctgctatccgaaagccccagcgcgacgaagaagcggcgacgaacgtccgacgaattggagctggaaatcgcttga

SEQ ID NO: 529924 - DNA, 1113 bp, Stenotrophomonas maltophilia
ttgacgcaggccattattgaccacgcggctgcccgcgagaagctgaagagcgcactttcggccgcgaaggctgacggttttcagccgcaacacgtgaagagcgatgccatctcggacgtcatgctcgggcgccacctcacctatcgctacgtcctgctcaccaacctgctcgcgaaggcgaccaatggccgcgccaacgggcttgcgctgcaagcaggcgccgacctggatggcgcgttcgactcccgctccctttgtcacaaggtcgtggtggattttgaccgcgacccgaaccagcttgcgggcaagctcggccgttccaacgagccgtacctgaacaagcccgcgcgatacaccgctctcaccgccgagaacgccgtgcggcgcgggtacgaccgcagcatcctcgggaagtgcatcgacattctcggcaacctgcgagacgcggccgacgccgagcacgcgctgatcgacgcgatctattacacgatgcagcgcgagtcgctggtcggagaggccgccgaactcgacggcgacgccacgctccacaaggtcctgacaaagttcgtgagcgccgcggtcgcgcagtcctgtgagggcgagtcgtgcgcgatcgtgaccggcctcgcgttcttcctgctgggtcgcggaactggccgggagttcgagatcaaggtccaccccgtgaatcaggccggctcctcgtctaacgaggtgctcgacgtcgatgtcctttccgatgaggtggtgacctatgcggcagaggtcaaggataaggagttcagtcccaacgacgtcggccatgcggcactcaaagtggcgcatgctgggcttggtgcgttttacttcgtgtgtggaccaaggtcgcaaggggcttttcgcagccaagacctcgtcatcaagattgcggatgaccagagagtccgggtgtccttcgtggacgtcgagcagttcttcgcgatgtgcgcgggactcgccccgcccgaagtgtccgccgacgaggtgtgggcctttgtcgattcggcgatgatgaaggcgcgcgtcaaggacgcgacgcaggcgcacatcctcggggctgcccgctttgcggggttggtgagcggcgaggactga

SEQ ID NO: 529925 - DNA, 2085 bp, Stenotrophomonas maltophilia
atggccgcacatgaaaacgcccacggcgtgctagaccgtgggcgtaagggtgcaaccgaccgggagacggagcctgccagagctcacggggtcaatgatgccgcggggtctgccgcctcgacgccatcatttgaggccgcggcccagtaccgcgacgcccgcctggacctgatcccactgcgccgccgcgacaaggtgcccgccgacaggcgctggcaggatcgcagctacgaccaggcggaggtgctggagcgcgcgaggcgcgacggcctgaacctgggcgtgcgcctgcccgccgatgtggtcgtcgtggacgtggacccgcgtaactttcccgaagggcgcgacagccttgccgacctggccgcagcgttcggcctggacctgacgtctgcgccgcacgtcctgaccggcaacctggagcaccccggccaccacttctacttccgcaagcccgcgggcgccgtgctgctggacaccgtggacggcttcgagggcgtcgagttcaagtcgctgggccgccaggtcgtcgcggctggttcggttcacccgaccggaggcctgtaccgctgggcgcccgactcgcctccgctgcacaagacgccagacctgcccgcacggctggtcgaggcagcgcgcaggccggagaggaggcgcgcaacgggcgcaggcgagatcaccgccgaacagctcgccgcgtcgctggagcacctcgacccgactgacttccgcgaccacgatcgctggctggagttgatgatggcctgccaccacgccaccgacggcgacggggaggcgcggcaggagttcatcgcctggtccacgtcggaccccagctacgcagaccacgagtggatcgtcgggcgtcgctgggactcgctgcacgccgaccgcggcgacgcggtgaccatcgccacgctgcgcaggcgcctcaacgaggtcgggtccgacatcgcgccgcctgacgctgccgaagacttcgacgtgtgggacgaggtcgagccgatcgagccgcgcgctcgcaggcgcttcctcaacgtgaacgacctgaaggcgctgccgccgccgcggtggctcgtgcccggcctgctggtggaggacagcgtcgcggccatctacggcgcgcccgagtcgggcaagtcgttcctggcgctcgacatcgcgatggccgtcgcgggcggcgtggactggcacggccgcagggtcaccgacggcggcgtcctttacgtcgcggctgagggcgcgtctggcctcggcaagcgcgtccgcgcgtgggagatcgaccgcggcatcgacgtcggcaagttcccgctctggctggaccacggcgagatcaacctcgcagccgagcgcgacggcggcgtgcgcgccttcgtcagcgacgtggtggaggaactcgggccgctgcgcctggtcgtcatcgacaccctgaaccagacggcagcaggcgccgacgagaactcggcgaaggacatgggtcgctacatcgcgagcatgaagcgcatccgcgacgagacgggcgcgaccgtcgtggtcgtgcaccactccggcaaggaccccggcaagggcatgcgcggcagctcgtcgctcctcggggcgatggacaccacggtcgaggtggagcgcgacaaggacaggcgcgccatcaccgtgacggtgcacaagcagaaggacgcggagcgcgagccgccgatgcgattcaacctggagcgcgtcgatcttccgggggaacccgactggaacggcaggccgccgtcgtcgctcgtgctccgtccgaccgtgatggtcgacgcggcctccgacttcgggggcgaggctacgagggacgatgggctgactgccctggcgtgcgagctgggcgcatcgggcgggacggtgaaggcgtccgagctgctcgacgccgccaccaagcgcctgggcatgagcaagagctcggcgcagcgggcggtgacggaaaggatccccgagggtcgcatcgacgccgtgcgcgcaagctgggacggtcgccacttctggctgtggtgcgagcgcgtcggcaagcactccacggcgccgaaggtggtgcgggtcgaggccgcgccatga

SEQ ID NO: 529926 - DNA, 858 bp, Stenotrophomonas maltophilia
atgaagatcaagaaaattgtggttggtgtcactgttctgtcgggactgctgctggggacggtgagtgcctcggcgcaggagatcgtccagtatgtgcatacagacgcaatggggtccccggtcgccatctctgatgccaacggcgcgatcatcgagcgcacgttgtatgagccctatggtgcggttgtcggtggcacgaaggaggaccggcctgggttcaccgggcatgtgtcggactcggcgacgggtctgacttacatgcagcagcggtactatgatcctgaggtgggcgcattttattccgctgaccccgtcggtgttgatactaagagtggggctggattcagtcgttatgaatatgcgtccagcaatccttactactacacggatccagacggtcgcttgcctgagaagaaggaggagcagccaccgcctgccgcgcccaccgacttgccgcctgtccgggcagcggcgccggccatcgtcatgccgggtactacaacgttgcccactgtttttgcgacagccgcgcgtcctgttccattggcgcccgtttcttggtcggctgtaggcgaggttgtgatctcgcgcgcttcgttaccactgctgttactttggccgacagaaatgggagcttccccttgcgagttctccggggggcctccgtgcggtgcaaacgtggtctattcaaaagggaaggaaaataagagggatagtgggttgcgtgatgtgtctgatgaggagattaatagacgcgcgcgggatccaagtacttccgcgggcgaaaaaaggcgctatcagactgagcagaaggctcgcggaattcgaaacaaaaacaagcggcaagagaactattga

SEQ ID NO: 529927 - DNA, 183 bp, Stenotrophomonas maltophilia
atggagcatcagttccctacccaatatgtcgagctggtgggggaatacatgcttctcaaggcgaatgtgcacaccgcgaccgtcgatatgctggtactggtgtggcagtggaatgccgtcaccggtcagccggcagtagtgccagaggtgaatcaacgaatcctcaagtccgaggccccttag

SEQ ID NO: 529928 - DNA, 357 bp, Stenotrophomonas maltophilia
atgcggccaggacagacctcgctgcgcagactggcgatcgtcccagcgctgtttaccgtgtggggcatctggtcgatcagccaccgctacggcggttcgctggtggcttggagcgggtggcttgccggcatccgtgcgggtgcgatgcggggctggctgctgctggtaacgttcctggtgaagtgcggatccgaggtggcgcttgcggtgtcacctgcgctgagtgccaacggcaacttcagtgccgcgtatctgctgctgtccggcgggttcaccggcgtctttgttggtcagtacttgcggtatctgcatgcactgcgcaagggcatgcccagtaatttgggcccggcgcactga

SEQ ID NO: 529929 - DNA, 438 bp, Stenotrophomonas maltophilia
atggccagtaaagaacgaaacgccgcccttgactatctcaaaacggccaggcctagaagtagtgcccacaaggtccttagtcaagacgatttccttggcgggctggtcgcgtacattcaatacagcgatagcggaaaagagataaagcagtgggttgtcgttaccgggaagcacaagggttacgctgactccgaaagccagttgatccagcaactgcagactgcgagcaataaagaaggagttgagccgtcttgggctacgagggtgtttaacatctctggcctgattgctctcattctggtcggagcctccgtgtacttgacggttaccacgccgggaggggatgtcccggagcacctgaaggcgtcagtgcttactgtcgttggcttctactttggcggcctgtccaagagcgcacgggcgaagacaggcggctaa

SEQ ID NO: 529930 - DNA, 402 bp, Stenotrophomonas maltophilia
ttgaagctcactaaagttaaagagatccttgcgagctcgtcgcaggacgactggatcgttgacgatgaatcgggttcctttacgtataaggatgacctgaatcttcacattgagcgcgcggcttttgaagattaccgttctttcaacgagtcttgggccacatctcatccggacccagatgcgagagcggtcgaatacatcgtcaagtacggctcctcgttcgtagaaaagcacactctagtggcggtggatggctttcgagcaacactcccgatgccgaagtcggctcaggacttgcacgtaggtagtgcagaagtgaacttcgcaaggatcgtcgacattggcgatcgcatcgatgaatacctagaaaggtcaggaattgaggttgagcatggccagtaa

SEQ ID NO: 529931 - DNA, 756 bp, Stenotrophomonas maltophilia
atgtggcccacactagtcacctgcgcgacaggcattggcccagtgatcatgcgggtcacctcccggcatcgatccagcctgcatcgcgcgcgcgcgcaagatcttctggggtatcgatatccaggcccagctccggcgcttgaagggcatgcacggcattgctgggaagctgcctcaagcgcgttccgaagccgcggtcaccggctgcaccgacgtgggcgaaccaggcacgcggcactactgcaggaatgccaagcgcgtctccatgacgggtgccagcgcaccctgacgccgaggcgcgggcgcccgaaagcagcgcctgcagatgggagcgctcgattgcgggctggtcgcatgccacgaccatcaccgcggtcaccgtgggcagcaggtgtgcgccggcaacctgcagactgctcgccaggccgcgttcccagtggtggttggttaccggggtggcatccagcccggcaatgctggatgtcactgcctgtgcgttcgcgcccaccacgaccaggacctgcgctggcgcgagctcccgcgccaaccgcactacgcgatgtaccagggtctcgccctgccggggaagaagctgcttgggctggccaagtcgggtgctcccaccggcagcaagcacgacgaccgcatgcgcgtcagtcacctgccgtgcgcgcttcgccattgctgcagttgcgcggcaatgctgagcgaaatcgcctctggccctcggccgccgatgttcaggccgaccggtga

SEQ ID NO: 529932 - DNA, 1743 bp, Stenotrophomonas maltophilia
atgcccatcgttggtgcaaagatcaaaggactcaattgctttacacaggaattttgcggattcgatgagtttcgaacgatcaacgtcatcatcggccgcaacaataccggcaaatctcaactggtaaagctaattggcattttgtgcgcagatgaacgccgcaacacgaacgagacgattacatatgaatttcgcgcaacccttgacgaaccggaagtaaaaagggctctcggcagagtaaagatatatagtggatcacttgccgaagaagcatataaaatatggagcacttacgccccgcgacttatagggtcacaggcaaaatggagagaatcatcctcccgttttatagccccgaaggattttaccttaggtccggccgattcttcagaagagagagcgccctttagcctgccagatgagataaaaaacgcaatcaaagatacattgttgacgatagaaagcccatacaaatcaaaggcgtttcgtcaattatctgcagatcgcgatatccaagatgaagtctctagcggagaattgggcctgcagccaggtggcgctggagctaccaacatcataagaagccacctcattaacgctagcaacatcatgaataatcgcgcccttattcaggatgatctccgaaaagctttgaatgaaattttcggccaagacggcaactttgttgcgatctcggtacaccagcacaatgattccagatgggaaatattcctagaggagaaagacaagggacttatccctctaagcagctctggaagcggactgaaaaccgtaatacttgttcttttaaatctaatagtaatcccagctctaactggaagaactaaaagtgaatttgttttcgcgttcgaagagcttgaaaacaatttgcatccagcgcttcttcgtcggctactttcttttatagagtgctttagtcgggagcataaatgcactatattcctgacaacgcattcaagcgtaacgcttgaccacttcgccaggtccgaggacgctcagtttgtgagagtttcccataacggaaatcacgcaaccacacaaaccataacagctcaccttgatcgctcgctggtcgtgggcgaactaggggcgcgcgcctcagacatattgcaagccaacggaattatttgggtagaggggccctctgatgccatctatataaatcattggatacacctaatctcggaaggatcaataattgaaggccgcgactatgcttgcgcattttatggcggctcgctactggccaggttaaccctcgaagaccccacaagacctaacccggaggacctaataagattgttggcactgaacagaaatgccgccatagtttgtgatagcgataaatcttcggaagatagcgagctaaagcttcgcgtaatacaggccaaggaacaggtcgacgctctcccctatggatttatctggattacggacggaaaagagatagagaactacctcccaggctcggtaattgcgtcatctctcaacattcaatccgcgccagatcccggtaaattcgaattgctcttccccagccgtgcagcagacaaaatcaattcatcgtatatagaaaaacatctaaatagaagctccatcgataaggttgagctagcactatcatcacgcagctacacgacagcagaggcaatgagcagccgctttgattgggaagataagatgaaaacccttatcgatgtcattagaaaatggaacgaatag

SEQ ID NO: 529933 - DNA, 480 bp, Stenotrophomonas maltophilia
atggatatgaggtgctgggcagtggtgggtctcctgtcgttcgctgcttctgccgaggctgcgaacagcctgtcgtgccaactgcagagcggccagtttcgggtggatgggggagggcgtcctaaagtctccgagttcatctgggccaccggacacgcctccgttccccccaccggccccatccgaacgcggatcggccgcatcgaccccgtagaaggcgaggactacaagcgcgctatcaagctcgatggcaagccggtgctgttgcctgctgtagcgcatagcgtcattggcttcggcaaggtctacgacttcggaagcgctgttgccttggcctacctgggagagcgcgacgaagactcgtccgcccggcctagccagattgtgatcgtcatcaacaaggctgggtcagtaattgatagcgatgtgctccctggcacgagcctcaacccgggcaagcactgcttgctcatcgactga

SEQ ID NO: 529934 - DNA, 267 bp, Stenotrophomonas maltophilia
atgtacgtcgaggtgtaccgccgctcagggttatgggcccaactgacgggcactgttggctggcgatggcgcctgcgaacattcgacggcgtgacgttaatcgacgcacaagagactttctcggaccggcgcagttgccttgcactggtggccctgttgatttcagggctcaatgctcgtgtcgtggactcgcaggtcaagcgtgtcctgcgccggagtggtgaagactggctcgagggtgaagagttcaacccagccatgctttga

SEQ ID NO: 529935 - DNA, 1176 bp, Stenotrophomonas maltophilia
atggaccgtgagcgctcggcccttcatcgtaaagggccgattccggttcagatcagccagatgaccagcgccgccctctgcctttcagttgctttgcagcttccggcaacccctgccccattgaccatggatcccgattccctcgcggcgcttcagcaggcgctgcaggcatttggagagttccagcaaccctattctgctccgatcgacgtgaacaatcctggcgagggcgtgatcgatgcagcagtcgaggtgtccgcggggtgcgtgcaagacggcccgccagtcatcatccttgacgatgatgccgaacaggcgccgcaacgttatctggttcttgaagcaccgtggcatgagcttccaacaggagcgctgttgctcgtctccggaaacagggcaagcaccattccagcccaggaatcgaatccggcgcttctacgcgccgaggggatgctgacgttcctggactatctttcactcgacgtcgactggaacgcgccgaccgccccaggcgtcggagtgcaagcagcgggcattgaatccgacgcgttcatgcagaccttcaccgcgagttccaaaggcggggcggttcccgaaggtgccctagcagcatgggagggtatggtgcccgatctgctgctggcgctgtggcgacgcgatgggttcgcacgctatcgcgacgacaggctcgtcttggtcgatccccacctgtatgcggaggttgctaccgcgttcctgcaaggcaattccatggagggtgccgatacgttccatatctacgcggtgacggctttcggccagattctgctgtgtggggagaacacctccgcgcagatcagcatcgatccgcacagcggacacgtctcgacagaatcggatgtaccagaccccgccgatgcggcggaacgcaactggaaactggcgttcctgctggaggccctggatgggccctatcttgacgtcaccgacgatgatgagcagcccctatattcccatgcacgtgaccgactggggccattggctccgaatgagatctacagtttttcgcccgcggtttccgaaggtggctggaatgcggcgcatctggtgaaggtggatcgcctcgccgagctgaaagcacttgctgcaacagtgaccagggcgcaatcaacgcaaccggatgtcagtggcggatag

SEQ ID NO: 529936 - DNA, 351 bp, Stenotrophomonas maltophilia
atgaagggctttcactctgatcgtcagaagttcttcgaggagctggacacttacaccgtcgctgacgacgtagagctggacaaccttgatcgcttaatgcaaagactggcagacgccaacagcacggagagttcccagcccaagatttctttggatctagctggactcgctatcgttgaggctgacgccatctggggcgatgtgattgccgtctctgcgaccagtcgtctggtccgctcatcgaaaagtggggtaatagcgattgggtgggccaggggcgaaagtttgcgcatgatccagagtgtccgttctgtcagcaacatctgccggctggcttcgccgaagatctag

SEQ ID NO: 529937 - DNA, 300 bp, Stenotrophomonas maltophilia
atggtccgtggctacatcgtcggtatctacgatgcggcttcgcaactgaccggcctcagcttggttgacgaaagccagtttgttgcttacatgaagctctgtcatttgacgctgttggagggggttctcgacgatcctgcggcattcgccacgctgtccttgctcacccaggcaatgccggagttcatggcgggccaggagctaggtgggcaggattacttccgatggagtgaagatcagtcaacaatgccaactgggcttgctaaatggctgcatgagtcaggccgctctgacaactaa

SEQ ID NO: 529938 - DNA, 2043 bp, Stenotrophomonas maltophilia
atgcgtggtgtcctggctgttgctgtttcccttgccctgttcgccggccaggccgcggccgcgccgcgcccggactacgtcggcaccaccgagccgttcgccagcgatgcggtgtacttcgtggtcaccgaccgctttgtcaacggtgacccgtccaacgaccatcgtgaccagggtggcgcgcaccgcaccttcgatatcccggtgccatgcccggacaaggtggacggcaacatcggctacctcggcggcgacttccgtggcgtgctcgacaatgcgcagtacatccgcaacctgggcttcggtgcggtgtggatcacgcccatcgtcgacaacccggacgaggcctttaccggcagcaagccgatcagctgtaccagcacgctgaccgatcgtggcaagaccggttaccacggctactggggcatcaatttctacaagctcgacgagcacctgccgagcagggacctggacttcgccgggctgaccaagggcctgcacggtgctggcttgaaggtggtgctggatatcgtgggcaaccacggttcgccggcctggaccatgccgacgcggcagccgcagttcgggcagatcttcgacaaggacggaacgctgattgccgaccaccagaacctgccgccgcagaaactggatccaaagcacaacccgctgcacgcgttctacaacaatatcggtccggtcgacagcaaggacggttcgatcttcgacggcaacctggccgagctgtcggacttcaaccaggacaatccggcggtgatggactacctggtcggcgcctacctgcagtggaccgcgcagggcgtggacgcgttgcgcatcgacaccatcggctggctgccgcacccgtggtggcatgccttcgtcaagcgcatccgcgccgagcatccgggcatgttcatgtttggcgaagccttcgactacaacgcggcgaccattgccgagcacacttggccggccaacgccaatgtcagtgtgctcgacttcccgctgcgcggtgcactggagcagaccttcggcaccgccggcaagggcttcgagaccttggccgagccgctgcacctgagcgacggaccgtacgccaatccgtacgagctgatgagcttctacgacaaccacgacatgccgcgcctgcaggccagcgacagcggtttcatcgatgcgcacaactggctgttcaccgcgcgtggcattccggtggtctattacggctcggagaccggtttcatgcgtggccgcgcagagcacgccggcaaccgcgcctacttcggccagccgcgtgtggatgcggcgccgaagagcccgatcttcgcgccgctgcagcgtatcgcgcgactgcgcgaagtcaccccggcgctgcagcgcggcctgcaggtgaatgagcgcctgcagggtgatgaggcagtgttcttccgcgtgctgcagcatggcgaggtggcgcagaccgcgctggtgctgctgaacaagggtgaccagacgaagaccttcagcgtgacgcgcttcgttcaggccggccgctggcgtgatgcgctggacggcggttcgttgcaggtgaacggtccgctgaaggccgacgtgcccgcgcacggcgtgaaggtctacgtgctggatgccgccgttcagcagccggcactaccgggtttggccgcatccggcacaataggcacccctcacgccccgccgtatcgccatgaccgacctcgccccgcagaccccgatcgaaaccctgctgaaggcggcgatggacggggcggtgccgatccgcgccttcatggaggccttcgtcgcttccgaggtagtgctgctgaccggcagcctggtcaccccggacggcagcggcttcgacccgctgctgttcgacaagcagggcaccctgcatgtggcggtgttcaccgagccgtcgcgggtgggcgtctacagccagcaggcgcaacaccagatccgctggctgatgctggacgtgctgcgccgcgtgccgggtggctacggcgtggtgatcaacccgggtacttcgctgggctttga

SEQ ID NO: 529939 - DNA, 900 bp, Stenotrophomonas maltophilia
atgcccaagaaagaagatggcgcagttgatgtttcgctcgatctgctcgggatcaagccagtagctgcagccgctgagcatgcttccaaggcagttgtggatggggtaggcaagttcctgtccgcaatctgcatgccagcagctgaagagattggactcgctttgcgtgaccgtgttgcacgctttcgccagaagaatctggccgatatcgttcacaagacgcaggagcggctcgaacaacaaaacgccgttccgaccggtgaatgtagtcctccgctcgtgaggcagatcattgaggaggcgtcttgggtcgatgacgcctgcatccaagatatgtgggccggcttgcttgcgaccgcgtgcacaactgaggttgatgattcgatcctatataccgacgtgcttaagcggctctccccgtttcaagcaagggtgctgaacctgctctacagcgaccctagaacctatgacattgcaggtttcgcgcaacttcgggatgaggagttctcgccacgctatccggttatctatccggtggaagagattcttggcctgttccctggtgatctgtcgcgctttgtgccaatcgagggagctacgcatgcatcgatcctcgctgatgccggcctccattacttggcgatcggtcgattccgtccgcagctcgatggcctcgtagcgctcggcttggccaggtttgcgcagatcgctcctgctgtgaggaacgagcgtacagtcacagtgaccttccagccctcggtgaagggtcttgatctctacatgaggggccaggggatcactctgtatcctttggaagcgttcctggtcgctcgcaatcaccagtaccacagcatggggatgtccccgttcgcgagggacgtcgacggcaggaagcgctag

SEQ ID NO: 529940 - DNA, 345 bp, Stenotrophomonas maltophilia
atgccgctgccccccgacttctactggacgacgcgctctgccagcctccccgacgatgcccccacggtcatcgcctgcagcggcgtgtgggtggccgtactgatgcaacgggtgaacgacgggatctggatcgccagtctcgaccggcaccggcatggccccggcgggccgttccgctggtgtaccagctaccagcagggccgcaccggcgccgagatgtgggtgaccaggcacgagcggcggctgcgcgaggacgtggcagccatcatccgttggcgggaggctgtgcgtgcgaacaggctgacgaagttgaacactccggcgccgttcggttggatagggtga

SEQ ID NO: 529941 - DNA, 1104 bp, Stenotrophomonas maltophilia
atgcctaggccgtcgtcgacgaagagcatccttcctgatatcgttgcggccatgaagaagagccaagcatccaagcccatcgttgccgttgacctcttttgtggcgtcggaggcctttcgtacggtctcaagcaggcaggcatagacgtacgggcgggctatgaccttgatggagagtgcagctatgcgtacgaggcaaacatcggtgccccgttcatctgtaaggacgtgcggcatgtaacggccaaggagatcaaggaccacttcccaccgggttgcatttcgctcttggccggctgcgcaccatgccagcctttctcgtctcacatgagaggccaagacacttcgaaagatgagaagtggacactcctcgatgagttcagccggctcgcacgagcggtgcgtccgcatctgataaccatggagaacgtcgtccgaatctcgggaacggatgtatttcagagttttgttcaatcactagaagacgagggctatagcgtcgcctataggtcgtgctttggaccaaggtttggcttggcgcagaaccgccgccgattggtgctagtggcatcccggatcacgtcgatagatcccgttccagactccattggacccatggaagcgccgacagttcgtcaggttataggcaacctaccaccgctcgaagccggctcttgcgacgcatccgacagcctccatagagctaggacgctgaccccgattaatttggctcgcatgagggcgtcaaggcctggcggaacatggagggattggccgcaagacctactggctccgtgccacgcaaggtcgactggagctagctttcaaagcgtctacgcacgcatggagtgggacaagcccagtccaaccattacgacacaagccttcaacttcggaactggccgcttcgggcacccatcccaagatcgagcgctcactctcagggagtccgcgatgcttcaaggcttccctgagacatacaagtttgtaaaacccaacgatgaaataacgttcttgaacgtaggaaggcaaatcggaaacgccgtcccccctccgcttggcaaagcgatcggggcacatttcaaggaacacctcggttcttaa

SEQ ID NO: 529942 - DNA, 2166 bp, Stenotrophomonas maltophilia
atggacgaatcaaatacgactgccaacccacaacccggcacgggagcggctgagccggccaaatctcctgacgcggacgagcggctcaccttcaggctccatctcaacgtcctgcatcatctgggaatgaagctgtactcaaccgcgccgtcggtgttgacagagcttgtcgcaaattcctgggacgcagacgccaccaaggttagcgtcactattgatgtcgcaaataacacgctcaccgtcgaagatgatggacatggaatggatagacgctcccttcaagagcgcttcctaagtgtcggttacagcagacgtgactacacccagtctgatcacacagtgtcaggcgcgcgtcgcgtcatgggcagaaaaggcattgggaagctagcaatgttctcaattgccaggagagttgaggtcaccacgcaagcccaaggccagaacgcaattaaatttgctgtcgacgttgacgcactggaacagaaagcaaaagatgacgaaccctactttcctgaagaatacgaggatgtagaaaacctgccttccgggagcggaactcgaatcgtcctttcgaaccttggaaaatctgtaaacagaagcagagattacttggttccacgcctagcaaggcgatttggaattatcggcccggcgcacaactttgtcgtctcagttgacggcatagagatcacaaggcgagatgcgggaattcacgaaaatctccagttcctttggtatttcgaccaagcatcatatgacgaggcaatagcgcaaaattcgccactagcgcatcccgaatctctcaacggaaaaccggccgccaagaaacttagcgatgtaattgccgttgaccaccatgcatttcgggttcgcggattcattggcacggttgacgttccgagcaaactaggccctgccggcgagaacattaatcacatctctctgtttgccaatgggcgactgtggcaggaagatctgctgtctcagattggtgatacgcgctacttcaatagctacatcgtcggagaaatccacgccgatttcttagattctgacggcgttgacagggcgacatcagcacgggaagccgtaattcagcacgacccctactaccaagcgattattgctcatttgaccgaatcattggcatccattcgtgaccagtgggatctgtggcgaggcgaagtgggcggagtcgatccagacggaccaaatgaagtgcttgaagaatgggtggagagccttgagcaaaaaactgacaggacactagccaggaagctaatccgctccattgacaaggtcgaatttaacaacgacccagagcgcaaccggcgcgcccgcgcaatgctctacagaagtacgatggtggcattcgaaaagcttcgggttcgaaatgctcttcaaagactggaaatgattgatgacgtcctgtcccctgaatttcagtcaattttttcgacattagacgacgtagaggaaagccactactacgagatcagccacggccgactcgagataattcaggcattcgagcaaaaggtggatgacaaagaactcgagaaggtagttcagacgtacttgctgaagcatctttggctactggatcccacttgggatcgcattggggggagcactcagtcagagatcacgctatctgaggagctaaaaaaggtcgatcccgacgcagatggcggcgcaagactcgacatcgcgtaccgtcagcaatcaggccgaaatgtcgtaattgaactgaagaggcctggtctcaaggtaccgtttgccaagatcattgagcagtgtgacaaatatcgtcgtgccgtagaacagttcatcaacgataacgccacttggatggatggtggaggagcaccaggagcagtgtcaatctactttgtgtgctcggtgcgatctcacctcgacgacactcagattcagacgctggacaaaatgggagtcaaggtgctcacttatggcaacctcattcagagcgccagggctgcatatgaggcctacttcaaagcacgcggagaggtcaagaatagactcgagagcttcctcaatcgaattgatgtaaccgcgggcagcaagaatcaatctgcactgggaactaaacctctcgcacaggccatgcccataaaggccagcggcgccgagcaagccgcgtag

SEQ ID NO: 529943 - DNA, 1047 bp, Stenotrophomonas maltophilia
atgacgacgagcagtacaagacagagccatatcccgctgcggcagatgctgtacggccacatcgatcaactagaccttgccttggatcagctcgcgcttagagacgcgaactttgatcgctttgcgattctgctcgtagacaacgtggtcgagttgacgttgcaccggtatgcggtagaccagaaggcaaccttcaatccgtgggacaaatcgggccagtcccagatcaatccgaaagtcttgggggatgcgctgggccagaagttcgacgcgaaagtagcgctcgcatcgcagacagggctgctgtcccagccgatgagtcagtccatcaactggcttcatacgttccgcaatacttcataccattcgggattgagacacgaagggatcctgaattccctggctaatctctaccttcgcatctgctgtgatctcttggctgagtacaaacccaggttttggtcgtctggttccgaaaaaatgtcgcatcgggcggccaagtacttaggttcgaccgaggtgactgtttcggcatggataacagagaacccattcgatgaggcctgggcgcggctcaagagcgttgcgttgagcatgaactgtagtttgatcgccgacttggctcgggacatgggagcgacgattcaatcggtagacgatcagatcaatcatggcgtcgcttacaaggtctcgcatcttgaaagccacccaagagacgtagtggtaaccgaggcgcagtttatggcgctcgcgtattccaagaaaggcgtggagtacgcgaaagagaacggatacgcgggtacaggcgggccgagcctgcaaacttggttcagacagaactacaagctccagatctccaccgacccaatcccaaaatggaggcgacgtcttgggaagcttgaaaaggaaaaggacgagcacgctggcctgaatcagtactgcaacttcatccagcaaacgcacagcattcgggatgatatatcgcagcagaacgagttcttctggcgtgagattgacgactacagtgagcgattcaagccgcgctaa

SEQ ID NO: 529944 - DNA, 165 bp, Stenotrophomonas maltophilia
atgaccgggttgcgtagcgcgtgtggcagcggtgggaccggcatccggaccggcatcgggaccggcatcgggaccggcatcgggaccggcatcgggaccggcatccggaccggcatcgggaccggcatcgggaccggcatcgggaccggtagagtcgactgttag

SEQ ID NO: 529945 - DNA, 1293 bp, Stenotrophomonas maltophilia
atgtatatccatagagtgatccttagggacgttaagggctttcgtaatctagagctgcgattcgacagaaaagaacagtctggggcgaaagtctattccgggtggaatgtacttacaggagataactccgctggcaagacgactgtcctgaaggcgattgcgctcgcacttgtaggtcccgacatagcaagagcacttcaaccctcgtttagtgggtggatacgggacggcgctgaagatgcttctattgcagttcaaatattcggcggtgaagaagataagttcaccactggacgcccacccctggagcccttctatgcagagattgcgctagaaaagcgtagtggtgagatctatcctatcgccggtaacgaatatgtaaagaagaaaaagtctgcattgaatgggccttgggcaattggtcaaggagcgtggttcgccgttgcgtatggcccgtttcggcgactttatgggacttcgaccgaagcgatgagattgatgtctgcgccgggcaggccgcctaggtttgcgactctattcaaagaggacgcaactcttggcgagggtcagacttggttgaaagagctgcagtttaagtctctcgaactgaaggacaaagaaaagggccttctccgggacgttctggatatattggacgctgattttcttcgtcatggactacgtgtcgatagggttgattcagaggggctttggctgaagaatgagctcggcattgtccttcctctctccgacatgagtgatggatatcgatcctctctagcgctacttattgatatcctcaggcatctttctgaagtctttcctggggcgcccctcattctcaaggatgacgatgagcagccgtatgttccgcactccggagtggttctaattgatgaagtagatgcccatcttcatcccgaatggcagcgtcagcttgggttctggctgaaaaagcacttcccaaatgtccagtttatagtgagttcgcacagcgcatttgtgtgtcaggctgcggatgatttaggggtttattacttgacagggtcccagggtgattcgacatctacccgggttagcgaggaacagtggaagagtatcgtctcgggcactgcggatgatgtattaaggtctgtagccttcggcttgactcatacgcgttcacctcgggcagtcgacgcaaggcgtgaatggagtggactcaaggcaaagaagaatcgtcttggtatcactgctgatgaagagaagaggatggagcagctgagtctttttgttgactcggacatggattga

SEQ ID NO: 529946 - DNA, 768 bp, Stenotrophomonas maltophilia
atgcgaagctatagaagggataatctatctgttcgcgcagcccggtggctggagaataactcaaatgatctggtggctgacctcactatcgacgtcaccacgagatggactgcgcgcaggcagacgatgaattctaatggaattgtcggtgttctgtcaggcatgtgcggttacaggatccgatgtatgtattgcggagattctgaagcatgtgacgttgagcattttttcccgaaggctgtttcacagtttcgagatcgggtttttgattggaataatcttctattcatctgtactccttgtaataggcttaagaatgctaaattcaggattttgcctagtgggtctgcagcctttataaatcctgtggaagatgatccttggagcttctttgattttgtagaagagactggtgagcttgtcccgcgggctgatctagagggagatgccctcgatagagcaaattctaccattcatcccgaaaattcaagaattagtttcgagacgattacggagtcaagaaggcaagctgcacgatcaattcgacgtgctgtagagagttttctaaggactgacaggaatgaagctgattctcgcgagttcatagcagatctaatttcaactggtcgccctgaacttgtgaggtggtacttctcgggggagtttcctgttgggcggttttatgaggaattctctttggagtatgcgagtattattcctgaggttcgatgcgagattgcaggaaagtatccgggcgcttggccttaa

SEQ ID NO: 529947 - DNA, 426 bp, Stenotrophomonas maltophilia
atgccccgtttgaacaccgccctggcactgaacctcgttctgatgctgctgggcgctacacccgccatggccatggcggcagacctgcaggtcaccactgaagtgttcgtagagcgcggcgacaaccccaacttcgagctacagcgggcaccagttgttgtgtactcaacgccccccgtcaccccgcccgatttcttcctgcaggctcccatgaacctggtgttggttgcccaattggatgagctgggcttcgtttccatcgcgatggtggcgcggtccagcgggctacgggagcttgatcgtgcggcccttaacgcagtggaccagtggcgctttgatccggttgtggttgagggcgtcgcgctgcatgcgcgggttcgggtgcgtttgagcttcgtgccttcggccgagacgcctcctggctga

SEQ ID NO: 529948 - DNA, 279 bp, Stenotrophomonas maltophilia
atgaagttcaatgttcgaatcatttccacaggggaagtcatcgaactcgatgagtctcaattggaaattgagcaggatggcggtgatgagcgaggaatgggtgcggaactttcgtactctgcgaccttcgaaggtgaaggcttcagggttcgctgggagtttacggagtatccggccggttgtctgggaagtactatcgcgaggcacgaaaactgcaccaccgatcatgagcccgactttagcgatgtggttgccttcagttccgaggactcagagtaa

SEQ ID NO: 529949 - DNA, 945 bp, Stenotrophomonas maltophilia
atgtatagcccttatctctgcggtcgccgctctgagctacttgctcttcggaatctgaagtcagagaacgtagacttcgaaaaatttgtccctgtagttgaaccggtactagaaaacacaggagatcttctgcgattcatcgatacttacggcagggaaggaattcgcgccgttatcatcatgaatccacatcggcatcaatacaaaggcggtaccggagtcgcaagcaatttacgcaaggatctggccgattcgttcgctaagtacacggacctaattccaggcttcatatgggatgcgaagacaaatgttactcaggctagcgccttccagaagatttattccgacagacaggtcgccttcctacttgatagccctgtcattagtgatgcggatctaaagtccattgcaaacagcccagaaacagtttttgtcttctcactcagctcaagcgtaggcaagaagcaactcgcactcatcccgaagtctaagattgtttcgatccgcgatggattcaaaaagcttccacggaatgctgattacaacggcgttgagttcttcagtgaccagcaccaactagtcggcaaggacttcgcaggaattggggattacaccattaccggcaaagcgctggagatcgggggcggaaaacccggcgcagtggcgattcacgcctccttccgtccgaacggcaaagatgaagcctggatagagcacttcgtgtcggacgagatcgaccgcgacgtgggcgacgccgcctccaaatttctcgaagcagccaagaagcttgtacgcgccgcgaaaaagagacctacagagtttgtaaccaataccgcgctagatgcgtaccgtaaacatgtcgctgaggacacttttccgggacttgggaagaacaaggagtatcagattcgccaccacatcgttcagatgctcgcacttctttga

SEQ ID NO: 529950 - DNA, 864 bp, Stenotrophomonas maltophilia
atgagtgactccactagcttttcccacatttgctcaagggcgctcagtagaccggtattcaccgcacttgcgaagggagccgaccctcttaagatcctcgcaccgctgctagaaaaactagccgagcgcgaggttcgcagtgtcgcaggcgtactggagctggccttcagtcacctcagcaaccaccataggaatgagtacgtctacaagagtgcagtgattgatcgtattgtgttcgggcgacacagccccgccacttcagccgttggcatggagctccacgtcggaaaatctattgtcgacatcgcggtcttcaacggaacgtcgacggcttacgaggtaaaaagcgagcttgactcgcctcgccgccttacttcacagaccgctgactacctcaaggctttcgacaaggtatacgtggtcgcgcctcgtaacaatgcacaccgatacgtgtcgttctgcgaccagcgcgtggggatcatggagctcaacgaaagaggatccctccgcaccgttcgcgaggccgctagcaatatccacaatattgacacccgggctctgtttagaatgcttcgacgtgacgaatacgttggcgccattgagaagcacctcgggcagaagatctctttacctaatggacttgtctcgcagtactgcgagaaagaattttgcaaactctccgtcgaggacgctcacgctatccacttgaaagccatgagggggcgaacgaccaacaaggaatttgtgggctacttaagggctctccctaaccacctacgcgccttaggctattcagcgaacctaagttcgacgcagcgaagcaagattcgcgaggtacttgactctcacgcgaaattaacttaa

SEQ ID NO: 529951 - DNA, 207 bp, Stenotrophomonas maltophilia
gtgccggcgtctgcagcactgcgcctgaagattgccggcaacgagggcgcctacgcgttctcgttcgacaccggcgacgggcagggctggcaactgctcgcaggcgacgtggacggcaccgttctgagtacggaccgggcaggcggcttcgtgggcgcactgctgggtcccttcgcgcgcgacgagcgcaccgggagaagcaaatga

SEQ ID NO: 529952 - DNA, 1059 bp, Stenotrophomonas maltophilia
gtgaccaacaccccgtcttccgccccctcccccctcacctaccgtgacgcgggcgtcgacatcgacgccggcaacgcgctggtcgagcggatcaagcccctggtcaagcgcagcttccgcccggaagtgatgggcggcctgggcggcttcggcgccctgttcgacctgtccaacaaataccgcgagccggtgctggtgtcgggtaccgacggcgtgggcaccaagctgaagctggcccaccagctgaaccgccacgatacgatcggcatcgacctggtcgcgatgtgcgtgaacgacgtgctggtgcagggcgctgagccgctgttcttcctggactacttcgccaccggcaagctggacatcgacaccgccgcagcggtggtgggcggcatcgccaacggctgcaccgaggccggctgcgcgctgatcggcggtgaaaccgctgaaatgcccgacatgtacgccccgggcgagtacgacctggccggcttcacggtcgctgcggtcgagaagagcgagctgaaggacggcgccagcgtggccgccggcgacgtgctgatcggcatcgcctcgtccggcccgcattccaatggctactcgctggtgcgccgcatctacgaccgcgccggccgcccggccgacctggaactggaaggtggcgtgaagctggtcgatgcgctgatggcaccgacccgcctgtacgtgaagccgatcctgtcgctgctgaagtcgcacggcgacgccatccacggcatggcccacatcaccggtggcggcctgaccgagaacatcatccgcgtggtgcccgacggcctcggcctggacatccaggcctcgtcctggaccctgccgccggtattccagtggctgcagaaggaaggcgcggtggccgacagcgagatgtggcgcactttcaactgcggcatcggcttcgtgctgatcgtcgcaccggaccaggtggctgcggtgtccgaggcggtcaaggcgcagggcctggagcactggaccatcggccaggtggtcaccgccgaaggcgccgagcgcgtccgcatcggctga

SEQ ID NO: 529953 - DNA, 1281 bp, Stenotrophomonas maltophilia
atgagccaggatgacattcccgaccatgccgccgatgccttgccttcggccgacaaggtggcgcctgagacgatggcgctgcgcgcgcagccgcgcccggtcacgcgcctgaaccggcgcacgctggccatcctcaccggcggcctgtcggtcgtcgtgctcggggcgacgatctggtcgttgcagccgcatcggcgcaatgcgagcgaacagaccgagctgtacaacgtcgatcgcgtgtccaagtccgaagggctggacggcctgccttcggactattccaagctgccgccgaaggtgccggagctggggccgccgctgccgggcgacctcggcccggccatcgtgaagtcccagcagcccgtgacgcccgcttatgcaccgccgggccacgacccggaggatgcgcggcgcaaggaggccgacgctgcggcggcctcgacggtgttcttccgctcgggccagcagggcaaggccgcagcgcctgccgctacggctgcgccgggcagcgccttggcgggcttcgacccgctcgccgctgggccggcctcgacggcggcacaaactcaacaatccgcgtccgacccgactgccgtgcaaaaccggcaagaccacaaagagtctttcctgaaaggcggttcaacggaaacccgcaattccggcaatctgcaaatgccggcctcgccgtaccaggtgatggccgggacggtgatcgcgggcgcgctggtcacgggcatcaagtcggacttgccgggcgacgtgatcgccacggtgacggagccggtctacgacacggccacgggcaagttcctgctgatcccgcagggctcgcgcatcctgggcaagtacaacagccaggtgagctacgggcagagccgcgtgcaggtggtgtggaaccgcatcatcctgcccgacacgtcttcgttgaagctcgacaacctggcgggcaccgatccggccggctatgccggcctggaggacggagtcgattggcattgggatcgggtctttgccggtgcggcgttgaccacgctgctaggcgtgggcgcagagctggccgcgccgcagaaccggcaggacggcaaccgagtcatcatcgccgggcagggcagcttgcaggacagcgtgaaccaggtaggccaggagatgactcggcgcaacatgaacatccagccgacgttgacggagcggccgggcctgccggttcgcatcatcgtcaaccgcgatttggtactgcggccgtatcagccgcttttcttcaacaggggagcgatgcgatga

SEQ ID NO: 529954 - DNA, 228 bp, Stenotrophomonas maltophilia
atgaacaagctaacgctgttgatgctggccgccacgctgaccgcttgcggcccctcccaaccttccgaaaccgtggacttcctcgtggcccatcccgagcgcatcaaggaaatccagcggctgtgcaaggaagaccgcgcgaaggtcggtgaagaactctgccgccgcgccgccgaagccgccaatcggcgcttcttcggtgatcgggcggagcagaaatccaagtag

SEQ ID NO: 529955 - DNA, 915 bp, Stenotrophomonas maltophilia
atggaatttcgacatcttcgctgctttctcatcgttgccgaggagcttcatttcgctcgcgctgctgaacggctacacatcgatcaatctccactttcacgcactatcaaggaactggaagaagaactcggtgcccgtctgttcgttcgtaccacccgcagcacccaactgacccgtgcaggtcagtcgttcctcacgcatgtaccgcgcgtcttcaccgcactggagcaagcccgcgatagcgtcaagtccgctaccaacggctttcatgggcagttgcgcattgccctgtcggacggcatcacgccatcgcgcttgcccgccttgctagcgcgaagccgcgaggaagatcctgaggtggaaatccggctgttcgaggtgcccttggatcaacagatccagggcctgcacgatgatttgtatgacgcaggtttctcgatggcggaaaacgcgggcgatggcatcctggtcacgcccgcatgggaagacgaattgatggtggctgtgcccgcccgccatcccgtgctcgccttcaagcagattccgctggaggaagtgctgcgctacccgctggtgctgggcgaccccgcagtatgcgaaggccatgctcgccaggtggatcgctttcttcgcacactcaatcaagagcctttgatcgtgcagcgcgtggcgaccttcgacgtgatgatgactttggtttccgccggcctggccttggggctcgcgggcacagcgcacatcgcttccagccgcgaacccggcgttgtgggccggcccttggcgggccagccgcccatgctgatgacctatctgctgcgccgcgatgcggaaccctccgagatgttggcccggttcatcgaacgagtggcctttattgattcggcggatgacctgggcgccgccgaagactcctga

SEQ ID NO: 529956 - DNA, 291 bp, Stenotrophomonas maltophilia
atgagtgccgcgccgcagttttcgtctgagccgcgctcgtcgcttgccacctcgctcgaccgccgcatccagatgctgcgcacggcaatggggccgctgatcgccgccgcgctcgaagacccggacgtggtggaagtcatgctcaactcggattgcaccttgtgggttgatcggctttcgtcaggccgatctccgatgggctggagctgcccgaagccgatggcgaacgcatcatccggctggtcgccgcacacgtcggcgcggaagtccatcgcggccagccgctgttga

SEQ ID NO: 529957 - DNA, 1143 bp, Stenotrophomonas maltophilia
atgacagcaaagtcgcaatccatgctttatgaatcctttcaattcaaggggatttcgttcaagaaccgcattgtgatgccgccgatgacccgatgccgcgccgcgcaaccgggcaatgtgccaaccgcgctgatggcgcaatactatggtcagcatacggacgccgggctcatcatcgctgaagcaacgcaggtttccgaagacgcacaaggctattcctttacgcctggcatccacagcaaagaacagatcgaagggtggaaactcgtcactgatgctgtccatcgaaacggaggccagatcttcctgcaaatctggcatacggggcgaatgtcccatgcgtctttccaccacggtgatgcgccttttgcaccgtcggcgattgaaacacctgacggcacgacggtttggatcgccaacgaagacggcagtggcggctcgatgcaccgctgtacgccgcctcgtgcaatgacactcgcggagatcaagcgcgttcaggatgacttcgtgcaagcggcagcgaatgccaaggaagcaggattcgatggcgtcgagctgcatggcggcaatgggtatctgatcgacgaattcttgcgcaaaagctccaatcaacgtgatgacgcctacgggggctcgccggaaagtcgcgttcgattcgtggtggaaatcctggagcgtctggtcaaggtttttccgccatcacgtatcggcgtgcgcttcgcaccacacaaccagtcgcgtggcatggatgacccggatacgcccgaaaccgtgctgctcgccttggtcaagatggcagcactggatattggttatgtccatttcgcagaggtggattgggacgccgagccaaatgtcccggaggaattccgtgccctggcgcgcgcggtctttccgaatctgatcattgtggctggaaactacacccaggaacgggctgattggactctggaaaagggctatgcagacatggtggcattcggccggctcttcatcgccaacccggacttgccgcgccggttgcaggagcaactgccgttgaatgcgctccgccccgagcatctttttggaggcgaggctgaaggctacatcgactatccacgttctgaagacgcggcagcgatggcgcaagcgcgggagtag

SEQ ID NO: 529958 - DNA, 795 bp, Stenotrophomonas maltophilia
atgaggatcgaactttctggcaagaccgccttggtcacagcgtccaccgccggcatcggttttgccaccgccaaaggcttggccgaaagcggcgcaacggttgtgctcaatggtcgcagcgatgcctctgtcgcaaaggcgcgagagaagttgctagcggcggtacctaacgcccaacttcttggcatcgctgccgatttgagcgattccgctggcgcggacaaactgctcgcggctttgccgtcggtggacattcttgtcaacaacgccggtatttatgagcagcaggacttcttcgagagcgatgacgcactctgggagcagcactggcaaaccaacgtgatgagcggagtgcgcttgtcccgcgcgctgttgccgcaactgatggcaaaaggctggggccgcgtggtgttcatttcatctgaatccgcgcggaatatccccgccgacatgattcactacggcgtctcgaaaaccgcccaactggcgctatcgcgcggcttggcaaagcgggttgccggcagcggcgtgacggtgaactcggtactgcctgggccgacgctatccgatggcctgataacgatgctcgctgaagaaatcaagcacacaggaaaaagcgccgaggaactggcgaaagagttcatccttgcccaccgcagcagctcggtgattcagcgcgttgcaaccgtcgaagaagtcgccaaccttgtcatttacgtctgctcgcccctgtcttcagccacatccggcgcagctttgcgcgtggacggaggcgtagtggacgacatcatatga

SEQ ID NO: 529959 - DNA, 717 bp, Stenotrophomonas maltophilia
atgcctaactttagaaacaaaaacgtcttggtcatcggcggcagctccggccttggcgaagctactgcacacgcctttgccgatgccggtgccagcgtaaccatcgcctctcgcagtgctgacaagctcaaagcggctgccgaacgcatcggtcaaggcgtcagcagtgtggtgctcgacaccacggatgacgcggccgtcgaagcatatttcgccaaggcagatgcgttcgaccatgtggtcgtcagcgccgcacaaacgccgggcggcctggtgcgcgagttacctcttgccgacgcctatcaggcaatgaacagcaagttctggggcgcgtaccgtgttgcccgcgtcgcaaaaatcaatgagcgcgggacattgaccttgatttcagggtttctcagcgtgcggccgggtcagtgggttctgcagggcgcgatcaacgccgcactggaatcgctaggccgcggcctggctttggaaatggcggcgcagaaggtgcgcgtcaacacagtctcgccaggcatgatcgccacgccgctgtgggatggaatgaacgcgggcgagcgccaagccatgtacgacaaggcagccgccacgctgcctgcacgcgcagtcggccggcctgaagacatcgccaacgcagtcgtgttcctggcctcgacgccctatgccactggttcgaccgtgctggtcgatggcggcggcgcaatcgcctga

SEQ ID NO: 529960 - DNA, 906 bp, Stenotrophomonas maltophilia
atggacaggatcgacgatcttcccggattgcaggctttcgagcgcatcgtggcgctcggcagcctgaccgccgccgcatcggagttggggttgtcgctggccgtggtcagcaagcggctcgccactttcgagcagcggctggggatgcggctcatcgaccgcaacacacggcggctcgcgcctaccgatgaaggtcgattgctttattcccacgccatacgagttgttgctgaactggagcaagcgcgggagtcgctgtcacagcagcaaagcgagatttccggtttgctgaaggtgacggcgaccaatagcttcggccgccgtcatttggtgccactgctcgcacagttccatgcgcttcatccgaacctgcgcatccagctccatctcggcgacgacgtgcaggatctgattgccggcggattcgatctggcgatccgctatggcgtgctgcaagactcctcgttgatcgcacgcgagttgatacagaaccggcgcatcttgtgtgcatcggctgaatacctgagtcgccgcggtgttccgcaacgcttatccgatctgacgcggcatgactgcattctcatcggcatgtctccgaccgctgaatggcgcttcaacagcgggcgtcatgtgcagcagttgcgcgtgacgggtcacatcgtttgcaacgatggtgatgccgtacaaagcatggccgtcgcaggtatgggcatcgcactcaaatcggtatgggatgtcactgatgatttggcgagtgggcggttagttcaggttctacccaaacatgcggcctcagccgcaccactgagcgcggtttacctgcaaggacatagtcaattgccacgcctgagagtgttcgtcgatttcttgattgatcgacttagagctgcgcagaacgagcggtga

SEQ ID NO: 529961 - DNA, 588 bp, Stenotrophomonas maltophilia
atgaccgccgttctcaccacctacaccgcaccgcgtcctcgctcgcgcctgcgcgctcgcatcgtgcttgcgggcctgtccgcctgcggcctcgctgcgctggcctgggcgtccttcgtgcatccactgccacgcctgatctacaacccgtccgacagtgtggcggtcggctggtatcgcgtcgatccgctgcatcatcggcccggctcgttgccgcgtgctctggccgtgggcagcatcgtcctggcctcgttgccgacagacgccgccgcgctggctgcgcagcgccgctacctgccggcgggcgtgccgctgctcaagcgcgtgggcgccgtcgcgccgcagcacgtttgcgttttcgatgcgctggtgtggatcgacggcgtgcccgtggctgccgtgcggcatgccgaccggctgggccgcccactgccatcctggccgcagtgccggcagcttcagcctggagaactgttcctgctcagtacgaccaatccggcgtcgttcgacagccggtatttcgggccggtcagcgcatccgccgtgatcggcgtcgcgcacctggtctggctggagaagcgcccatga

SEQ ID NO: 529962 - DNA, 534 bp, Stenotrophomonas maltophilia
atgactgcatcgacttcgcctgccgcagacgcggccacggttgcccccgtagcaccttccggccaagccgccagcacgccgctgacacgcgtggcgctggcctacatcgaggctcgtttcaagctctacctgcgcttcggcgaacccgcgcgcacacaccagctcgacggctggcggcgcagcgcggtgttcctgccgggggcagtgttctgccgcgtgcgctggcaggccaacgattacggcaccgtgcgctggcagctcatggtgatgcaggcttgcacgccgctaggcggcgcgcagcgcatccccggcgtgcagccgggcgcgcgcctgctgctgcacgctgaaggcgatgggcaagtgcgcgccgtgctggaacgcatcgacgccatcgaggcgcagggcatcgcgccggccgatgcttcgcccgcgtactggcgcacgctcgccaaccggctcgctgcgcgcctgccgctgcccgactacaccgccgagcggcacgccgcctggctgaccgggagggcgctgccatga

SEQ ID NO: 529963 - DNA, 765 bp, Stenotrophomonas maltophilia
atggtcaatcctcaccatcttgcgcattggtatccgaccgccgcgtacctctacatcctgtgcctggatgcattggcgctggcttgggagtacctgcgccgccacccagactaccggctcgactggctgcgccaccagcgccggccgcaagcggcgcaacaggccgcgcttcgctggggcttgcgccttctggaagaccccgcgctggatgcgcgcgacgcgcatccagcctggctgccaggccacgatgccgtggtgcagctctacccggatgccgatccgccgcccgaggcggcgaccttcgcgttctggcatatccctggtcacaaacaactgctgcatgacggcaagaacctggcgctgatcgcgcgcagccctggccattgcgcgcgcttcgcgctggcgcccggcttggaggacggcatggcggtcgcctatgcccatcgcggccgtggcgccccgcatgtccctgatacgccggccccgatggcccggccccggccgccgcctgcggcgctgctggaactgcacaccctgcaagcgctcgacgcgaccctggcgggcgcgtccttgcgcgacgtcgccgagggactgttcggcgccgacgccgtggcagccgactggcacgccgacggcgacctgcgcgcccgcgtgcgccgcctagtgcgccggggcgaggcgctgatgcgcggcggctatcgccgcctagcacagcttccgccgcttgagaagggacgttttgatggggacgcaaaacgtccctga

SEQ ID NO: 529964 - DNA, 348 bp, Stenotrophomonas maltophilia
atgcacccactcatcaccgaggacgagcgccaacgtctgctggcctacggccaggcccgtgctgacggtcaggcccgcgacccgctgcccgtggtgcgcctgttcaccccggacgcgcacctcacctggcttctcgcgtcactcgacccgaccgatggcgatacggcctacggcctgatcgacctgggcctgggaatgcccgagctgggcaccgtgaagctgtccgacctggcatccatcgtcgggccacgaaaacagcccgtgatgcgggatcgctatttccaggcggcacggcccttgtcggaatatgtccggctggcccgggagaacggcggcattgtcgattaa

SEQ ID NO: 529965 - DNA, 291 bp, Stenotrophomonas maltophilia
atgcagaagcgacccgttcagcgcggccgaccggccggcaccaccacccacgacgccgagttggcgcacgccttcggcgccgcggtgcgcgcgttgcgcgtcgagcagggcctggcgcaggaaaccttggcacatcaggcaggcatcgagcgctcccacatgggcaagatcgagcgcggcgagcacatgccgacactggcgatcatcttcaagatcgcacgtgcgcttggtttgagcgtcgcccacctcatgggaacggctgaagaactcctgggcggagcgaaggagtga

SEQ ID NO: 529966 - DNA, 1512 bp, Stenotrophomonas maltophilia
atggcaagaacatgcatcgtgtgcggactggccgccggttctggagagcacgttttcccagcagcccttggaggccggcgggtcaattcaggcatctactgccccaagcacgacaacagctactcgggcctggtctatgagattgccggacagctcgattttctcaatgcatacctgggcgttcggccggatcattcgagtcaacccaaaaccgcctttgccgaacacacgttgacgggtgagaccgtttctatctctgcgaaggagatccgattcacgaaaccccggatcatctcgcgcaccccggttggtgaaggcgaagccgtggagctgagctttcccgatcagcagtcggcaaaacagttcatcaagaagatggaagcctgcgggcacgagtgggcggccttgcccaagctgtccgcgcgtccctacatcaccggctccgtccaccacaagcgcgcctttggcggcgcatgtgggctgggcgcgatcgcgtacatgacgcagacgttctttgctcaggagttccctgaagtcgcacgatcaggggcgcttactgactttatcaactatacgcaggccatcgccaaggtcgcggcgttgggtggctgcgaacagcaaacggaagagcgcgaagcattgatcgaggcgcgctcggcactgacgactgcgctggagcccttcggtggcacggcaccggcctggtgggatttcagcccacctgcagacgcacgagccaacaagttcgagtttgggcatcgggtgacggttggtatcgacggctccgatggtcaaatttatggccgcgtggcgctgttctccgcgttgtccttttccatgcgactcggcactgccccgcagggctccgcaacgcgcgaagtcactgtagacattgatccgctcgcggagcatccgccacacgacatcaacaagcatcaggtgctttctgcgccaggtcgcgttcatgtccccgagcacgctacccaagggcttgcgagtgcgatcgccgatggcacgcaacaacgcgcgttcacaaatcttttgcagcgcttggaagagcatcagctcctcaaactcgcgcacgccattagcaaagccctcgcgccgtgcgccactttgtcgccgcttgaggcgcacgcattgattggaaaagtgattgacgagcaaccacagcaaatttggcgcttggtcacgtgctttgtggagggcttgaaggaaaaatggactcagggaaacctacaggccatcacgccgattctcgatggcctgattgcccatgacgtccaatcggcgagcggcttgtcacagcaagccgaagtcactttggccttggccaaagccgctctatccgcgcagatggaggaagactgcgcagcgggcttgctcaatgaagcgcggatcgctgaactcatgggcagaggccctggtcttcatgtcgtaggccaggcggtgctggcccctgtcttggaggtgtttggtgagtccccacgctcggacgaagtgaggggatga

SEQ ID NO: 529967 - DNA, 258 bp, Stenotrophomonas maltophilia
atgctcgtcacgcgcgctcagttgcagcacctgcctggcaacgcctgcatgcagcgcgagatgaggttgttcgtcggtgcggccaccgctgaccgcaaccaccgtgtcgaacaggccgatgaagcgcagcggcggagcggccggggcgaagtccgttgtgcaggacaggccagcggcctgcaacagctgccgccagcgggtgcgatcccaggcctgcaactggttggccacatcgcgcgcggcggccgcaccccgtga

SEQ ID NO: 529968 - DNA, 270 bp, Stenotrophomonas maltophilia
atgaatcggaccgtccaacgcgatgtgaccaacttgggctatggcttcaatgacgtgtgcgagtgcttggaagcgcttactcccgcagactacgccggccgctacgtggcatctggtcctgacgggtccgaaattcaattcgatgtctacaagccgtgctttccgcatagccgcggaattgacgccctctacgtgaaactgagcgagcgctcgaacgctacgctctcccaggtggctctgggctccttccatcttcagagaaaaggttga

SEQ ID NO: 529969 - DNA, 615 bp, Stenotrophomonas maltophilia
atgcaactttgcccctattgtgaaaagggtgaactgcacatcttcaccgacagcgagaccatcgtgcacggtggcaagcaattgcttgtgcccaatgtgcagttgtcgcgttgcgacgcctgcggtgaagaaatggctaccccggaacaagcgaaggtgaatcagcgcttgttcgcggacgctaagcgtcacgcggatgggctgatgagctcggatcagatccgtgattggcggaaggcgcttggatggtctcaggctcaggctgtcacattcttgggtggcggcgccaatgcgttctccaaatacgagcgcggcgaagtcgtgcaatctcgtcagatggacttgttgatgcgtttgctagcgctttcgcctgaagctaggcaaatcctgccgcgagttgtcgccggtgacttgcagcgctgcgtcgacgtggtgggagcgcgtattgatgatccgtgtggcactgacgcgattgatctgctctggtcgcctatacgcactcttggggcgacccacgctgcactctatacgtgcgcttgggatgaatccccgcgacgttcagcaaacgacgatcgctatggttggtcgaagcagcgtttggccgtagcactgtga

SEQ ID NO: 529970 - DNA, 174 bp, Stenotrophomonas maltophilia
atgaagtttgttcgcctgaactgcgttcacaacgcttggccgttctggcggcagcatgtgtttgatacgctcaagcgggcgtctttgccggtgcttccggtgccgctcttccagatcggtagcggtgagatggcagcgctgctgccggacgaatcagacgtagatgcaacttga

SEQ ID NO: 529971 - DNA, 258 bp, Stenotrophomonas maltophilia
atgaccaccgacaagaagaccctggcggacgtgaagcccggtgggagggtgaggctgggggatcaggccgatggagtgaacccgactgcgcaggccgtggacctggaacgcttccgtggcacggtcaaatcccagtattccatgactgagtggatgcaccgatgcggatttgtatcggcagagaagccggaagagagcaagaagaaccacgactacctgatggccctgatcgacagccaggcggtgggcaatggctga

SEQ ID NO: 529972 - DNA, 339 bp, Stenotrophomonas maltophilia
atggtgatgagagcgctgcgaatgggtgttcagctcagcccccgcttcgtctatcgggggaagtactatctcggtggcgatctgcctgttgacccggcggatcccttaagcccagatggtcgaaccaagattctcaaccagccaaggagcgtgcgagtccgaatcctggagcgcaggtcgatgcgggtcgttgccgatgtgcgttcggcgagcgatggcagttggcgggtggatcacttggcagacattgagtacctggtcattggtctggatgagcgcggcttggtgaacgcggccattcaggatcgagtgcgcccagcgctgatgaccgggccatga

SEQ ID NO: 529973 - DNA, 165 bp, Stenotrophomonas maltophilia
atgccggcccaccgcaaagtacatgcatgttacaaggtgtttttcgctgagcagacgtttggcagcatgtcggaactgggtagcgtcccggcgttccgccgtcgggctcgcgggcggtgccccgcgcttcgtgccgaatcacggccattcggctttgatccctga

SEQ ID NO: 529974 - DNA, 510 bp, Stenotrophomonas maltophilia
atgtcgcaactgtccttttcctcgttcgagttctcgctgatggtgcgggacgcacaaggccattacctgctggcgacggccgaccagattctcgaagctgcacgcgaggtcatcgaccgcaaggtgcagcgcggtgcgtcgctcacgtcgccggaggttgtcaaggagtacctgtgcgccaagctcggcggcgccgagtcggaagtgttcgcggtgctgttcctcgatacacagcatcgcctgatcgaatacgccgagatgttccacggcaccatcgacagcacatcggtgtatccgcgcgaagtggtcaaggcggcgattcgacacaacgcggcggcggtcgtggtttcgcacaaccatccgagcggcagccccgagccgagcggtgccgacagggcgctgacccagcggctcaaggatgcgctggcgctggtggatgtgcgcgtgctcgatcacgtcatcgtcgcgggaagccgcaccgtgtcctttgcccaatgcggcctgatctga

SEQ ID NO: 529975 - DNA, 618 bp, Stenotrophomonas maltophilia
atggacagtcgcgcacattgggatcgcgtttacacgacccgctccgctcaagaggtgagctggtatcagccgcacgcggagcaatctctggccctgatcgagcgtgtctccgccgggcggccaagccgcctcatcgacgtgggcggcggcgcatcgactctggtggacgatttgctgacgcgcgggccgttcgaggtcacggtgctggatctgtccgctgcggccctggatgtcgcccgccaacggctcgatgccgcacaggctcggcgggtgcattggctggccggcgatgtgaccagcgtggccttgccggccaacacctatgacatttggcacgaccgcgccgtgttccacttcctcaccgaacccgcgcaacgggcggcctatgtcgcgcaggtgcgccgcgcggtgcgaccgggcgggcacgtcatcgtcgctgccttcggccccgatggcccgcttcaatgcagtggcttgccggtgatgcgctactcggccgatgcgctgcatggcgaattcggtgcggccttcgagttggtggaacacaaggcggaagcccatcacacgccaggcggtgcgatccagcagttcgtctattgccattgcatcatgcattag

SEQ ID NO: 529976 - DNA, 1071 bp, Stenotrophomonas maltophilia
gtggtgtttaatgaggtcgaacctcttgtttcgatctacggcgatattccgtcgaatgaacagatcgccgattcccaggaacttgtgtctgtgtccattgccaatttacgcgaaattctcgaagcccggcagatcgccatttattttgcggcggtggtactcgctgcggtcttcgcatggctgcaccccggcacggccgcgctggcgcccgcgattgaccctttgctgggcttcatgctgttcgtcaccttcttgcaggtgccgttaatggcattgcgccaggcgttgtccaacatgcgtttcctgggcgccgtcctgaccgcgaacttcgtggcggtgcccttgctggtggccgcgctgcggttgtggctgccagatgatccactgttgcgtaccggcgcattgctggtgctgctggcgccgtgcatcgattacgtcgtgacgttcgcgcacgtgggacgtgctgacgcgcggcaactgctggcttcgaccccggtgttgcttgccgcgcagatgctcttgctgccagtgttcctcgggctgttcctaggcgatgccgcgggcggcctggtgcagcgggaacccttcgtgcatgccttcgtttggctgatcgccgtcccgttggtgctggcgggtgtctgccaagcttgggcggcccgtgccaatgcgggccgctctgccgtcgctgtgctgggcctgctgccggtgccggcaacggcagcggtactgtttgtcgtggtggccgccgtgacgccgcagctcggccaggcgttgggtgccgtgcgggccgtcgtacctgtttatgtggttttcgctgtcactgcgccattgctgggctggtgcgtggcgcgcggttggcgattgccggccgatcagggccgggccatcgcgttcagcagtgcgacgcgcaactcgctggtggtgttgccgctcggaatggccatccctggggccgtacccctgatccctgcggtgatcgtggcacagacgctggtggaacttgtcagtgaactggtttatgtgaaattgctgccgtgcttgggcaggcgcctggcgttggctgagaggtag

SEQ ID NO: 529977 - DNA, 1077 bp, Stenotrophomonas maltophilia
atgagcaacacactttctttgtggcatcgccccgcatggcgcggcggtctgctggccctgctcgcggcggcgctgttcggcctgagtacgccgttcattcagcggttgggcagcggcctggggccgttgaccgtcgccgcgttgctctacgccggtgccgcagcgaccggcctgctgtcgcgccagccggcccaccgggaggcccggctgcgctgggccgatgggccgcgtttgggcgccatggccgtgttcggtgcggcactcggccctgtcgccctggcctgggggctgcgacataccagcggcaccagcgcctcgctgatgctcacgctcgaagccctgttcacggcggtgttggcgtgggtgctctatggcgagtcgatggatcggcgggtcgcggcggccatggcgctgctgctggccggcgccgtcgccctggtgctggatcaggggcaatcgggcgccccgcagttgtgggggctgctggccgtgctgctcgccacggcggcctggggtgccgacaacgccttgtcgcggccgctggccgagcgcgatcccggccaggtcgtgatggtcaaggcgctgctgggcagcgccttgacgggggcgttggcatggctgcgcggcgagccgctgcccacgctggccgccgcgctggcgctgttggcagtcggggccagcggctacggcttgagtctgcgcttgtacctgctggcccagcgcgctttcggcgccgcgcgcaccggctcggtgtttgcctttgcgccgttcctcggcgcggcggcggcctatggactcggcgaacgtggagcctcctggctgctcctgctgggcggcgtgttgatggtgctgggcgttctgctgcatctggccgaaacccacgaccatgtccacacccatgaggcgatcgagcacgaacacgcccaccgtcatgacgatgggcaccacgaccatgggcatgacgcgatgccgacgggcgcgcacagccaccggcatcgccatgccgccgtgacccacgcccatccgcatgtgcccgatgcccaccacacccatgggcatggggcggtgggcgcctga

SEQ ID NO: 529978 - DNA, 1209 bp, Stenotrophomonas maltophilia
atgccagctccgataccacctcgacaaccgcgcgatggcgcttggcgggtcttcctcgtattcctgcgcctgggcctgacctcgttcggcggcccgatcgcgcatctgggctacttccgcgcggaattcgtcgagcgccgccgctggctggatgaccgcagttacgccgatctggtcgcgctgtgccagttcctgcccgggccggccagcagccaggtgggcatggcgctcggcctgggccgcgccggctggtggggcgcactggcggcctgggtcggcttcacgctgccttcggcgctggcgctgatcctgttcgcctatggcatctcggaataccgtgcattggcggatgcgggctgggtgcatggcctcaaggtagttgccgtcgccgtggtggcgcaggccgtctggggcatggccaagacgctatgccccgaccggccccgcgccgcgttggcgatcctggcggcgctgctcacgctgctgctgccatcggcctggatgcagatcgccgccatcgccgtgacgggcctggcgggccgcgtgtggctccaactgccgccgctgccggccacgcatctggcctcgtttgcggtttcgcggcgcgtcggcacgatggcatggggcctgctggccgttctgctgctcggcctgcctgtgtgggcggcggccagcggttcaacgacggccgcgctgatcgatggcttcttccgtgccggcgcgctggtgttcgggggcggccatgtcgtgctgccgctgctgcaagcggccacgggatcgaccggcgcggtcgccaatgccgacttcctggccggctacggcgcggcgcaggccgtgccggggccactgttcaccttcgccgcctatctcggcacggtggccgattggcccttgcacggctggcgcggcggactggcgctgctggcggtgatcttcgtgccggcctttctggtgctggtcggcgcgttgccgctctgggagcgcctgcgccaccgccagggcattcaggccgcgatggcgggcatcaatgccggcgtcgtcggcatcctgctgtccgcgctctacgatccggtctggacgagcgccattcacgggcgcaccgactttgccctggccctggccgccttcgggttgctggtctacggccgcacgccgccggtgctggtggtcgtgctggccgccgtcgccggacaactcctgtccgcctga

SEQ ID NO: 529979 - DNA, 423 bp, Stenotrophomonas maltophilia
atgagcaccatcacgatctatcacaaccccgcctgcggcacctcgcgcaacacgctcgccttgatccgcaacagcggcgaagagcccacggtcatcgagtacctgaaaacgccgcccgaccgcgccacgctggtcaagctgctggccgatgcctgcctgagcgtgcgcgacgtgctgcgcgagaaagacacgccctacgcggaactcggtctgggcgatcccaaatggacgaatgaccagttgctcgacttcatcgagcaacaccccatcctcatcaaccggcccatcgtggtcacgccgctgggcacgcgcctgtgccggccgtcggaagcggtgctggacatcctgccgcagccgcagcgcggcgcgttcaacaaggaagatggcgagccggtgatcgacgcggaaggccgccgtgtctga

SEQ ID NO: 529980 - DNA, 327 bp, Stenotrophomonas maltophilia
atgaacgaagccgaagctgtttccgccctgagcgcgctggcccatgcccagcgcctgcgggtgttccgcgccctggtcatcgccggccccgaagggcgcacgcccagcgtgctggccgaacaactcgacgtggcccgcaacgcgctgtcctttcatctgaaagaactggcgcatgccggcctcgtcagcatcgaacagcaaggccgcaacctgatctatcgcgccgacttttcccagatgaacgggctgctcggctacctgaccgaacactgctgccaggatggcgtgtgcgaaatcaccgaaccctcgtcccgctgcgcctgctga

SEQ ID NO: 529981 - DNA, 279 bp, Stenotrophomonas maltophilia
atgactccatcagccccagccgccaaccccgccgcaagcgccgtccccgcgcgcccgctctcacgcgaaacaacctcgatgcttgtcgagtccgaaaacccggaactggcaacgagcgcgtgcctccgctgcgcccactcaacggccttaacgctgggctggccagtggtggacgaccagccgctgaaagcgccggctttagtcgtgttctgtggccagatgaacagagacatcaccgcgccggtcctgcggtgctccagcttccaggccacgccgtag

SEQ ID NO: 529982 - DNA, 2166 bp, Stenotrophomonas maltophilia
gtgacggatcgctacggcaaccgccgcaaggaaatcctggcctacgcggccaagcacaacgtgtctaatcagcaggccacgttggccacgcgcaaagacaaggacgagccgccttaccaggagctcatcgcacactggcaggacacgctgaaaggcttcgacgtatccacggaaagcctgaagcaggccaagggcaacgcgcacgaaatgcagcaaaaatccccggcagaactgctggagcggctccacgagacggacgccattttctgcgaccacaacctcttggaggtcctgggccaagaatacgccggcagcgtcaccgtggcagagctctacagcttggttgaagcgtttaagaaggagcacggcctggtgctggtcaaccccacgcgcctgcacgacgacgacaagggcgattcgctggcaaggcggcatacccaggagcgctactgcgccacgtggatgctccagatcgagcaggaggtggtggccttcgcgattgagcgagccaaggaaacccatcaccacgtgccccaggccgacgtggaccgggtggtggaagactacgagaaggccaagggctttcagctctcaaaggagcagcgccacgcgctggaccacatcacccagggcagcgggggcgtggtcaacctttccgggctcgccggaaccggtaaaacgacgatcagtgagtgttttcgggcagcttacgaaagccaaggatttgagctgctgggcgtctgcgtttccaacgccgcggccgagaagctggaggcggaaagcggcatgtccagcgtgagcatggcgcagatgctccatgacctggacaaaggaaagatgcagttccgcaagacggacgtcatcgtggtggatgaggcaggcatggtcgatgcgcgcaacacccacaagcttttcagctacgcggccaaggcgggggcgaaggtcatcatgcagggggacgtggaacagcttcagcccatcggggcgggctcgggctttcagctgaccaagcaagcggtcggcgatgccaagctcaccgagatccgacgccagggcaaacaggaagaccgagacaccgcgttgtcgttctacgccacggacgagcacggccaggtcatcgatttgaagaaggccagccgttcacgggcgcagaccctcgacaagggcaacgaaataaaggcccggttgctcgacaccatccgcgaaacggccacggagaaggaagctcgcgagcggctgctacacgaatacttcgaagacccggtgccgatgagcgagaagctggtcatcgcccatacccgagccgacgtggccgcgctcaacgccggcatccgggccgggttgaaagagcgtggagagctgggccaggacgaggtggtgatcgaggcccgggacaaggggcgcaagttcgacctggcgttgtccaagggcgatcagatcgtcttcaccgcgaagaacaaggacctgggggtcatcaatggcacccaggccgtggtggacagcatcaagccctcaagggcgggcggctacgacatcagcgtgtccattcgctcggagaccaagggcgacgggcggcggctgacgttcaacagttttgagatgaagagttttcagcattcctacgcagggacagtgcataagagccaaggccagggcaagcgggaggtctaccacctggcgaacctgggcatgctcgacgcccacagcgccctggtggcctttacccgtctcacgaagggttcctaccgcatgtatgcgacgtccgatgacgtggagcggttgaacgagcggctcgggttggagcgcttgaaggagaccgtgctggacgctggcttggtcaaggacaccaaagccgcgcagcgcagcggggccaaggtgacgttggacgacttgctgaaaaagcaggtcggggaagtagagcagaaggcatccaaccgcccggggcagcagcgcagcggcgcggaggtcaagttggatgccctgctgaaggagcaccaggagcagaagcaagcgaagctggccgtggcgaagatgagcgaatccgagcgcaaggcccgccaactgctggaggtgttcgagctggcacgaggacagaaggccaagcccgtgttgccggtcgcacagcccgtccagcgcgagcgggtgcgccaaggcatggatcggtga

SEQ ID NO: 529983 - DNA, 231 bp, Stenotrophomonas maltophilia
atgcgcgttttggttctttctctggtccttgtcggcctgctccccctgacggcctccgctgcggacaacggttccgcccatcgttacggcaccagtgaaaccttgagtgttcagaacgcccgcctgggcgaggtgctcatggttcgcagcgtggacatcaaatccgacaagcgcctcaacgccggttccgcaatcggcgccgccgtgggttatgcgtcgtgcgagaggtga

SEQ ID NO: 529984 - DNA, 426 bp, Stenotrophomonas maltophilia
gtggaaggagagcaatcaggtatttcgaaagaagtcggttggaaaggtggcggtggctttcgcttctacaagctcggcgtgcccgtgttcgatgacgagggtcacatccgcgacggcatcaagttcgagcacctggccgcccacgtctggttcgccgagactggtgccgcacgctccactcgagccccgaagcagccgttcctgggggagcaccacggggtcggctactacctgctgttcaacggcattttgggcgatgagagcaagaccggcggcaacgtgctgaccaagcgggtgttgaaaggcctgcagccctttgacgggcccaaggtgatctacggggagtcctgcgacttgccaaaggagcgtctggaagaactccagatcaccttcaaacagaccccctacgacatcaaggcacgctaa

SEQ ID NO: 529985 - DNA, 888 bp, Stenotrophomonas maltophilia
atgaacccagcaactctgatttcactctccacggttcgccttctatgcggcaacgcgggcgtatcagcgtctgtaggaacgggattcttctatgtgggtgagttcaatgtccctgagggagtcgcaacgtttccgatggtcgttacgaataagcatgttgtcgccaactgcaatgagataaaaatgacgctgactgttcgtcagccaagcacggacatcagcgagatggtcgttgcgccaggagacatccaccgagtttttttcatccctggctgtcaggaacggatgctaccgcaccccgaccccaacgttgacctttgcgccttctttattggcgacattatggaggaaatccattcgaccggataccagcttaggaatacatttctaaatgccagatttctagtcccggatgacgaaataaaaaacatcagaccgattgagccggtgatgatggttggttatccgaacggactatgggatgagaaaaataatcgcccgttagcaaggcgaggaagcaccgcctcccatccgttcttgaagtggaatggaaagcccgagttcgttattgatgccgcttgcttccctggctcgagcggatctccggtttttttgtttgaagatttgatgtatagaacaaaagataacgcatacacgccgggaactagggcgcagctgctaggcatcttggcttcagggccgctttacactagcgaaggcaagctcatccaaagaaatatcccgacctccacgaccattgtgccggtagtccaatctatgatgaatctaggcaatgttgttcacgcaagcgccattagtgacatcgtatccataggtaaagaggcgtcgttagctgagaaagttttccctaaggcgattcaactttag

SEQ ID NO: 529986 - DNA, 588 bp, Stenotrophomonas maltophilia
atggccggagaccaggcggtaaaaaatctagaagagatgattgaaaagatgttcaaagtggcgcgtcgggcccttcagtccacgaatgccacccctgagcagcgctctgtctctcgcacgctcctccaacggcgtgacgacttggccgaaaagcgccaggcgcatgcggacgccaaacaagccagggaggacgccaggctggcccgccgcagggcggtggctgacgccaacacgttcccagtgccgatggatctccgctccacgttgctgcgcaagatgggacggcctaccgcaatagaccgggccgcacaggcggtgcaagaacagaagcagcaggcccggctgcaagagcagcacgcccgcgcgttgcgcgaacagactaaagaagccacagacaaggccggtgtggcgtttgagttggcaacctcggactttctgacgcagttcccgcaccagttcccgcccgccaaacccactgccgagctcgcaccgacgcacgacctgctcccattgccgccgaactcaaagcaggtcccccggttacccgagcccgtcagttcgctccgccgtccgtcgcggacgccctga

SEQ ID NO: 529987 - DNA, 222 bp, Stenotrophomonas maltophilia
atgaagcccctagcaacgcgtcgccgccgctatttcgcctatcaacgccgctcggggtccacgtgctacttcgacaaagccatgcacgcccacctccagcggtatccgcacaccatcggccattaccagctcacacgcttcctgggcacttccgcgttgctgaccgctgaagaagcggccgcccaaggatggatggccaagccgcacgggagccctgcatga

SEQ ID NO: 529988 - DNA, 468 bp, Stenotrophomonas maltophilia
atgactactcgactttgcgcgcactgcggccaccccttcgaaccccgcccacaggttcccgaccaagcgttctgctccgcccctgaatgccagcgggctcgcaagcgcgactggcagcgggcaaaactccaatccgatcctgactaccgcatcaatcagcaggcggcccagcgcgcgtggtcacagcgcaatcacgactattggcgcaatcaccgagacgcacaacaggtcaacggcgatcaaggggagcaacctaccaccgcccatcggcagcaagtcatcgatccggtaaagatggacgtgtcagcgctgccttccggtatctaccggatcacaagacgtccggagtttcccaatggaacaccgggctcatgggtggttgaaatcacgctgctgtatgaaacctgtgaatgcaagatggatgcgtcaagagatgacttgatcgacacccagggaatccagccttaa

SEQ ID NO: 529989 - DNA, 240 bp, Stenotrophomonas maltophilia
atgatttcgcataatgtatacaacgtgggcgttatcgaagcccggcactgcggcctgagccttatggggcagggtgaaacctacagccaggcacagtgccattgccatgcctgcgagcttgcgccaaacggccttctcttcgcggctgatcgcccgcgcttcccctacgattccgatgactttgacgagaggctctcccgtcaggccggccaatgtcgcgcacacgacggcattcggtag

SEQ ID NO: 529990 - DNA, 624 bp, Stenotrophomonas maltophilia
atgctggaggctttcttcctggcgaccgccaaggcggcgccagcgaccagtgccgcggcgagtgccggcgaggactggaaatggctagtccccgtagccacgctgatcttgggcttcggtctgaagtggtttcaggactacctcacggagaaggcgcggagacggcacgacaaggccttgcggcgcgaacagcggttcgacctgctgcgcacccgccggatcgacgctgagagagcgaaccttttagctctgcagccgcttgttgggaacctaatgcgtgcggtcgcggtcggctacctggaagatctccgttgctacaggtcgtccggacagagaaactggggcgacaacagcattcccgacgaagcggcggaggcaattcgtagagcgaatgctgatctcgtaccgctccgggcgagagttcatacacatgaggtttcagttgccctcgactcgctcgtgggcacgttggccaccctgcctttcgtcacatcggaaagcgaggcgacggagatctggaggtccgggggtgtgatgagcaacgaactgcagcagctgattggccatcacatccgagcattggaagacgagaaccagcagctcggggatccgcctgaaaggtga

SEQ ID NO: 529991 - DNA, 567 bp, Stenotrophomonas maltophilia
atgtcaggacgctggcagggaatagcgtttgcgatagctgccgtggtcgttgcaatcgtgaccgcgtgggtgggctattggatggggttcgctgggcaattgccgagcgacgcattgctgcgcgcagatcgccacctcagcggcatactgaaggcagcagccctcttcacgccgctgttcgtcctctacttgacgtggaggaactggctgacggctcgacacaagatcaaggttgatttgttcgatcgacgttggggtctctggcgcgaagtggagcgcatctactccgaaacgatagaggggcgcgatttcaccaggccgcttcagctcagtgccattcacgcttcttggcaggcgcagtacctcttcagtgacgccgccggagaatacctgcgcgacagcttcttcgcggatttaaatgcttggtcgctggaaatgaatcgatcggttgaacccgaacaagaggccgactggtcgaaacgggtggacgagctgaatgacaggctgggcactcatccgttccggtttcacgagttggttggccagcagatgacgattcgagagtaa

SEQ ID NO: 529992 - DNA, 252 bp, Stenotrophomonas maltophilia
atgtacccgatccttgtgaccagcggtcgccccttcctcaacatgctcttggccaacttgctgagccagccccggccgcatcgtgccgcgccggcgccgcccgtgcgccgcctgccgccacgtcaccgcaccatctgggcaccgcccggcggcggccgggctgagcgtgcccgtcgcctgcgccagatcgcggccggcacgttgaccgcagccagcggcctggtcgtgacctacaagggcgagcagccgtga

SEQ ID NO: 529993 - DNA, 417 bp, Stenotrophomonas maltophilia
atgacgcttcagttcgtccatggcgcggttgatcgcgagggcgcgccgctgcatttccacatccacaacggtcgtatcagtggtctcaacggtgatgctgcgccgcgcgagggtgcggaacccgtcgacttgcagggctgtgccgtcctgccgggcctggtcgacggccatattcatctggacaagagcttcgtcggcgaccgctggcacccgcatcagccggtgaacagcctgcgtgagcggctggcggtggagaaggccgcggtagcgggtgccgcgccgatggtggaccgtgccgaggccttgatccgccagtgcagccgcttcggcacggtggcgatgcgctgtcacgtcgatgtcgacggcagcaccggcctgcgtcatctcgaagcagtgcgcgaggccgcgctgcgctga

SEQ ID NO: 529994 - DNA, 984 bp, Stenotrophomonas maltophilia
atgcagcgccaccggctcgcgcgaaggcagcgcacccggcgcctcggcctgcgccaggtacagcaggtcacccacggtctgtgccagctgctgcagttcctcggcgcaggacgccagcgtctcgcggtaggcctcgttgctgcgcgggtgcgccagcaccacctgcacctgggtgagcatgttggtgatcggggtgcgcagctcgtgggcgagatcaccggagaacccggtgagccgcgcgaagtcctgctgcaggcgtgccagcatgccgttgagggtctgcgccagctgctccagttcggccggtgcactgcgcgcgctcaggcggcgctgcagccggccagcggtgatctgccgggcttcatcggccagcgtgcgcagcggccgcagcgtgcgccgcaccacgtagccgccgagcaggctgctggccaccgcggcgccgatgatggcgattgccagcaggtggcggaagcgctccaggaagtcggcgtgacggttgtcatcaatggccagcagggtcaccagctggctgccgtcggccagcgtctggcgcaggtgcagggcatgcatgcagcgaccatcggtgaggatccaatcgtgccgccgtggcgcggcgtcgatgggctggctgcgtgcatgctcgcgcagcagtgccggcgcagtggagaacagtacggttccgctcccatcaacaatgtggaaggcgatatccggatgatggccgagcgcctctgccaaccgcggtccgcgcgcggcggcaggcccattgtcagcgaggtcgcggatcaacgcgaccttgttttccagttcgatgaagtcctgggcaacaagatcatggcgggcgctgacatagatcgccacgcccaatgcggccagcaccagcgtggccacgatggcgaacagcagtgtcagccgtaccgcgatggaacgacgcaggctcatccgctgtgcacggcaccgtcgtccggcgcctccagcacatag

SEQ ID NO: 529995 - DNA, 1059 bp, Stenotrophomonas maltophilia
gtgaccaacaccccgtcttccgccccttcccccctcacctaccgtgacgcgggggtcgacatcgacgccggcaacgcgctggtcgagcggatcaagcccctggtcaagcgcagcttccgcccggaagtgatgggcggcctgggcggcttcggcgccctgttcgacctgtccaacaagtaccgcgagccggtgctggtgtcgggtaccgatggtgtgggcaccaagctgaagctggcccaccagctgaaccgccacgatacgatcggcatcgacctggtcgccatgtgcgtgaacgacgtgctggtgcagggtgccgagccgcttttcttcctggactacttcgccaccggcaagctggacatcgacaccgccgcagcggtcgtgggcggcatcgccaacggctgcaccgaggccggctgcgcgctgatcggcggcgaaaccgctgagatgcccgacatgtatgccccgggcgagtacgacctggccggcttcacggtcgccgcggtcgagaagagcgagctgaaggacggcgccagcgtggccgccggcgacgtgctgatcggcatcgcctcgtccggcccgcactccaacggctactcgctggtgcgccgcatctacgaccgcgccggccgcccggccgacctggagctggagggcggcgtgaagctggtcgacgcgctgatggcaccgacccgcctgtacgtgaagccgatcctggcactgctgaagtcgcacggcgaggccatccacggcatggcccacatcaccggtggcggcctgaccgagaacatcatccgcgtggtgcccgacggcctcggcctggacatccaggcatcgtcctggaccctgccgccggtgttccagtggctgcagaaggaaggcgccgtggccgacagcgagatgtggcgcaccttcaactgcggcatcggcttcgtgctgatcgtggcagccgaccaggtcgccgccgtgtccgaggcggtcaaggcgcagggcctggaccactggaccatcggccaggtggtcactgctgaaggcgccgagcgcgtccacatcggctga

SEQ ID NO: 529996 - DNA, 1254 bp, Stenotrophomonas maltophilia; identical to SEQ ID NO: 500881

SEQ ID NO: 529997 - DNA, 1647 bp, Stenotrophomonas maltophilia; identical to SEQ ID NO: 505216

SEQ ID NO: 529998 - DNA, 264 bp, Stenotrophomonas maltophilia
atgagcacgaagcggtacaccgatgagttcaagatcgaggcggtccgacagatcgttgagtacggccgtccggtagcggaggttgccgagcgactgggcgtgtcgatccatagtctttacggctggaagcggcaacaaggcaaaggcgatgttggccggcgtgtcgagcaggaccagaacgcggaagtgcgccgcctcaaggctgagctacgcagggtcactgaagagcgagacatcctaaaaaaaggttcttctcccatctga

SEQ ID NO: 529999 - DNA, 486 bp, Stenotrophomonas maltophilia
atgacccacgctgcccctccatccacccttcaggctccggcctacggcctgctgctcggccacaccgagtgccatttctgccacgccccgacccccaccgccgcgatctgggtgccctcgttcgaggagcacgacgacgagggtctggtggatcagggggagggtgccgtgttgcgctacatcgagcgtttggacgaggacactgtcgctttcgtggcgggccacgcgccctggcttcgtttcgccactactcgaacgtcagggcaaacctacctggcccatcactgcaccacctgtggggcccttcaaggggaccacttcgtgttctcgccggatggtccttactggccccagagcgacgtcgagcttgcacgcctgaccgactggacgcgcatttcgataacggaagacatcgcctggcggtggaagttaaaaccagcaagtgctcggaggacgaactccagcgaggcgtctatcaagcggtga

SEQ ID NO: 530000 - DNA, 711 bp, Stenotrophomonas maltophilia
atgcccggttcaatgaggttgccggccagcggccggcactacccgaagcgcgaatccaggtcggggacaagccttggtagagccggccgctggccggctgctctcgatgccggattcaatgaggatgccggccaacggccggcactacccgaagcgcgaacccggtcggggacaagacctggtagagccggccgctggccggctgctctcgatgtctggttcaaagaggttgccggccagcggccggcactacccgaagcgcaaacccggtcggggacaagccctggtagagccggccgctggccggctgctctcgatgccggattcaatgaggatgccggccaacggccggcactacccgaagcgcgaacccggtcggggacaagacctggtagagccggccgctggccggctgctctcgatgtctggttcaaagaggttgccggccagcggccggcactacccgaagcgcaaacccggtcggggacaagccctggtagagccggccgctggccggctgctctcgatgccggattcaatgaggatgccggccaacggccggcagtacccgaagcgcgaacccggtcggggacaagccctggtagagccggccgctggccggctgctctcggtgcctggttcaaggaggttgccggccagcggccggcactacccgaagcgcgaatccaggtaggggacaagccctggtag

SEQ ID NO: 530001 - DNA, 678 bp, Stenotrophomonas maltophilia
atgtacgacattgaagacaattatgacgaaggtgatgggcactatctggaaatcgttgaggtcactgcattcaatccttccatgtcgtttgacgaggatgaagaggatcgattgattattgagcaactgagcgttatctgcaaagttgagtacattgatgaggatggtgatgattgcgttgaatattttgacgccgaccttaatgatcgcgggctgcactttgacggtccagactctcttatgggcaacgacgtaatgaacgacatgctgttcaattgtgttggagatgctttgttggcgaggatcaattcacaggactatgacctgggttacgaagtggaccatgcgttaattccagccaccgcgcgcgacgccgagctgacgtttgaaatgattgacagttcatatgtccacgaaattgatgcgcgccattatgtctgcaccaaagagtatttggactacgatccacaacagtttgaacacagtgagccagccccgttttacgttgttgagcgcaatacggatttggccattcccattcacacacccgcagactatgtgtctgttgcgaacaatttggacgctgagttccaacgcttgcgattgcagcagcatgtgagcgccgctgagcagacacccactgaggtgcaacgggcacaacacgtccggcggatgtag

SEQ ID NO: 530002 - DNA, 678 bp, Stenotrophomonas maltophilia
atgctgtcacagcatcctcaatgggtcaactcggttttaaatattgccattggcaatgatcgcttgcctctgatatatatcgccaaaaaatatggaggcgtgatcgataatccatcggcgctggaaatggcgatgtggcaaggtcacctagataccgcaattgcattgctggaaaacggagcgcccctcccgaccaatatggaaaacgctatcgcggatgcatatcgaagacgaagaataggatctggcaatttccgtcggcttttcaaagccctacttgaccgtcttgacgtgaacagtattgattacctgcggcttgtcgaagaatggcgctgtgagcgcggactgcgcgatgtgagcgccttgttgcacgagtttggatacgacttctctaatgcgaaatgcatcaatattgatgtctttcaggaccgcgttattttgggctcctatgaaggagagctttgtgatcttttgagttggggtcaaaagatcgactttgacggctggctttttaaaaatccattgccccagcacgaaatttgccgctggttgctacttaaggacgcggctgaggccgagcaattgattgccgaacgcaccgccgcccatatcaccacggcgcttgccgacgctggcctggctcaagatgacacccctaagccaaaaagaaggatgtga

SEQ ID NO: 530003 - DNA, 294 bp, Stenotrophomonas maltophilia
atgaatttcaatgatgagaactaccagcggcttgcgaaagcggctggaaatcttgaaaagaataacggtgacgaaaagtcggcggatgagtttcggttggcgcttgatggtattgtcaatcttaatgcgctcaacgaacaaggcaactcaatgatgcatattgctgcgtacaaagggcaagcgtttgtcctgagtgagcttatcaatgcgggcgcggacatcaatattgagaacgaaaaacatggagttcggacgcggatggattggctttggatccgcaaccgttgcacttag

SEQ ID NO: 530004 - DNA, 975 bp, Stenotrophomonas maltophilia
atggcctgggcaaccgacaccgccgccaacatcaccgacctcatggcccgcctgcgggacttcctgaccaccaatgccgccctggtggcggcgaaccagcaatggcaggtggtgggtggcgtggccagcggtccgatcgcggccaacgattttgtgtcactgaagggccgaggtctggcgggcgaggatgagatctacgtgtctctgcaggcgtgggtggtgcccgccagcgcttactacaacatggcgatcttcggtcataccggctacaacccggcgcagccgcgcttggatcctcctggctccaattcgaatccggtggcgttgctgggcgtcaactcgccgatcaagtactggttcgtcgcaaacggccgttgcttcaaggtcatcacgcgaatcaacggtcgttatgacgccgtctacgctggcttcatcttgaccgaccatcttccagccgactggagttacccgctcttcatcggtggatcgtgcctggagaggaactacctggcttcctctgatacctatgagcactccaacttctggagtcccaacgccgacggcgtcgacaacacaaaccgtagccaggcgtacctcttctctccgatgcaggcttgggttccgatccgcaacctctcgctgggcggctctcaggcgacagggcgcatgacgctgccgtgggcaaaggccatctgcaaccagaacgtgcgcaactgtctggatgggcagcgctgggtgcaacgcgggcaattggcgggttttgcatggggcgccagtctgtccgaccgaggcgctccctacagccagatgcccgaaaagggtcagttctacggcagcttcgacggcgtcttctacaccccgtcattcggtgcaacggcggagcaagtggcaaccgtgggcggtgtggaccatctggtggtgcccaacgtgtaccgcactggttctggcgagttcgccgcgttttccctggagtga

SEQ ID NO: 530005 - DNA, 507 bp, Stenotrophomonas maltophilia
gtggccaagccccgcaccgcgccgtccagcgcacccaagaccgtccaggacagcaagccggccgccgcgccggccgtcacggaagagaagcccgcagagaccgccacggcacagttggatcctccggccgatgccgatgccgatgccgattccgagatcgatgtcgacgccgccgcatcgtcggacttgaccgccgacccgacgctggcaccggccgagaatgatcaggctcctggcgccggcggcgacgttaccgcgtctgcaccgccggcccccgttgaagccagtggcgcggccggtgccgctgaaggccctgtcgccggcgtgaattcgcacgatgacgacgcgccggcacgcgtctgttttgaggtgctgactccgttcaagttcaaggggaaccccgtcaagccgccggcctggatcgaaatctccgaggacgacgcggcgatctaccaggccgctggcgtcctcggcaccgagccggccgaacccttcgaccacgtctga

SEQ ID NO: 530006 - DNA, 261 bp, Stenotrophomonas maltophilia
atggcaccggagcagatgcaggcattggtggatatcaacctgctggaaatccaactggccgcactggacgccctcaagccctcgtcgccagccgcggaggcggccagactgcgtgcccatgcatgcctctcattgattacgggcctagacgggagcaaaacgccggcctggggcgaactgcgggcagaggcccgagcactgaaccgtgagttggcagctctcctcgccgctgcacagatcgacgccccctcagaggcctga

SEQ ID NO: 530007 - DNA, 3561 bp, Stenotrophomonas maltophilia
atgcgaagcggcggaaatatggaactcgccctgaaagtaagggccgatttggggcaggctgcaagcgcggtgattgcgcttgaaaagagcttgggccaggtcggtcaagccgcaggtgctgctgccgatggcgtgtccaaggtcggcaccaacgtcaaatccatcgcggacaccggcaaggccgccaacgacgcggcgataggcttgcagcgtgagggggaatcggccgagcaggcagccaagcgtatccaggacatggtgcaggcgtcgctgtcttatcagcgcgctctggaggcgcaggttcaggccagccaatcggtaagcgaagcgacttcgcgccacgctgctgctacaaccgagcaggcccgcgcttctcgcgaagcggtccaggcggcctatgcgtcacaggccaccacgactcagcagattcaatccatctccgaattgcagcaacgtgtggagcgcggcgcacgctcatttgaagaccttgccgaaaccgaacagctgctggatcgcgccatgcgcgcgggccttgtctccagtgaggaacaggcggagattttcggcaagctggacaagcaggaaaagcagctactggcgagcaaggatcagatggcggctgcacgctcaaaggaagagcgccagatgcagcaactgctgcgcgcctatgaccccgcgcacgccgcgctgaggcggctcgatgcggacgaagcaaagctgaaacaatcggtcgatgcaggcaccctctcgcgcgaggcatacaaccgcgcgatggttagcatttccagtcagcgcgcccattggcagcagcttagcgacggcgtcgaatcggcggatcgacgcatgcgtaacctgagcctgtcggcgcgtgaggtgcgcaccagtttggcggggatcggcgcaaacctcgtgcaaggcaatgtgaccggtgcgagcagcatgctgctcaacctgggcggccgcagtgccgcagggttcggcgtcctcgggtcggccatcggtgccaccgtcgccacccttggcttgttcgccgccgccacttacaagggctatcaggagaatcgcgccctggagttgtcgctcattgccagtggcaatgccgctggcacctatgctggtcggctggtggaaaccagcaacgccgtggacgcggcgacgggtgagtatggcaaagcacaaaaggctgtcgcggggctggctggttccgggcagatcgctgccgattcattggcaacggcggctgaggctgcggtgaatctctccaggctgaccggcgagagcatcgaagcaacgacagcgaagatcatcgccctggcgaaagccccgagcgcgacgcttcaggaactcaatcagcagtatggcttcctgacacttgaggtatatgagcacgtgcgggcgctggaggatcaggggcgccagaccgacgcggcacgcgcagcccttgacgccttcgccagcgtccaccgggaccgcgtggaagaggcgcggcaatccgctggcttccttgagcaggcatgggatggcgtgaaaggttcggtgctgcgtgcgtggcaggccatgaaggatgtgggtcgcctggacgtggacgcccgtctgcaatcgctcaaggaagacctggccttcttccaggcactccaaaacagccccattccgggcgatgctgcacgcggtacggaaggccttcgcaatacccaagcgcgcatcgctgcactggaagcggagcggtctgcgttggaacagcgtgctgccgccgacaaagccaatcaggatgtgcagaacaaggctgtggccgcatccaaggcgttgcaagatcagatggacagcagcgcgcccaagacagagaagctcgccaaggcggttgatgagctgggtaagaagttccgcgcattgcgtgacggtgccgagggcggaaactccgatcccgagctgctgcgtgatgtggtgtttggtgctgacgggagcatcaagggcggggcttacgacaagatgcgtaagcagctggaagagcagttcaaagaccgatccagcaagcgcaaatctggcaagactgacggcgagaaggctgatgtggccgcccagcgtgagctggacaacctcgccaagcaggtgtcgatgttgggcgacttgcaggagggtgagaccaaggcgggcgaagccgcccgcatccgttacgaaattgaggaaggcgcgtacaagaacgccagcgaatctttgaaatcacagctggtggatcaggcgcagtatctggacagtgaacgactgcggatcgacatggcaaagcgcatggtcgatgttcacttgcagctggcgcagttgcagggcaatggcactgatgccgaggttgccaagaccgtcaaggagctgggccgcctgcaacagcagttggagaacgtaggcaagtccgctgaggccgccgacgtggccaagctgatgaagctgactgaagccagcgcgcagctcaagggattgcaggagacctacaaccgtacgatggggcaagttgccctggagcagcagcgcatccaggtcgaattgcaggcaggcctcatcaccgaggccgatgcacaacagcgcatcgtcaacctctatcaggccaaactggtcaccctgcgggaactggttccgaagatgcgggaggctgcgacggcgctgggcaatccggaagccttggcggcggtcgagcagatcgagctgaagcttcgggagatggcgcagaccacggacctgctgcaacagaacgtacgctccaccttccagagcgcgttcaaggaagcgttcacgtcactcgccaacagcagcgcgtccctcggtgacatggtgcgtggcttcttcctgacggtgtccagcggcctggcagagtttgtcgccgaccaatggtcgcaggcgctggcgaacaagatcacctcgatggtgtttgacaagggcgtagacgttggtgcggacgttgcatcagcggtcgccacgcaaacggctgccaccgctcttggcatcgctggtgcagccgtcaccacgggcgcgaccgctgttgccaccagcgcaagcgcgctgagcaagtccggtggcgagctcacgaccggcggtgctgtcgtgatggcggctgctcagcagctgagtgcggcggcctcagcgatgacggttgccaattccattggtgcagcgtcgagcttcgccgtgggtggctacaccggcgcgggaggcaagtatcagcctgcgggcattgtccatgcgggcgagttcgtccaccggcaggaggtcgtgcgtcagcccggcgcgctggccttcctgtctgccttcaacaaggtcggcatggccgccatcgactggtggcgcggctatgccgagggcgggatggtcatgccgatgatcgacaggatgccggtgttcaccgccgcttcgcctgtgccttcggctgccgccgcgcaggtgggcctgcgtgtggtgaatcaggtgtcaccggacctgttcgaccagtacatggacgatcccggtagcgacaccaccatcattaacaagatcagccgcaacgcagcggccatcaagcaaatccttgggtcaagctga

SEQ ID NO: 530008 - DNA, 333 bp, Stenotrophomonas maltophilia
atgagcggcaaaatgtcgatgagcgagcggcggtcggaacttctgggcgatgttgaagaccaggttcgcaaggtgctgtcggaccatgctgtagcggcggatacctgtgaccaggtggcggcaagtgtctcagccatgttggtcttccactggggcggccaggtcatttccttcccccgcgattcggtccgcagccgcgagcgccgcgatgcggaagcattggcgatgttcaatggctccaactacgccgaggtggcccgccatctcggcatgggcgaacgtggtgcgcgcaaggtcatcgaacgcgctcgaaagaagtcggcccgcgcatga

SEQ ID NO: 530009 - DNA, 573 bp, Stenotrophomonas maltophilia
atgaccattcgtgccttccagatattccaggctggcacgtggaactcccaatctgggccggtcaccatcgaccaggcggccgtgaggcaggtcgccgctggctacagccgcgacctgcgcgcggccaaactggtgctcggtcatccggacgtagaaacggacgcctacggcgaggtgaagagcctcacggaaatggatggcggtctgtatgccttcgccgacgtggatgacaacctcatcgatgccgtgcgggccaagcgctacaagaacgtctccgcgtccatctacatgcccgaaacacctggcaaccccaagccgggagcctactacctccgtcacgtcggttttcttggtgcagcccctccggcagtcaagaacatgcagccgctgagtttcgccgagcttgtcccagcggcgggaactggcccggccgactttgcaatgcccgctggttgccatgtcgatcaggcgcgaatgcagctgtacacgctcgctcgcgacatgcagcacgccaatcccgccatcagcttcattcaagccgcgatcttggctcagaacgccatgcaacgataa

SEQ ID NO: 530010 - DNA, 783 bp, Stenotrophomonas maltophilia
atggacaacatttcggaaatcagcgctgaaatcgacggcatcgcatccgtctcggaaaagatcaacaccgccgtcaccgaccgctatcagcgattgctggtcctcgatgaagagcgcagcaagattctcatcgggcctatcacccgccaggactacattgccctgatctggggccagatcgaccgaaaagccgatgagtaccagcaggccctgacacgcaacttccggaaggcaatcaccgaaagcggttcgggtagatacccggctaccgttgagaacgccatcgcttccgagacgcgcgtctccggaatgatgccggctgacctgcgctgcgccacaggacgcggggaccacgacatggacgcgctcagccagttggcggctacatatttcatgcaggacaacttgaagttggccgcagccgacgctatcgatgcgattgagccgtggccgtggccgaatgctgtaccgatgatggagtcggtttccagaatcaaggaaatcgaccaggaaatgctgcgcatcgaatccgagctggaactgctcaagaccgacgcgcaccggattgggctggagctgccaagcaagcctgtccaggtcaagcccatcgaaccgggtagttgggaatggctctccaagttgcgcgaaggactggagatcacgcgtcgccaggaagacatcgatgacccacgccgtgccagggcgattgtggtgaagggtggcgtgcaggggtggattcgattcaacgtggcgaccggaaaggatgagtgggtgcccctgtaa

SEQ ID NO: 530011 - DNA, 639 bp, Stenotrophomonas maltophilia
atgccacctcgctcaaagattgacatgctgcccgacgacgttcgtgccgacctggaagagaggcttctcgtcggtcggacgcagggctatgtggaactggcggcacggctggctgcgcgtggttaccctgtcggcaagagcgctatcggagagttcgccaagcggcttggtgccaagcgctgcaacctcatcgatcagttgccctccgacgtacgatcaggcctggacgttcggttgaaggtcaatcgctactccaactatgcggtcattgccgcgtggctcgcctctatcggccacccgatcagccgaagcaccatcggtgcttacgcccagacgctgatgcagcgcaacggggtgaagatcaccacggcgactccctttcggaagaagagcgcacgcgactggcgcaagctgcccgaggcagtccaggtcgagctggctcgccggatcgttcagggcggctggaacacgcccaaggcgcatgcactttggctacaggaaagcggccacccccttggcgttgctgctgtgagggcgttcgcggccgacctgaccacggcattggccgtccagcgctgccaggcggtgctgggggtggcgcggctcggttgcgccgctgctggggatgcgctaccgtga

SEQ ID NO: 530012 - DNA, 441 bp, Stenotrophomonas maltophilia
atgaccgctattgccacccgtttcccgtccaccgcccgccttgatgctggcgacctggcccaagccctgctgggccgtttgcgccaacacgcggccattgccgctcccgtccgcctcacgcctcagcggcaggcagcccccgatgaggcccgcatgcgctccgaacaggtgcgctggatcgtcctcagtggcctgtcggcagcggccccgctgggcgcgtccgaggccatcctgcttgatctggcccgctgcatcttcgctgacttgcccctgaccgagctacgccgtgagctggcccatttggagcggcgcggcctcgccgtggtccgtgaacgcggggctggccgctggacggccgaggccaccgccgagggcttagcggtggccgactacagcgccccctgcccgatgggcatcgggcgaccgcttcgggtcttctga

SEQ ID NO: 530013 - DNA, 138 bp, Stenotrophomonas maltophilia
atggtgggtggccacctcaagcgccgccagcccaacggcagcggcgggcaggaccgcgtgatggccgctgagtaccagggcgtgcagctggagtggacccagcgtcctccgatgctgcgggaggtggctcatggctga

SEQ ID NO: 530014 - DNA, 411 bp, Stenotrophomonas maltophilia
atgtcttttgaatcgctgggcctggcgcccttcctgctgcgtgcgcttgccgagcagggctacgaaaacccgaccccgatccagcagcaggcgatcccgctggcactggccggtcgtgacctgctggccggcgcacagaccggcaccggcaagaccgccgccttcggcctgccgctgctgcagcacctgggcaccgcctcgcaggaagtgcgcagcggcccgcgcaagccgcgcgcgctgatcctggccccgacccgcgaactggccacccaggtgcacgacagcctgcgcggctacagcaagtaccgcgcattcccagcgcctgtatctacggcggcgtcggcatgggcaaccagctggacatcctgcgccgtggcgtggacctgctggtggcctgcccgggccgcctga

SEQ ID NO: 530015 - DNA, 939 bp, Stenotrophomonas maltophilia
gtgaaaacccgtcttgccgttgccctgctgattgccctgtccgcgcccgccgtggcccttgccgtgccgcctgccaccgccgcaccggccagcgtggccaccgaatcgcccgccgatgccgccttccgcgcgctgtacgagaaggaatggaagtggcgccagcagggcggcggcgaggccagcgaagacgaagacgcgccggccaatgccacccgcatgcccgatgtcggcccggccgcgcagcaggcgcgcctgaaggtgtgggacgagaccctcgccgcgctgaagaagatcgacccgaagaccctgtcgcccgacaaccaggtcaactacgcgatctaccacgaccaggtgttcaacctggccgaagagacgcgcctgcgcggctacgagatgcccttcaacgccgactcctcgttctggtccaacctgtccttcatggcccggcgcgagatgaagaccgtgcaggactaccagaactacatcgcacggctgaacgatgtgccgcgatacttcggccagcagaccgagaacatgcgtgccggcctgaagcgtggcttcagcgtgccgcgtgccgtgctcgatggccgcgaggtctccatcgccaccgtcgccgagctgatggatcccaccgagtcgccgctgtacgcgccgttcaagaaactgcccaacagcattccggccgccgagcaggccaggctgcaggcgcaggcgcgtgaagcgatcagcggcaaggtggtgccggcgttccagcagctgcgcaccttcttcgtcaacgagtacgtgccgcaggcgcgcaccaccctggccgccgaagcgatgcctgatggcaaggcgtactacaagcagcagatccacgaatacccacgctggacctgtcgccggacgagatccatcgcatcggcctggatgaagtcgcacgcatccagaaggaaatga

SEQ ID NO: 530016 - DNA, 1005 bp, Stenotrophomonas maltophilia
atgaatgatctgttgtcccaggacgagatcgatgccctgctccacggcgtggacagtggcgcggtcgaaaccgatccggaaccgccgtcaggcgaagcgcgctcgtacgacttcgccagccaggaccgcatcatccgcggtcgcatgccaaccctggaaatggtccacgagcgtttcgcgcgcctgtggcggatcggcctgttcaacctgatccgccgctcggccgagctgtcggtgcgcggcatcgagctgatcaagttcaacgactacatgcactcgctgtatgtgccgaccaacctgaacctgatccgcttcaagccgctgcgcggtaccggcctgatcgtgttcgagccgaccctggtgttcgccatcgtcgacaacttcttcggtggcgacgggcgctaccccacccgcatcgaaggccgcgagttcaccgccaccgaaatgcgggtgatccacctgctgctgaagcagaccttcgccgacctgcgcgaggcctgggcaccggtgatggacgtcgacttcgagtacatcaactcggagatcaacccgcacttcgccaacatcgtgacgccgcgcgaatacgtcgtggtgtgccgcctgcacgtcgaactcgatggcggcggtggcgacatccacgtcaccctgccgtattcgatgctggagccgatccgcgagctgctcgacgccggcatccagagcgaccgcaacgaccgcgacgagagctggggcaagaccctgcgtgaacagctcaacatcgccgaagtcaccctgtccagcgtactggccagcaagcgcatgaccctgcgtgacctgacccagctgaaggtcggcgacatcctgccgatcgagctgagcccgcaggtgccggtgtgcgtggagaacatcccggtgttcaccggcgagttcggcatcgccaacggcatgaacgccgtgaagatcaccgctacccatccgccgggcacccgcccgcgcgtacccgtcatccaggaagacccgcaatga

SEQ ID NO: 530017 - DNA, 792 bp, Stenotrophomonas maltophilia
atggacgccgccacccagatggctgccgacggcctgcaggccttcggcatgatcggcaccgtgctgtggaccatgctgcgcatcggcgcggtggccatggccatgcccatggtcggcacccgtgcggtgccggcacggatccgcgtgatcctggccggtacccttgccatcgcgttggcaccgctgctgccgccggttccggactggaccggcttcgatgctgccaccgtactgaccatcgcccgcgagctggccatcggcgtgtccatcggcttcctgctgcggctggtgttcgaggccggcgcgatggccggcgaactgatcgcccagggcaccggcctggccttcgcgcagatgagcgacccgcttcgtggtggcacctccggcgtgatcgggcagtggttctacctgctgttcggcctgctgttcttcaccgccaacggccatctggcgctgatctcgctggtggtggacagctaccgggcgctgccgatcggcgccccgctgccggacccgcacgccttcttcagcatcgctccgaccttcctgctgacggtgctgcgcggcgcattgaccctggccattccactgaccgtggcgatgctggcggtgaacctcgccttcggcgtgctggcgcgtgctgccccggcactgaatccgatccagctcggcctgccggtctcactgctgctgggcctgttcctgctggccctgctggccggggaaatgggcccgccggtacagcgcctgttcgatgccgccttccaggctgcggacgcggtcacacactga

SEQ ID NO: 530018 - DNA, 2250 bp, Stenotrophomonas maltophilia
gtggccctacgcaccccccttgctggcctgttgctggcccttgctgttggccacgccaacgccgctgatctgccgtggtcattgccagccgatgcttccccggcccaggtcgacgctgccctgcaggcccttggcaagggcgtgctgaagtcgcccagcctgaccgatgtacagcgcggccacgcgttggtggcggcgggccagacggccgaagcgcggcgatcgatccagcaggcacgcgcatcgcttgcaggcgaaggtgataccgcagcagtgcaacgctgggtaccgatgctgctgctcgtcaccgccggcgagcaggacgcagcggagtatgcgcgcgccttccacgccaccttcgccgccctcgacgacgttgccgcggtgcaggccggtgccgcactctcggttgagccagccccggtgcgcgcccagctggagcaggccgtcgcggcacaggcgggggcgacgaccattgccgaggctgtcgccctggaactgctgcgcctgcgggcggtactgcgtgcgcagaccctggccgctgccctggcccctccgctggtcgcggcggaagagcagcgccgcttcgccatcgacgacgcattgcgcatccccgttggcgatggcgtcgtgctgtcggcgcagctggcccgccctcgcgccgcatcggtgcccctgcctgcggccatgctgttcaccatctacaccgatccacccaagaatcggcagaagatgctgctggccgccgcgcatggctacgccggcatcgtggtcgatgcgcgcggcaagggccagggcacgggcaccatcgctccctacgaacatgacggcgaggacgccaatgcggccatcgactggatcagccaccagccatggaacgatggccgggtcgccatgtatggcggcagctacgagggctttaccgcctgggcagcagcgcgccatcaccatcccgcactgaagaccatcgtgccctacgttgccgccatccccggccagggcctgccgatggagaacaacgtgttcctgagtgccaactacggttgggcgttctatgtggccaatggcccgatgctggacaacgatacctacgatcagaacgagcgctggtcgcagctgccgcgccgctggtatgcctccggccgcccttaccggcagatcgaccagatcgacggcacatccaacccctggctgcagcgctggctcgatcaccccacgtacgacgcctactggcagtcgatggttccctatggcgatcagttcgacgacatccgcatcccggtactgaccatcaccggctactacgacgacggccagatctcggcactgcagtacttcaaggaccacctgcggcaccgccccgatgccgatcactccctgctgatcggcccctatgaccatcgcggtgcgcagtcggcgctcaagccgatgcagctgcgtggatacgacctggacgccgtcgcgcagttcgacacgcccgcactgaccttccagtggctggaccatgtgctgcgcggcgcccctcgcccggcgctggtgcctgaccgcgtgaactaccagctgatgggcgccaatcgctgggggcatgcggcaacactggacgccgccgcgggtgcccaccaccgctaccacctgtcggccgcacccgcttccgccgatggctaccaccgcctgcaggaacagccgccagcgccgggccagctggggcagaccgtggacctggccgaccgcaatgaaatgcggcatggctactaccccttcccgatcatcgcagcacaggacgaaagggatacggcgctgtcctttgccaccgatccctttaccggcccgatggatctggtgggcggcttctccggcgacctgaaggtgaggatcaacaagcgcgacttcgatttcaccgtcaccctgtacgagctgatggccgatggacaccggatgcagctgtcctattacatgggccgggccagccacgtgcgtgacccgggcacgcgccagttgctgcagcccggccaatggacccacctgcccttcgatcgcacgcgcatggtcgcccgccgcctggctgccggcagccgcctgctggtgaaggtagacgtgctgaaggacgccatgcaccaggtcaaccacggcagcggccgcgatgtcagcgacgaatcggccgctgatgcgggcaccccgctgcaggtggattggcacagcgacagtgttctgacgattcccctgcgccccgccagcgactccctacagtag

SEQ ID NO: 530019 - DNA, 1131 bp, Stenotrophomonas maltophilia
atgtccgagaacgaatccgccggcgaaaagaccgaacaacctaccgaaaaacgcctgcgcgacgcccgtgaacaaggcaacctgccgcgctcgcgcgaacttggcaccgccgccgtgttcggtgccggcgtgctggcggtgatggccatgagcggctcgatcggccgtggcgccagtgcctggatgaagcaggcgctcagcccggaacagggcctgcggcagaacccgaaggaactgttcggccacttcggcgacctgctgctgcagttcatgctggtgatcgcaccgctggtgctggtctgcctgctggccagcttcgtcgccccgctggtgatgggcggcctgcgctggtcgcagaaggcgttgctgcccgacatcaaccgcatgaacccgatgagcgggctcaagcgcctctatggccccgaggccattgccgagttcaccaaatcgctgctgcgcgtggcgttcgtcggtgtggccgccggactggtggtctggaccggcttcgacaccctgcgcgggctgatccaccacccgctggagaccgccatcaccgacgggctcggcttcaccctgcgcctgctgctggccaccgccggcgcgatgctggtgctggccgccatcgatgcgccgtaccagcgctggaactggatgcgcaagctgaagatgacccgtgaagagctgcgccgggaaatgaaggagagcgagggcagccccgaggtgaagggccgcatccgccagctgcagcagcagatggccaaccgccggatgatggaggcagtgcccaccgccgacgtggtggtggtcaacccgacgcactacgcggtggccctgaagtacgagggtgggaccatgaatgctcccaccgtggtcgccctgggcgtggatgagaccgccctgcgcatccgtgaggtggccgacggcaacaaggtcgcgatcgtctccgccccgcctttggcacgcgccttgtatcgggaaggccaactcggaaaggaaatccccgtgagactgtattcggccgtcgcccaggtcctgtcctacgtctaccagctgcgcgcctggcgcactggcccgatgccggacgccccgcacatccaggtggatgaattcggcaagggaggccgcccgtga

SEQ ID NO: 530020 - DNA, 1830 bp, Stenotrophomonas maltophilia
atgagcgcggtatccgacgacatcactgccgatttcatcatcgaggcacaggaaatcctggatcgcctgggcgaacagctggtgtcgctggagcaggcaccgcaggacaccgagcagctcaacgcggtgttccgtggataccacacgctcaagggcggtgccggcttccttggcgtcaccgcgatggtcgaactgtgccacgccgctgaagaggccctgggcatcgcgcgtgccgggcaggcggtgctgcaggcccaccacttcgacgccgcccagcaatcgctggactacctgcagtcgatgctggacgccgtgtcctccggcaccgagccaggctatgcgccgccggacctgatcgcgcagttcgacatgaacggtggcactgccgcgccggtcgctgcggccgcccctgcggcagctggcagcgacctgatcaccgacgacgaattcgaggccctgctcgaccagctgcatggcggcaacgcaccgaccgcggtcgcgccggccaggaaggccgacgacggcctgatcagcgaagacgagttcgaagcgctgctggaccagctgcacggcggcgctgcgccaggcgcgaagcctgctgccaccgtcgcggcggcacctgccgctgcaccgcgcccagcgcccgtaccggcgcccgcagccaagccggcggccaagccgatggccgaggccgagcacaccgtgcgcgtggacaccaagcgcctggatgcgatcgtcaacctgatcggcgaactggtgctttcccgcaaccgcctgaagaccctgcgtgcacgcctgcgcgacgaggagctggaccgcgccgtatcgacgctggacatcgccactgcccgcctgcagtcggcggtgatgcgtacccgcatgcagccggtgggcaaggtgttctcgcgcttccccaaggtcgcccgcgacgtcgcccgctcgctgaagaaggaagtggacctggagctggtcggcgccgaaaccgaactcgaccgcaacctggtcgaagcactggccgatccgctggtgcacctggtccgcaacgccatcgaccatggcgtggaaatgcccgacctgcgcgaagcacaaggcaagccgcggatgggccatgtacgcctgtcggcgcagcaggaaggtgactacgtcagcatcgaggtgcaggacgatggcgccggcatcgacccggagaagctgcgcgcgaaggcgcgtgagaaaggcctgatcgatccggaagccgccgcccgcctgagcagcgaggaatgcctgcacctggtgttcctgcccggcttctcgaccaagcagcaggtcaccgacatctccggccgtggcgtcggcatggacgtggtgcagtcgcgcatccgcgaactgagcggccagatccagatccagtcggaactgggtcgtggcagccgcttcctgatccgcgtgccgctcaccctcgcgatcctgccgaccctgctggtgcaggccggcgaggacgtctacgcgctaccgctggcacgcgtgatggaagtgctgcacgcgccgcgcacctcgctgggctggttcgatggccgcgccgtgcttgatcgccgctcgcacaccctgccgctggtcgacctgcgccagtggctggatgtgacgccggccgcgtcaaccctgctgaccatcgtggtgctgcaggccggcgaagcgcgcttcggcctggtcgtggaccaggtgcgcgggcgcgaggaagtggtcatcaagccactgccaaaagccctgcgcggcctgcgcggttatgccggtgcaacgttgatcggcgatggtcgcatggcactgatcctggacgtggacggcatacgctga

SEQ ID NO: 530021 - DNA, 783 bp, Stenotrophomonas maltophilia
atgcgcatctgggcagtcgccaaccagaagggcggagtcggcaagaccaccaccaccctcgccctcggccgcggcctggccgcgcttggccatcgcgtgctgctgatcgacctcgatccgcatgcctcgctcagccgcgccttcggcgtgccggtggatccgccgccggcgggcgtgctggaactgttcggcgccccgccggccgatctttccagcctgtgccatgccagcagcatccacggcctggactacgtctgcgcgcagtcggcgctggccacgctggagcgccgcagcgccaaccagcccggcctcggcctggccctgcagaacgcactggcgcgtcaccagggccagcacgactacatcctgctggactgtgcccccacccttggcctgttgatgatcaacgcactggccgctgccgaccgcctgatcattcccacccaggccgagccgctggccctgcatggcctggacggcatggtccgcaccggcgagatggtcgagcgctcgcgccgccgcccgctgccgatctcgatcctgccgaccctgttcgaccgccgcacccgcgccggcaacgagtcgctgcgcacgatgcaggatcgccacggcacccgcgtctgggaagacgccattccgatcgacacccgcatcagcaatgccgcaggcctgaccctgcccagcgttggtgaggactacccgggccgcggcctggccgcctatcgccgcgcactgaactggatcctcgttgaggatgcccgtgccctggagcaggccgcatga

SEQ ID NO: 530022 - DNA, 1215 bp, Stenotrophomonas maltophilia
atgaacagcaccggcgtactggacgactacctggacgaactgctgggcgaagcgatcgccccggcggccgtcgtgctgccaacgccggacagcgccgccccggctccggacagcacatcggaaccggaacgcgagccgacctgggatgacctgccggccgaggtgatctacgaaaccgacaccgtcgccgcggagcctgccgtggacaacgccacgctcgaagccgccttcgaggcggccacaacggccgagcgcgagcccacctgggacgatctgcccgctgaagtgatctatgagacggacgctgttgccgttgcccctgcacaggacgacgcagcactggaagccgccttcgaggccgccgcaatgccggtcgccgctcccgagcgcgaaccgacctgggatgacctgcctgacgaggtgatccacgagacggccccggccaaggccggcccggagcccacctgggacgacctgcccgacgaagtgatctacgagaccgacgcggccgacagccatcagctcgcccacactgacagccccggtctgcaggctgcgttcgaagccgctgctggtggcgaggatgtccccacgccgccaccggccgtggttgcgcccccggcaccgcgccctgcacccgcgcccgccccggccgcgcgtgctgccgccgcgccgccgccccgcgtcgccctggatgccccggccaccaaccgtcccggtacctggcaggagctgcaggcgcaggcgcaccagcccgccagcagtccgcacccgcagaaccgccgcgccggcgagcgcacctcgcgctggctgcgcctgcgctgcgggactcaggcctatgcgctggaactgctgaaagtgcaggaagtggtgttgccggtgccactgctgccgttgcgtggcacggcaccggcgatgctcgggatcatgaacctgcgtggccaggtggtgccggtgatggacctcggcctgcacctcggcgccgcagcggcagaagacgatgccctgacccgcatcgtggtgctggaagaggacggcgagaccatcggcctgcgcgtgtcggcagtggaagatgtcgccaacctcaccgattcacagatcgaacccccggataccgcccgcatctgccagatctccaatgatctgttccgcggcgtcgcccgggtcagccagcgcccgatgatcctgctggacgccacacggctgttgagttga

SEQ ID NO: 530023 - DNA, 309 bp, Stenotrophomonas maltophilia; identical to SEQ ID NO: 498726

SEQ ID NO: 530024 - DNA, 366 bp, Stenotrophomonas maltophilia
atgagcgcacgtatcttggtggtggacgattcggcgtcgatgcgccagatggtttccttcgccctcacctcggccggttttgccgtcgaagaagccgaagacggcgcggtcgcgctcggtcgcgccaagggccagcgcttcaacgcggtggtcaccgacgtcaacatgccgaacatggacggcatcgcgctgatccgcgaactgcgccagctgccggactacaagttcaccccgttgctgatgctgaccaccgaatcggccgccgacaagaagtccgaaggcaaggccgccggtgccaccggctggctggtcaagccgttcaatccggaacagctggtcgccaccgtgcagaaagtgctgggctga

SEQ ID NO: 530025 - DNA, 1992 bp, Stenotrophomonas maltophilia
atgagcatggacctgcaacgcttccacgccaccttcttcgaggagagccgcgaaggcctcgacgcgatggaggctggcctgctggccctggaatcggggcagcaggacgcggagatcatcaattcggtgttccgcgccgcccactcgatcaagggcggcgccggcaccttcggcttcgatgccatcgccggcctgacccacgtgctggaaacgctgctcgatgagctgcgtgccggcaagcgggccctggaaggccatgccgtcgatgccatgctgtcctcggtggatgtactgcgcgccctgctgcgcgaagccgaacatggccaggccgcagaccccgcggcggtcgccgcagtgaaggcgcgcctcgaagccgttctctccggccaggccgcaccgagcgcgccggccgctgccgcagccaaggtggacgatacgccggaagcctggcagatcgggttcaccccggcaccctcgctgttcatgagcggcaacgacccgttgcgcatcatccgcgaactggaacacctcggctcgctgcaggtggccgcgcgcatggaacgcctgccgggcttcgcccagctcgacccgctcgaggcccacctggcgtgggacctgggcctggtcggcaaggtgccgcgcagcaagatcgaagacaccttcgcctgggtgctggacgactgcgagctggacatccgtccggcagcgccgccgagcctggcaacccaggcgcccgttgctgcatccccttccacacctgctgccgtcgtgccggcagcgcctgctgcgcctgccgccggcggtgctgccacccaggaagccgaaacgtcgatccgcgtcagcgtcgacaaggtcgatgcgctgatcaacctggtcggcgaactggtcatcacccaggccatgctcaagcaggtctcgcacgcgctggacccggtccacgccgagagcctgttcgccggcctggaccagctggaacgcaacacccgcgatctgcaggaagcggtgatcggcgtgcgcatgctgccggtcgacgcggtgttccgccgcttcccgcgcctggtccgcgacctgtccagccgcctcggcaagcaggtgcgcctgcgcaccgtcggcgagggcaccgagctggacaaggggctgatcgagaagatcgccgatccactggtgcacctggtgcgcaactcgatcgaccacggcctggaaatgcccgacgtgcgtcgcggcgcgggcaaggacgaaaccggcacgatcaccctggccgcttcgcaccagggcggccatatcgtcattgaagtgagcgacgacggccgcggcctggatcgcgccaagatcctggccaaggccaccgaacgcggcctggccgtaccggacaacccgaccgattcgcaggtctgggacctgatcttccagccaggcttctccactgccgatgcggtcaccgacctgtccgggcgtggcgtcggcatggacgtggttcgccgcaacatccaggcactgggcggtgaggtccagatcgaaagcagcctgggtactggcacccgcacgctgatccgcctgccgctgaccctggccatcctcgacggcatgaccgtggcggttgccggcgaaaccctgatcctgccgctggcctatgtgcttgaggcgttgcagccgcaggccgaggacatccgcagcatggccggcgaaggccgcgtgctgcgcgtacgtggcgagtacctgccgatcctctcgctgagcgagtactacggctacggcaaccgtgcgccgggcagtgaatcgctggtggtcgtggtcgaaggcgatggccagaagatcgcactggaagtggatgaactggtcggccagcagcaggtggtggtgaagaacatcgagaacaactaccgccgtatcggcggggtgtccggtgccaccatccttggcgacggccgcgtcgcgttgatcgtcgacatcggcggactggtgcgctcgttgcggatgccgcaggccgcctga

SEQ ID NO: 530026 - DNA, 654 bp, Stenotrophomonas maltophilia
atgggtggcgttggcgtcggcgatcttgccgtccatctggccggcgatgtgggtgcccagggccttcatcgcagcgaacaggtcgcgacgcgccgggcgcgactgctcgtcggatatctgctgtgcccgagcgccatcaccggcggccacggcgtcgcgcatcgccttgttggcggcgaagtagcggtccagctgtgcgctggccgcgcgatagagttcacgctccttggccagcgccggcagcgccgagtaagcggccagctcgtcatgcacggccttggcggtgtcgtccatgcgcttgttgtagtcggcgaccttctccggctggtcgagcatgctcagctgtgcaagttcataggtgcggaattctcccagctgcgagcgcgcctcgcccaggtgctggaccgaggggatgtcgttgccagccatctcgcgcaactgcgcgttggcttcgctcaggcgcagcagtgcgaaggcgccgaggatcagggtcatcaaggtggtgagggtgaaccccacggccagcttgcgggcgatgggcagatcttggaaccacttcatgcagggtgctccaggtgggcagagtgccggcgtctgtgcgccggttcgggggtggttgcagagcgaacgggggtgcccggtggggttcggtga

SEQ ID NO: 530027 - DNA, 762 bp, Stenotrophomonas maltophilia
atgaagacgaccacgctgttcccctggccgggcgggaagacccgcctgctgccccacctgctgcccctggtgaccgagaccccccatcgcacctacgtcgaggccttcgccggcggtgccgctcttctgttcgccagagagccggccaaggccgaggtgctgaatgactgtcacggtgagctggtgcgcctgtaccgggtggtagccaaccaccttgaggaattcgttcggcagttcaagtgggcgctgacgagccgggaaatgttccgctggtgccagctccagcaccccgacacccttacggatatccagagagctgcgcgcttctactacctgcagcgactggcttggggtggcaaggcgactggccagaccccaggcttcggccggggcggtaagggcctcaatctgctgcgcatcgaagaggatctgagcgctgcgcaccttcggctccacaaggtcaccgtcgaacacctggcctggcagcagtgcatggccaagtacgatgccgccgacaccctgttcttcctcgatccgccgtactgggagaccgaggggtacggcgccccatttggaatggagcagtacctggagctggcgcgtcagatggccgggttgcgtggctctgccatcctgacgattaacgaccacccggccatgcgggaggtgttctgccagttcagggaccgggtggtgccaatccggtacacgattggccggcaggcggtgcagcggcgcgagctgatctacacgacttggtag

SEQ ID NO: 530028 - DNA, 762 bp, Stenotrophomonas maltophilia
atgaagacaaccacgctgttcccctggccgggcgggaagacccgcctgctgccccacctgctgcccctggtggccgacacccctcatcgcacttacgtcgaggccttcgccggcggcgctgctctcctgttcgcaagggagccggccaaggccgaggtgctgaatgactgtcacggcgagctggtgcgcctctaccgggtcgtggccaaccaccttgaggagttcgttcgccagttcaaatgggcgctgacgagccgggaaatgttccgctggtgccagcttcagcaccctgacaccctgacggatatccagcgggctgcgcgcttctactacctgcagcggcttgcctggggcggcaaggctactggccagacccccggcttcggtcgaggtggcaagggcctgaaccttctccgcatcgaggaggatctaagcgcggcacaccttcggcttcacaaggtgaccgtcgagcatttggcctggcagcagtgcatggccaagtacgatgccaccgacacactgttcttcctcgacccgccctattgggagaccgaggggtacggggctccctttgagatggagcagtaccgggagctggcacgccagatggcggggctgcgtggctctgccatcctgacgatcaacgaccacccggccatgcgggaagtgttcggccagttcagggaccgggtggtgccaatccggtacacgatcggccggcaggcggtgcagcggcgtgagctgatctacacgacctggtag

SEQ ID NO: 530029 - DNA, 1425 bp, Stenotrophomonas maltophilia
gtggccaagttcgcgccgatcattgcccagggccaagcctcgcgtatcgagcagcacatcttccaggaccagcagccggacggcaccagccggcagatccaggcgtttcgcgttcgcttcgccagtggtttccgtatcacggcactgtcatcgcgcccggagaacatccacggcctgcagggcgtggtcgacctggacgaagcggcgctgcacaaggacgtggccaaggtgctcgaatcggccaccgcgctgctgatctggggtggccggatccgagtgtggtccactcaccgcggcaagaagaacccgttcaaccagctggtgcaggacgtccaggccggtcgctacggaaagaaggccggggtcatccgcatcagcttcgatgatgccgtgtccaacgggctgtatgagcgagtctgcgccatgcgtggcaaggtggccaccgccgagggcaagaaggagtggtacaccgccatccgctcggcctatggcccgcgcaaggccgccatgcgtgaggagctggacgtcatcccgcgcgatggcgatggctcggccatcccctcggtctggatcgaccgggccatgcccgacgtccggcctgtgctgcgcctggtcttcgatgacgacttccccaagcgctcggaaaaggagcgcgagatctggtgctcggtctggatcgccaccacgctgctgccggtgctgcgcgcggcgatggccgggttcaccgggcgctgggcgatcggcatggacttcgctcgccaccgtcacttttccgtgatcaccccggccaagatcggccaggatctgcggcgcgacgtgcccttcctgatcgagatggccaatgcgcccacccgccagcaggagcagatcctgtgggcgctgttggacgcgctgaaggaaggattccctggccgctggtcgttcgctggcgacgccaccgggccgggccagaccctgatggaatacaccggcgaccgctacggccgggccgagctcgatgccgagacggggcgctacagcggcggcccgatccacgaggtcaccctgtcgcggccgtggtacagcgaatggatgcccaagtacatcgcgctgttcgaagacggcttcctcaccctgcccagggacgcatcgctggaggatgaccaccgcgccgtggagtacgtcgatggcatcccgatggtgccgcggctggagcgcaaggacctgcaggatcccgagctggtgcgtcacggcgacggcgcgatcgcaggcgtgctgatgcagtttgccgcgctcaaccacgtcacctcggtgcccattgagttccaggccgccggcacccgcgcctacattggcgacggccgggccgatggcgtggccaccgtcgtgactgacgatgccttcggcaccgtcagcggcggcaatgattttggaggattcgtatga

SEQ ID NO: 530030 - DNA, 435 bp, Stenotrophomonas maltophilia
atggtgtcccaggaactgagcgtgggcgaagtcgcccagcgcagtggcgtggcggtttcggcgctgcacttctacgagcgcaaggggttgatcagcagcctgcgcacttcgggtaaccagcgccgctatagccgcgacgtgctgcgccggctggcggtgatccgcgtcgcgcagcgcgtgggcatgccgttggaagcggtcggccgtgccttcgaaagcctgcccgaggggcgcgcaccgaccaaggccgactgggccaggctgtccgcgcgctggcgcaccgagctggaagaacgcatccacatgctgcaactgctgcgcgatgagctcaccggctgtatcggctgcggctgcctgtcgctgcagcgctgccgcctggccaacccgggggatgtgcttggcgaacgcggcgacggcccgatgcgctgggaatga

SEQ ID NO: 530031 - DNA, 603 bp, Stenotrophomonas maltophilia
atgaagatcctcctcgttggtgccagcggcaccctcggccaggcagtcgcccgccagctcggccaacagcatcagattctcgccgccggccgcagcagcggcgaactgcgcgtggacctgaccgacgacgccagcgtcgccgaactgttctcgcgtaccggcccggttgatgcggtgatttccaccgccggcaagctgcacttcggtccgctgcaggacatgacgccggcgcagttcaacctcggcctgcaggacaagctgctgggccaggtgcggctgacactggcggcgcagcaccatctcaacgccggcggctcgatcaccctgaccagcggcatcgtcagtgcacagccgatccgcgatggcgtcaacgccacctcggtgaatgccgcgctggaaggcttcgtgcgtgccgccgcgttggaactgctgccgcgtggcctgcgcatcaacgtggtcagcccgaacgtgctgatcgaatcgatggcggcctacggaccctacttcccgggctttgaagcggtgagcgcgcagcgcgcggcgctggccttccagcgtgcagtggaaggcatccagagcggcgagacgatcacggtctggtaa

SEQ ID NO: 530032 - DNA, 876 bp, Stenotrophomonas maltophilia
atggatacccttcgctgcatgcaggctttcgtcgcggtagccgagtgcggcagctttgcaggggccgctgaagagttgcaggtctcggcggtgatggtcggcaagtacatccagcagctggaggcgcacttgggcaccgcgttgctgcaacggaacacccgccgccagcgcctgaccgaagccggcagcgcctacctggccgggtgccggcaggtgctggagcaggtgcagcaggccgaggccgacgtggccggcctgcaggttcaaccgcgcgggctgctgcgggtcagcgcacccaccacctggggcagctgcgtgctggcgccacaactggccggcctgctgcgcgcgcagccgcagctgaacgttgaactggatctgagcaaccgccgtgtggatctgatcgaggacggcttcgacgtggcgatccgggtcgggccactgccgtcgcaggaggtggtggcgcggccgctgccaccgtatgcgatgagcctgtgcgcggcgccgtcctacctgcgccggcgcggcacgccgcgtacgcccgccgatctggaagggcatgactgcctgagccatctggcctggcgcggtggccacggctggcagctggccaacggtgaacaggtggactgggaagcgcgcctgacctgcaatgatggtgttgcactgcgcgaagccgcggtggccggggccgggctggtgctgcagccgaccgcactgctggccggggagattgcagccgggcggttgaagccgctgctgcgcgactacctgcccgaaccgcggccgatgcacctgatctacctgcccgaccgcagaccgcgcccgcggttgcagtgcttcgtcgatttcgtcatgaccacgttggggcaatga

SEQ ID NO: 530033 - DNA, 822 bp, Stenotrophomonas maltophilia
atggcagctgattccatcaccttcatcggcggcggcaacatggcgcgcagcctgatcgccggcctgatccgccagggcgtgccggccgcgcacatccacgtcgccgaaccggtggccgaactgcgccaggcgctggccgccgacttcggcgtgcaggtgcatgacaacgcgagcgatgccgccgcgcagggtggcacctggctgctggcggtgaagccgcaggtgctgcgcgaggtctgccagtctctgcaggcgctggcacaggcgagccgaccgctggtggtgtcgattgccgccggcatcaccagtgcgcagctgcagcgttggctggggggcgacctggcagtggtgcgcgcgatgccgaacacccctgccctgctcggcgcaggtgtgaccggcctgttcgccacaccgtcggtggacacgcagcagcacgcgcgggccgagcaggtgctggccagtgccgggcgcacggtgtggatcgacagcgaggggctgatggattcagtgactgccgtttccggcagcggcccggcctatgtgttcctgctggccgaagcgatggaagcggcgggtattgcccagggcctgccggccgacgccgcacgcacgctggtggtgcagactctgctgggcgcctcgcgcatgctggatgaggctggtgaaagcccggcggaactgcgccgccgcgtgacctcgcccaacggcaccacccaggccgcgatcgagagcttccaggccggtggcttcgagggcctggtggatacggcactgcgcgctgcgcaggtgcgtgggcaggaactgtctgcggcgaatgattga

SEQ ID NO: 530034 - DNA, 678 bp, Stenotrophomonas maltophilia
gtggccactcccctgccccagatcctgagcaacctgcatgccgccgccgaggccgctggcaggcccgacccacgcctgctggcggtgtccaagacccagccggccgaggccgtggccgcgctggccgcgcagggccagcacgccttcggcgagaactacgtgcaggaggcactggccaagatgcaggcgctgcagcacctggcgctggaatggcacctgatcggccacctgcagtcgaacaaggccgaggccgtggccagccatttcgactgggtgcagagcgtggaccgccccaagctggtgaccgcgctggcacgccatcgcccggccgcgcgaggcccgctgaacgtgctgatccaggtcaacatcgacgacgaatccagcaagcatggctgtgcaccggaagaagtggatgcactggccgcagcgattgccgccgaacccaccctgcgcctgcgcgggctgatggcgattcccgcgccatggcccgaagccgagcgccgtcgggatgcattcgtgcgcatgcgcacacttttccagtcgctggctgcccagcacgcgcagatcgacacgctgtcgatgggcatgagcagcgactacgccgaagccatcgccgagggcgccaccctggtgcgcatcggcaccgccctgttcggcgcgcgcccgcgcccggcctga

SEQ ID NO: 530035 - DNA, 1038 bp, Stenotrophomonas maltophilia
atggatatcgccgaactgctggcgttttccgtaaagaacaaagcgtccgacctgcacctgtccgcaggcctgccgccgatgatccgcgtcgacggcgacgttcgccggatcaacatcccagccctggaccacaagcaggtccatgcgctggtgtacgacatcatgtccgacaagcagcgccgcgattacgaggaattcctcgaagtggacttctccttcgagattccatcgctggcgcgcttccgagtgaacgcgttcaaccagaaccgcggtgccggtgcggtgttccgtaccattccgtccgaggtgctcaccctcgaggacctggcctgcccgccgctgttccgcgaagtgatccagcagccgcagggcctgatcctggtaaccggcccgaccggttcgggcaagtcgaccacgctggcggcgatgatcgactacatcaacaagaacgagtacggccacatcctcaccgtcgaggatccgatcgaattcgtgcatacctcgcagaagtgcctgatcaaccagcgcgaagtgcaccgcgacacgcatggcttcaatgaagcactgcgctcggcgctgcgtgaggacccggacatcatcctggtgggcgaacttcgtgacctggaaaccatccgcctggcactgaccgcagcggaaaccggccacctggtgttcggcaccctgcataccagttcggcggccaagaccatcgaccgcatcatcgacgtgttcccggccggcgaaaagccgatggtgcgctcgatgctgtccgagtcgttgcgcgcggtcatttcgcaggcgctgctgaagaaggttggcggcggccgtaccgcagcgtgggaaatcatggtcggcaccccggccatccgcaacctgatccgcgaggacaaggtggcgcagatgtactcggccatccagactggccagcagtacggcatgatgaccctggaccagcacctgcaggacctggtcaagcgcagcctgatcacccgaaaccaggcccgtgagtacgccaaggacaagcgcctgttcgagtaa

SEQ ID NO: 530036 - DNA, 1143 bp, Stenotrophomonas maltophilia
gtgaacaccaccgcgaccaccatcgatttcacttcgttcctcaagctgatggcgcaccagcgcgcctcggacctgttcatcactgcgggcatgccgccggcgatgaaggtcaacggcaagatctcgccgatcacgcagaccccgctcacgccgcagcagagccgcgacctggtcctcaacgtgatgaccccggcgcagcgcgaggaattcgagaagacccacgaatgcaacttcgccatcggcctgtccggtgtcggccgcttccgcgtcagctgcttctaccagcgcaaccaggtcggcatggtgctgcgtcgcatcgagacgcgcattccgacggtggaagaactgagcctgccgccgatcatcaagacgctggcgatgaccaagcgcggcatcatcctgttcgtcggtgccaccggtaccggtaaatcgacctcgctggcggcgatgatcggttaccgcaaccagaactcgaccggccacatcatcaccatcgaagatccgatcgaattcgtgcacaagcacgagggctgcatcatcacccagcgcgaagtcggcatcgataccgacagctgggaagccgcgctgaagaacaccctgcgccaggcgccggacgtgatcatgattggcgaggtgcgtacccgcgaaggcatggaccacgccatcgcgttcgccgaaaccggccacctggtgctgtgcaccctgcatgccaacaacgccaaccaggcgatggaccgcatcgtcaacttcttcccggaagaccgccgcaaccagctgctgatggacctgtcgctgaatctcaagggcgtggtcgcgcagcagctggtgccgtcgcccgatggccgctcgcgcaaggtggcgatggagatcctgctgggcacgccgctggtgcaggactacatccgcgacggcgagatccacaagctgaaggaagtgatgaaggactcggtccagctgggcatgaagaccttcgaccagagcctgttcgagctgtaccaggccggcgagatcagctacgaggacgcgctgcgttacgccgattcgcagaacgaagtgcgcctgcgcatcaagctcagccagggcggcgacgcacgcacgctgtcacagggcctggatggcgtggagatctccgagatccggtga

SEQ ID NO: 530037 - DNA, 984 bp, Stenotrophomonas maltophilia
atgcagacacgtgaactcggccgcagcggcctgaaggtttccgccttgggcctgggttgcatgggcctgacccatgcctatggccagccggtcgagcgcagccagggcatcgccctgctgcacgcggccgttgaacgcggcgtgaccttcttcgacaccgccgaagtgtacggcccgtacaccaatgaagacctgctcggcgaggccctggcgccttaccgcgacaagctggtgatcgccaccaagttcggcttcagggatgcgcgcaccgataccggcctggacagccgccccgagaacatccgcgccgtggccgaagccagtctcaagcgcctgcgcaccgaccatatcgacctgttctaccagcaccgtgtcgacccgaacgtgccgatcgaggacgtggctggcaccgtgcgcgacctgatcgccgagggcaaggtcggccacttcggcctgtccgaggccagcgccgccaccgtgcgccgtgcgcacgcggtgcagccggtggctgccgtgcagagcgagtattcgctgtggtggcgtgaaccggagcgcgaactgctgccggccctgcaggaactgggcatcggcttcgtgccgttcagtccgctcggccgtggcttcctgaccggcgcgatcaacgccgacaccaccttcgacgccaacgatttccgcaacagcgtgccgcgcttcgaagtggacgcccgccgcgccaaccaggcgctggtggatcgcatcagtacgattgctgcagcacgcggcgcgaccccggcgcaggtggcgctggcctggctgctggcgcaggcgtcgtggatcgtgccgattccgggcaccaccaagatccaccgcctggaagagaacctgggcgcggctgacctgcagctggcgccggaggaactgcagcgcatcgcgcaggcgctggatgaagtatcgatcgtcggtgagcgctacaacgcccagcgtgcggcccaggccaagggctga

SEQ ID NO: 530038 - DNA, 900 bp, Stenotrophomonas maltophilia
atgccccgcgaaaacctcaacgacctgcaggccttcgtgcacgttgcccgcgagggcagcttcaccaaggccgccgcccagctgggcgtgtcccagtccgcgctcagccatgccatgcgcggcctggaacagcgcctgggcgtgcgcctgctgacccgcaccactcggagcgtgtccaccaccgaagccggtgcccgcctgctcgacaccctgggcccgcgcctggccgagatcgaggacggactggccgcgctggccgaataccgtgaacgcccggccggcaccatccgcatcaatgccaccggccatgccgccgagtacatcgcgtggccacggctggcgccgctgctgcagcagtatccggacctcaaggtggaactgaccgccgactacgggctggccgacatcgtggctgagcgctacgacatcggcatccgcctcggcgaacgcctggcgcgcgacatggtcgccgtgccgatcagcccgccgctgcgcatgcgcgtggtcggtgcacccagctacttccgccagcacgtggtcccacgccatccggacgagctggcaggccacaactgcgtgaccctgcgcctgcccacgcatggcgggctgatgccgtgggatttcggccaggacggcaacgaactgagcgtgcgcgtgagcggccagtggaccttcaacaccatgggcatgacccgcgccgctgcgctggccggcagcggactggcctggctgccggaagaccaggtgcagccgatgctggacgatggccgcctgcagtcggtactggacgactggtgcccgcacttcgatggctactacgcgtactacccgtcgcgccgccacgtcacggtggcgatgcgcacggtgctggatgcgctgcgcgggccgatggctggatga

SEQ ID NO: 530039 - DNA, 213 bp, Stenotrophomonas maltophilia
atgagcactgacaccaagccgaaaggcccggcctcgtatttcccctccatcgagaagacctacgggcagccggtggcgcactggttcgggctgctggccgggaagaagggcctgaaacacatggaactggtcagcttcctgaaaagtgagcatgggctgggccatggccatgccaatgcgctggtggcgcaccatctggccggcaagggctga

SEQ ID NO: 530040 - DNA, 1356 bp, Stenotrophomonas maltophilia
gtgggtacgccggggttgtccgacagcatggagcccggccagtggctggacctgatggccgacgacagcccggcgctgcgcgtgcagttcttcggcgcggtacccgagccgatgcaacgctactggcgaggaccggtactgaccgccttcgatggccggcgctggacacgtgaccgcgccagcgagcgacggccggcggccgtggtcgaggccggcacgcagggctgggactaccagatcgactacgaacccaccgaccggcgccagctggtggcactggacctgcccagccgcgcgcctgcaggcagcacgctggatgcggacatgagcctgagcagcgagcggtcactggcgtcgctgagccgctggcggttgcattcggcgccaccacaacgcttcgacagcacgctgtcaccctatctgcgacgggccgcgctgcagttgcccagtggcttcaacccgcgcaccgccacgttggcgcagcaatggcggcagcaggctggcagcgatgacgaggccatcgtgcgccgcgcgctgcagtggatcaccaccgacttctcgtacacgctggacacccctgcggcagggcgcgacccgatcgacgagttcctgttcggctacaaggccggcttctgtgaacacttcagctcggccttcgtggtgttgatgcgcaacgccggcgtcccggcacgggtggtgaccggctttgccggcggcacctacaaccgccttggcgactactggatcgtgcggcggatggacgcccacgcctgggccgaggtatggctgccgcagcgcggctgggtacgggttgacccgaccgcagccgtggcaccggaacgcatcctggacacactggacgaccgcctgcaggccggtacggacacgccactgcagcaacgctggcagcagctggggcagatgggcgactggctgcgccgcggctggaacgacctggtgctgtcattcgatgcacgccgccagcagcaactgctcacgccgttcgggctggatgatctgggccccacgcaacttgtcgctggcttcgtggtggcaacgatgctggccttggcgtggatggcctggctgctggcccgtggcgagcgcgaacgcgacccgctgctgcgcgcctggcaccggctcggacggcgctacgcccgcctcggcctggcccgtgaaccgcacgaaaccgcacaggactgggcccagcgggtgcaccggcagcgccctgacccggccctgctcgcactcagccagcgtttcgccgacgcgcgctacgctggaacttgcaccgacctcgcttcattattgcgggacctgcgcaggcatcgcccgacttccggagcctccccatga

SEQ ID NO: 530041 - DNA, 528 bp, Stenotrophomonas maltophilia
atgaacaccaagttccttctcaccgctgtggccacgctggccctgtcggcctgcgccacggcccccaagccgctgcagggacagttcagcctggtctccccgcgcgactcagtcgctacccagcagatcggcacgccggtccgttggggcggtcgcatcatcgaaaccaagcccggccagggcgagacctgcttccagatcatctcgcgcccgctcaatggcagtggccgcccgaacaccacctcgtccgacgccagcgacggtcgtttcatcgcctgccgtgccggcttctacgacccggccgtgttcgaagccggtcgtgacgtgactttcatcggcaagatcgacggctaccagaacacccgcatcggcgagtacgactaccgcctgcccaagctgtcggccgatgtgatctacctgtggccggaacagcgccaggtcgacgtggtgccctacccctatggcccgtggggcccgggcccgtatggtccgtactggggcggctatggtcgctggggctggtggtga

SEQ ID NO: 530042 - DNA, 360 bp, Stenotrophomonas maltophilia
atgagcaacgaaaccctcttcagcaagatcatccgtcgcgagatcccggccaccatcgtctacgaggatgacgaggtgctgggcttcaaggacatcgcaccgcaggcaccggtgcacgtgctgttcattccgaagaacgagatcattccgaccctggatgacctgcagccgtcgcaggcgcacctgatcggcaagctggcgctggctgccgccgagtacgcgcgccgcgagggcttcgcacaggacggctaccgcatcgtgatgaactgccgcgagcatgccgggcagaccgtgttccatatccacatgcacctgctggccggtgcgccgctggggcatttcggtgcgcctgggcgttga

SEQ ID NO: 530043 - DNA, 600 bp, Stenotrophomonas maltophilia
gtgtccgcacccctgcttgaacaattgatcgacgcattgcgggtgctgcctggcgtcggccagaagactgcacagcgcatggcctatcacctgctcgagcgcgagcgcgaaggtggccagcgtctggccgagacactggcattggcggtggagcgaatcggccactgcgtgcagtgccgcgatttcagcgaaaccgagctgtgcccgacctgtgccaacggcagccgcgagcgcagccagctgtgcgtggtcgaatcgccggccgaccgcctggccatcgagaacgccaccggcttccgcggtgtctacttcgtgctgcaggggcggctgtcgccgctcgatggcatcggcccgcgcgagctgggcctggagcaattggagcgacggttggccgagggcgaggtgcaggagctgatcatcgccaccagcgccactgtggagggcgaggccaccgcgcattacctggcgcagctggcgcgcgcacgcaaggtgcagccgagccgtttggcgcagggcctgccacttggcggtgaactcgaatacgtcgatcgcggcacgctctcgcacgcgttcggaacgcgcagcgaattccgcgattga

SEQ ID NO: 530044 - DNA, 321 bp, Stenotrophomonas maltophilia
atgcgcggaaacatcgcccaactgatgcagcaggcccagaaaatgcaggaaaacctgcagaaggcccaggaagaaatcgccaagatcgaagtgaccggcagcgccggcggcggcatggtcagcgtgaccctgaccggtgccaaggaatgccgcaaggtgcgcatcgacccgtcgctgaccagcgacccggagatgctggaagacctgatcgccgccgccttcaatgatgcctcgaacaagatcgatgccgagtcgaagtcgaagatggggtcggccaccgccggcatgcagctgccgccgggcatgaagctgccgttctga

SEQ ID NO: 530045 - DNA, 2052 bp, Stenotrophomonas maltophilia
atggaaaacggtggcctgatgtcctatctcgtccttgcccgcaagtggcgtccaaagcgttttgccgagctggtgggccaggaacacgtggtccgtgcgctcagcaacgcgctggacagcggccgggtccaccatgcgttcctgttcaccggcacccgcggcgtgggcaagaccaccatcgcgcgcatcttcgccaagtcgctgaactgcgaacagggcaccagtgccgatccctgcggccagtgtgcagcctgcctggatatcgacgccggccgctacatcgacctgctggaaatcgacgccgcgtccaacaccggcgtggacgacgtgcgcgaggtgatcgagaacgcgcagtacatgccttcgcgtggcaagtacaaggtctacctgatcgacgaagtgcacatgctgtccaaggcggcgttcaatgcgctgctgaagacgctggaagagccgccggagcacgtgaagttcctgctggccaccaccgatccgcagaagctgccggtcaccgtgctcagccgctgcctgcagttcaacctcaagcgcctggacgaggaccagatccagggccagatgacccgcatcctggcggccgaggagatcgaggccgacggcagtgccatcgtgcagctggccaaggccgctgatggcagcctgcgggatggcctgtcgctgctggaccaggcgattgcctatgccggcggtgcgctgcgcgaggacgtggtgcgtaccatgctgggcacggtcgaccgcacccaggtggcggcgatgctcgatgcgctggctgacggcgatggcccgcgcctgctgcaggtggtggccgcgctggccgaattctcgccggactggagtggcgtgctggaagcgctggccgaaggcctgcaccgcatccaggtgcagcagctggtaccgggtgcggccgttgccgaaggcctggatgccgccgcattcgccgagcgcctgcgcccggaagtggtgcagctctggtaccagatggccttgaacggccgtcgtgacctgccgatggcgccgagcccgcgcgcgggcttcgagatggccgtgctgcgcatgctggcgttccgcccggccgcggcggtcccgccggtgccgaagtcggtggagggggcaggcaatgcgccgggtggcaatgctgccggtggtggcaccggtgcggggacccacgaagcgacgccggcgactgccgccgcttcggcaagcccggccgtggtggcgcaggtggccgctccggtgcaggccgcgccgcgcgaacctgaacccgaacctgagccggccccgcaacccgaaccggacccgacgccggagcccgagccggttccggtggaagagccggtgtcaccgccgccggtgaaggccgaagcagcgacgccgccgtccgttgaaacagaagtgggcgacgacctgccgccgtgggccaccgacgaagccgaggcacgtgacgaggcgctggcggccgagatggctgggccggaagctgccatggtggcgccctggcatgagccgccggctcccgtcgcggctcccagcgagcctgcaccgcccgagcgcccgttccgcactgaaggcattgccatcgcgccggtcgagccggcgccagtgcaggagaatgcgccgctggaaggtgtgagcgacctggccagcgccgaggactggctggatctggtcgccaacagtggcctgagcggcccgtcgcggcagctggccgccaacgctgccttcatcagttgccagcacgggaccttgaaactgggcctttcgcccggatttgaatacctgcgctcggagcgcgcgctggccgccctgggcgagatgctggagaaggccctcggccaggcgccgaagatcgtggtcgagaccgtggaaaccgaacacgttccggccgagactctgcaccagcgtgccgaccgccagcgtagtgagcggcagcaggtggcagaggccgttttcatggacgacccggaagtgcaggtgctgatccaacagcacggtgcccgggttgtttccgattccatccgttcttttgacgagtaa

SEQ ID NO: 530046 - DNA, 186 bp, Stenotrophomonas maltophilia; identical to SEQ ID NO: 517686

SEQ ID NO: 530047 - DNA, 168 bp, Stenotrophomonas maltophilia
atgcaggagcgggagtgccttctcccactcacccttagactgatcctggaggaccgcatgtacattgtcctccgcaagcacaaggtcccagtcaaccaactgcttaattcgcactgtctcgtctgcaccatcggccacttcgccgtcccaaacaaatggacgccttag

SEQ ID NO: 530048 - DNA, 681 bp, Stenotrophomonas maltophilia
gtgaagctgttcgccaacggcaccgcgatccacgtcgccatcgcccaggccactgccggcgagtaccgccatcatgcgttcggagttcttgccaaggccggcgcctacgacggcggcacctatgtggatggcacgtactggccactgaacggcagctccagtggtgtgatcagcaccggcactcccacggtggtgctgttcggatacaacaccaatgggcttggatgcggacaggtgcgggccgactctgtcgaggatgggcgtaccaacagctatcacatgatctgtaacacctacggtggctcgctcggcaccgagggccaggccggtagcggtgtcgggcccagctaccagggctcgtccaacgacgtcacgctagaccacctttggctggggcgtgcgctgggcaatgccgacgagaacttcttctccggtagaagcatccttcacccgatccacctgtgggtccggcgagctggaaccacccccaacctgtcgccgatcggcgaggtgatcgggctgcgggcctgctacctggagaagctggagcccgagcaagagatcacgatcggtgctgagacctgggttgtcttcccttgggttcgcaagctgacgatggccagcggttcgaaccagcctccggcaagcaacgcctatggctgggcagtccggaagtcctga

SEQ ID NO: 530049 - DNA, 390 bp, Stenotrophomonas maltophilia
atgcagctggccctgctaccgcaagagctgtccccacagacggtgcttttgcagctgcagggccgccgcggcgccgtcaacggcatcaccgcccgcgacctggtgcagcagatcacttcacgtaccagcaccgccgacgaacgtcgcctgcgccagatcatcgagcagctgcggcgcgaggggcacccgatctgcgcccacccggctcacggctaccacctggccgccagcgcggccgaactggaccgcgcctgcaccttcctggtcgggcgcgccatgacctccctggagcaggtcagcgcgatgaagcgcgttgcgctcccggatctgtacggacaactcgggctggacaagcccgctaccgacgaggaatccaaccatgaaccatga

SEQ ID NO: 530050 - DNA, 240 bp, Stenotrophomonas maltophilia
atggttgattacaacgtctctgggccgcagtacctgcgcagcttcgcttttcacttgatgcgcgatgccgagctgcccgagcgacaggtgacggtaatgcaccgcgacctgttccgtcgcgccggcattgagtggcgcgatggccagagcatggcttcgctgctggacggcctcaacctgcagcagttgcgtgcgctggtcgaccagctgcgcgacggcgatgacgacgaggaggaatga

SEQ ID NO: 530051 - DNA, 1134 bp, Stenotrophomonas maltophilia
gtgaactaccgtgatctgtggacgtggatgctggccggcgccctggcggcagttttgcccaaagcgggggcgcagcagcccccggaaacgcacccggccagcgcgcaccaggacatcgtgatgagctgggaccgctcggccatcccggcggagatcgtgctgtgggcgccgaagacggtgctggcctattcggcggccgaccccaatgcctatgcgactgcgcatctggtgtgcaggtcggagacggatgcttcggaggggcggtgcccggtggttgggtgggaggaccccggtcttgggcctggcgcaatagctattgaagctcttgaacggcggtctggccttcgtgcagatctggaagcaaaggctttggtcgtgcgaccacaatctggcgcgtcgtgctatgcgtcgtactggtccagcgaaacgcacgttccttggtcctcggtattggaaatctgcgcggttcatcagtcagcaggaatcggcgcccggctctccatacctgccgcagagctcgagcgtctggtcgccgggcactggaccgcgcggctggcgctggagatgcctgcgcatgagggcggccccagcctcgctacctacaccttcaacctcgacttcaccatcaccgatcacgacgcggtcgccatctatttcccgctgttcaaccacgtcacgccgcatgtgggcctgaacctgcgctacgaccccatcgccaaagtgatcggggggcgcaacgaactggacatgtgcctgtatgacggactcggatcgcaggcggcgtacctgggcgtgaccgtgcgcgacaacagcggtcgtgcgcccggtggcagtggctattcggcatggcacgtcgatggtggcaccgatgacagccagcggctggacttcaccgtcaccctcgaccacaacggcacgccggtacccatgcgcaatggcgtcgaacagcagctgcacggcatcgacagcgcgcggctgcgcatggtgctgctgccgggcatgaaccagccggtgttctgcgtgcccaccccactcgcgttcgagaccccccgcgtacccgttgccggcaaacgcaacggccactacgacggcgcgctgcagatcgagctgcgcgtccccaccaccaccccatga

SEQ ID NO: 530052 - DNA, 705 bp, Stenotrophomonas maltophilia
atgaagcccctcatccgttgcctgttgccgctgtcgctcctgctggccgcgcaggcgcaggccaacctcaccatccaccccatgcgcacctcggtggatggcaagcgccccacccagatacgggtgtactcgcagtccacacagccacagtacgtgcaggtatcgctgcgccgcatcgtcaacccggccgaggagaccgagcacgaagtggaactcgaccccgaggaggcggccatcgcggtcaccccggccaagtttgcgctggccggtggcggcaaccggctgatccgcatcgtgccattgcggccgccagaggtggaaaccgcctaccgcgtgtacttcgaaggggtcgccggccccgacgaggcggtcccggatgccagcgaggacgccgaggcccaggtcggcgtcagcctggtgtggggggccctggtcaatgtgctgccggtggatgcgcgcgttgagctgcgggtggacagcaacacgttgcggaacctgggcacggtccgggtcggcatcaccagcgtggccgactgcgtgggcagccgatgtactgcccacgacgtctcgcgggcgctgtacccgggcggaatgctccacctgcccttcgacgcgcagccggggcacaccgtgcagctgcgctaccgccttacccgcgacggccatcgcgaacacgtgcagaccgtcatcccggcggccatctga

SEQ ID NO: 530053 - DNA, 3480 bp, Stenotrophomonas maltophilia
atgcattacccacgtacaccacggcgcagtggcgctggcatttcctcgctcccacgttcaccgctgatgatcgcgctgctgctggcgctgccatcggcgtgggccgaagcaccaccctcggcggaagtcgatgacgaggtcgccgaggccacttgggaggacagacggcactgggcactgcaggctgcgttcgggccggcgtcctacgttggtctggacgcgtcggctgccgccgcgcctgccggcacttacaagcagttggtgcttacaaccgacacctcgtaccgggactccacggtaagcggcaatcatctggtgctcgtagggtcgcgctcatcgttgcgcgggtcgacctcggtgggatacggcaatctgattgaatccaacggagacagcaatgtcgcggtgggttaccaggtacgcgtgagccgtgggtacagtacggccgtgggtgcacgcgccgtatccgacggcatcggcacagtcgcgctcggccaccacgcgcaagcccattcggacaattccatcgccattggcagtggcacgcggacggtcaacagcactgctggcgagtcccgcatcgccatcggtggcaacgcttacgcaggcagtgccggctacagtggggcggtggcactgggcggcaacagccgcgccgagtacgacgccatcgccgtgggcatgagcagccaggcaaaggcggttggcgcactcgcggtgggccgcttctcgctcgcttcgggggagggcagcctggcattgggcaaggacagcagcagtaccggcaaacaggccattgcgctggggcagggggccactgcctcggcatattcggcgtttgccatcggcgcggaggccagggcagcggccgaaggcgcggtcgcattcggctatggcgcccaagtcaacagcagcagcgcccgttttgccgtggcactgggcgaaagatccagcgcgtcgcacttgaattcggtggccttgggcgcgacctcaacgacttcggcgaccaatcaggtatccgtcggcagcagctccctgaagcgcaagatcgtgaatgtcgcagatggggcgctgggcacgtccagcagcgaggcggtcaccggtaagcagctgcatgccaccaaccagaccctggctgccaccaccagcactgccaatgcagcaaagtccagcgccgacagtgcgttgtccaaggctaatacgctgaccggcctgctcagtcagaccagcagcagcggcaacgtgcgcctgggcggtgcaaacagcggcggagtgctggacgtgcgcaacagcggcaacagcagccgccgcatcaccggcgttgccgacggcgcgatcactaccaccagcacggaggcggtgaatggcaagcagttgtacgcgaccaacagcaacgtcgccaaggcggcatccgatgccgatgccgcgttgcaggccagcgcgcacctgttgggtctcatcggccaatcaggccccacaggcaacgtgcgcctgggcggcagcaacagcggttccgttgtcgatgtgcgcaacagcgccaacgcagaccgcctgctgtcgggtgtcgctgccggttcggtcagcgctgccagtgccgaggcagtgaatggacaacagctctacgccaccaaccagaacgtggacgcggccgccgccaccgccaccagtgcgcgctccacggcaaacacggcgcacgctaccgccaacaccgcgctgatcaaggtgaacgttctggacagcctgctgagccagaccagcaacacgagcgacctgcgcctgggggcaggcaacagcggaactgttctggatatcggcaatcgaagtggcgccgcacgacgcatcaccaatgttgccaatgggcggctgagtaccagcagtgctgacgccgtttccggccagcagctgcacgccaccaacgaagcagtcaacgcccagggcgagcgtgttgatgggcacgatgacctgattgcggacaatcgcagtgagctggagcgcttgcgcgaggcgttcgaggatttcgacccagacctggacggcgtggtgaagttcagtgacgaccgtagccatgtggatctggacggcgcgcgggtcaccggtgtggccgatggcgatatcgactctgccaccagcaccgatgcggtgaatggtgggcagctgcatgccaccaaccagcgtatcggtcgggtggaatcggtggggcggctgatggcgtttggcgatgaagcgggcagcgtggacgctgccgccggcatctatggcgtcgcgattggcaatggcgcttctgcttcgccggattccgaaggcggtacggcggtgggggcgtactcgtttgcgctgggaatgaactcggttgcggtgggtagggggtcgcacgtgtcggatacgtcaacagacggattcgcgctgggcgcaagcgctcgtgttgatgctgtaggtggtttggctatcggcaagaactcattgattgaaagtggggcagacaatgcggtggcgttggggcgctcttccatcgccactgagcaagacactgtctctctaggaaatgtgtccctgcaacgccggctgacaaacctcgctcgcggtaccgccgcgcacgacgccgtcgccatcgatcagctttcggacagcctcgctgctctcggcggtggtgccggtctggattcgaagggcaatatcatccgcccgagctacaccatgcagggcagttcgcagagcacagtaggcgaagcactgagcatcctcgacggcgcggtggtcgcgcagacggaaaagaccgggcgcatggagcagcaactcgattccatgttccaagcgggcgccacaatgcgtgccgacggcatcagccagttgaacctggccggcgcccagggcatggtcctgggcaacgtagccaacggcctggtcgcggccggcagtcgcgacgcggtgaacggtgggcagctgcacgccatgcagcggcagctcaacggccgcatggatgggttggagcagcgcatcgacggccagccgcaggcgcgcgttgccgccactgtcgccagcacccccgaggctcctacgccgccggccgaagcgcccaccgtggccgacaccggcaaggcgcccaacgctgcaccggaaacgccaaaggaaccgaccccgcaggtcgacaccgccgatctggaaaagatgctggcccgtgccaacgagtacagcgatggcgtttcccgcgaggtggaccgccgcctggacaagatggacaagcgcttcaaccgcatggcggcgatgagcagtgcgcagagtgcgatggccatgaacaccgcggggctgaacacctacaaccgcctgggtgcaggcgtgggctacagcgatggcgaatccgccatggcggtcggctaccagcgcgtgctcaacgaaaagggctcagccaccttcagcctcaatggcgcgttcaccaacagcggtgagcgcagcatgggcgtcggcgtgggcatcggctggtaa

SEQ ID NO: 530054 - DNA, 354 bp, Stenotrophomonas maltophilia
gtggttgaaaacggtgccaatcgtgacttttcaccccctgggcccagcaaggtgtgggtcaccgacatcacctacatccggacgtatgaaggctggctcttcctggcagtgatcggcctttactcacggcaggtggttggctgggcgacacagtcccagatgaccaccgatcttgtgctggaggcgctcgtatcggcgatctggaagcggaagcccggtccgggcttgatcattcactccgatcagggcagtcagttcacaagcagcgattggctatcgctgctgaagcagcacggcatcgtaccgctgctgcatgtaactcagtccggtcacgatccaagctttgtaccctga

SEQ ID NO: 530055 - DNA, 5250 bp, Stenotrophomonas maltophilia
gtgatcaaaggattgcatgcttttgctgtgcattgtcttgttgctttgactgccggcgtggggttgtcgtctcctggcgctcttttcgcgcagacggtggcagatggaattcatccctatttggagtatcagaagcggatcaaatcggctgaagcgctctcggcgcttgatgccggcctgtttggtgaggctgtcagtttgtatgacggcagcacgcagtttagcgtcgttgatatcgatctgccgggtaacagcgcattacccgtgcggctggcccgtcagctcaatatccagcttcagccccaaggctctatccgggatcacgatggcaggctgctcggaatgggtaattgggatgtggaagttccctatgttgctgcaacgtacgccagttcgacgggtctacctgcgcgagtttgtaccgtcggcagtgtgccaagcagcggcaccttcagtgtccgcgagttctggagtggcttgagcgtgcatctcccgggacgcggtgatacgtccatgctctctattgtctccggcacaccgcttccaacaaccggaacgggcactcgcttgacgaccagggagcgggacgccatcgattgcatcagtatgggagacggcagtcgtgatgggttccggctcacgaccacaaacggcgagcgtttttacttcaatcaacttgctactcgacgggccgcgcctttgcagaagatggtgcctaccagcaatgggaatccgcccgttggtaggattcttgagcgcacccgctactatttgctggcaacccgtgttgaggacaggtttggcaacgtcgtccagttctcgtacaacgccgatggccaccccactcgcatctggagcaatgacggccgggagatatccgttgcctacagccagggtcgtatggtcagcgccacggctaatggaaggacttggaggttcgagtaccagtcgctctttcctgatgtccagctgacagctgtgatccgcccagatgcgagctcttggcgctactcatactcgggaacacttcttccgtccgcaccgttggatatcgatacgcttccagcgctcccttggtgccggtctgagcagattcccatcgctgcggagtatgtggttactgcgactcaccctgccggcgccgtgggcaccttctccttctccaatcgccgccactggcgccatggcgtgcacttgaccgaatgccaacagaaaggtccctcgttggatccagagtatgttctggaggttccatactattttgatgttctgagtatcgtagagaagtcgatcacaggccccggtctgccatctatgcggtggacctacgacttcggcaactcgccatcgatgctttggggaaaatcaaacgaatctccgaactatccgtgcacaacctgtacgcagagtaaggttgtgatcgtgcgccgaccggacgcgacgacggagcgtctgacgttcggaaaccagtacatgttcaatgatggtcgacagcttcgacgtgagattctcgacgcccagggccgggtcgtgcaggccctgtccagcgactaccttgctgacggcgctgttgctgggcagcctttcctgggggagtacggtggggtgcttggtggcctgagcgatcctgcgacggtccgtattcgtccattgacccagacgcaactgcagcaggatggcacgaactacacctggaatgcggcggcttttgaccgctttgcgcggcctatagatcggcttaggaccggtcccagtggtgtggtacgcgagcggcttgattaccacgacaatacggatcggtgggttctgggacagctttcgaggctgacggacctcggtagtggggtggttgtagcagaggcaaccttcaatgcgtatgccatgccggtggagtcctttgcatttggcaaacgtattcagaccagaacttaccaaggcgacggtacagtggggacactcgccgatgcaaacggcaggaccacgacgctttccgactggaagcggggcgttcccgggtctgtccggtatccggattcaacgacatcccgggtgggaatcgacgataacggttggatcgtcagttcgacggacgagaatgggttcaccaccaactatgactacgaccagatgggccgggtatcccgtctcgcctatccgaccggcgattcggtcgcatggctgcctgtgaatcgcactttccagcaggtcaaccaagctgagtatggtgtcccagtgggtcactggcggcagacggtaagcaccggcaatggttacttggacacgatttatgacgcgctatggcgtcccgtcattacccgggagtatgacgccagcaatgttgcagctactgagcgcatgcagcgctttacctatgatcacgaggggcgacaactatttgcgtcctatctaggtaacggtgctgacttgagcagcggcacatggaccgagtacgacgcacttggtcgcaggattgctgtcgtgcaggatagcgagcttggagcgttggtcacggtaatggaatatctctcagattcccgaattcgggttaccgatgctcgtgggaagcaaactgtgaccagttttcagtcctacgatcaaccgcagtactcggcgccaacctcgatattgaagccgctgagcgtagtgctggagatttcgcgcaatgtcttcggaaagccggccagcattacccagcgcagttcggatggtacggttgcgttaacccgccgctatgtatatgacgctcatcaacgcctgtgcaagaccattgagccggagacgggggccacggcgctgggttatgatccagctgataatctcgtatggtcggcggcaggcctggacttgttgaatgctggctcttgcgacggctctgtcgcctacgcgtcgggacgtcgtgttgatcgtacctacgatgcgcgaaatcgcttgaagacgctgacgttccctgatggcgacggaagccaggtctggacctacacggccgacggcttgccggagcagatcacaacgcagaacaacataagcacgcatcctgtcatcaactcgtttgtctacaatcggcgccgcttgttgatcggggagagcagtgcgatcactggcaagtacgactggacaatgggctacggctacgacacacggggcgtgatggccagcatccagtatccgagcggtctgtcggtcgatctggcacccaatggccttgggcaggcgacgcgcgcgggcccgtttgccttgggcgttacctatcacccgaatggcggcatgcgcgcatttacatatggcaacggccttgtccacaccatggtgcagaacgcgcgccagatgccacgccgggtggccgacttgcctggtgtggtggataactcctatagctatgacgccagcggcaacgtaactgccattgatgatgctcttagtgtcgtacgcaatcgtgcgatgcagtatgatgatctagacaggttgaccaggacgacatcgccttcctttggtggcaatgggattatggtctatcagtatgacgcgcttgataaccttcgatcagcaaggctcgccagcgttaaggatcacacttattggtacgatggaagtaaccgtcttaccaatgtgcagtcttctgatggttccactacgatgggcctgagctacgatgcacagggtaacctcttctctcgtaatggacaggaatttcgctttgatctcggaaaccgcttgcgtgaagctggcggcgtcgagaggtacgcttacgacgcgcaagggcgtcgtgtcctaagccaggcggcagggggcgatataatttcgctgtacgacaatgcaggagtcctgcgtaggcaggaaagccagcggagtggtgagggcacggagtacatccatttgaacggaagtctgctggccaaatcggtttcggcggttgctccaggtgttccgttgattacagtgtcttcgttcagtaatagtggaagttttccggttagttggtcgagcgtggttggcgcgtcccgttacgaactgcagcagcgcgaagggcaaggcaactgggctgctgcctatagtggagctgcgctgacatggtctgccaatggcaaggctgcaggtagtcatggcctgcgagttcgggcatgccgcgtgtctctgtgcggtagctggagtgcagtggccacgatcgtggtgcagctgccgccatccgcggcgccagtgctcaccgctccagcgactgccagcggtggaaattatgtcgtcggatggaccgctgtcgccggtgctacggcttaccgtctggaagagcgtatggggaccggtgcctgggggcagattcaggatggggctgagcgcagtcgttccttcactgcgaaagctggggggacttacggatatcgcgctcgagcctgcaacactgctggttgtagcgcatattcgggtattgctgcggtccaggcggtgcacgcgcctagtgtggctccggtactgaatgctcctgcaaagtcacttggttcagcctacacgatcagctggggcacggtgtccaatgccacgtcctatcaactcgatgaacgatttaatggcgggagctggggcaccctcacaaacgcggccgcaaccagccagtccatttccggacgaatccagggcgtctacgagtaccgtatccgtggttgcgccttggttgagtgtggtccctactcaagcgtgtccaaggtgcaggtcgtgattgcgccgtccggagtgccgtccataagcacgccggcatcaagtagcaccggcagctacaccgtaacctggtccggcgtggaacgagcggtcagctacttgttgcaggagcagatcaatgggggcgggttcagtactctgcagaacgcaggcaccctgcagcggtccatcagtgggaagggaaacgcgacctacggctatcgcgtgtccgcttgcaatgaggccggttgcggtggctcttcctcggtctcctccatcattgtgaatgttccgcccccggttcccactccgccgcaactgacagaggcttggtacttctattccaacggtgagacttcttatcaaggaggttggactgcagtccctggtgccaccagctatgagttctacggagcagcaagctgcatgacaactcgaacattttgctcggtaatggcgcgtggcacgccaaaggtcacaacgtttcgcgtcgtcgcatgcaatccaagtggatgctctctgccatccaatggaatggtcgttcaggacggatttgagcgatag

SEQ ID NO: 530056 - DNA, 318 bp, Stenotrophomonas maltophilia
atgcacaggttccggggaactgcaggcgctgtgtggacccggttcagaggatttgaagattcaattcggaagttggccgcgtcaggcatttggctgtgctgcgtcctgctgattggccttggcctgtcgccatccgcaatcgcccagacgacggtcacctacatccacgcggacgcgctgggctcggtcgtggctgagagcgatgccaacggcaacgtgatcaaacgctatgactacgagccgtacggggccgtagtgggccaggtcacggacgaccggggtataccgggcatgtcagtgactcggccaccgggctga

SEQ ID NO: 530057 - DNA, 228 bp, Stenotrophomonas maltophilia
atgctcgactactctctgtcctcggtagctgcggaccgttggtctgcacgctccagcacccagccgagcatgggctcggctacagagcctggtgcaccccaaaaacaagaagagcgcgagatctcgaggatctcgcgcccgggttgggaccggcgggggagagaggacccgccgatcccgttcctgcgggggaacgcgattgcttacttcaggttctgcgaccagtag

SEQ ID NO: 530058 - DNA, 186 bp, Stenotrophomonas maltophilia
atgtccgtgcattttcagcaggtcggcagtctgattgagggaagcctcgataccgttggcaatctttctgagatccaaagcgcgctccctgagatccatctctccggccatgtgtgcagtgcgggagagcttggcggtctggctgccgtccagatccctccgcacacgctggtgatagtgctgtga

SEQ ID NO: 530059 - DNA, 753 bp, Stenotrophomonas maltophilia
atggaatactggaagggctttccgacagcagatgagcgagccccagtttcaatgctgtggcgaccagtgcggcagatacggcgatcgatagcagccatccttccgaagccgctgttctggccttgcggtgtgctccaactaccagcgcgacggcaggcatcaggaaggccgaccccaggattacccaagccagtccgtatttttctattagcgggtatcgcaactgagcgaagtacgcatactcgccaaggagcaagtagggccagaggcgaggggggcatagcagcagcgccgctacccggatgcccgcaggcaagtagaactggtcaagagagatctgtcggactccccagcacatcacggcataaagcgcagcgatggccagtccatgcggccgtacccgaaaactcagatcaattccttttttccaccaattcaatcccaagcctcccttgctcgatacatggcagcaggcccatcgatgattggacgccccatggggcgacagtatcggcagaagcaacagtgcgcaatcgtgaggtatcgacgagcattgatcggtctactgggcgcgccaacaaacatcactttcgagaagtgatcaatgtctcgtttttttgcagtatcagattgctgcctgtgggtcgtttgggtcgattgggcgagtggttgcctgaaacaaggtggaacgagctgtgtgggggagatcttcctgtgcttccagcaataccatgcggagcctgttgccaataa

SEQ ID NO: 530060 - DNA, 522 bp, Stenotrophomonas maltophilia
atggaaatgtctcaagaaggggatttcgagaagacgtcggaactgctgctcaagatcaatgaagttgtcggaaaaatggacgagtcagtacgagtccagacttttgacttactggtttccaaatttattggcaagcaggcgccatcaaacctggctgcggctccaaaagaagttgatgcgccagtagttgagagtgcagttgatacgagcgatctaggccccttcattgcgtcttttgacaccaaaaagccggtagatgcattgaacgtattggtcgcctggatcttctcgcagcgcggatctcaacccttctcgattaaggagctgaaggatttggcagatgcttcgggactgaccattccaagtcggcctgacatgacgttcaaggggtcaaagaacggcggcaaagcactgttcgtccaaagcggcaagaattggaagctcacggtcagtggagagctccacattaaagaaagctacaaagtaacgaaaggaagctcggcgacggtaagcgaggaatga

SEQ ID NO: 530061 - DNA, 903 bp, Stenotrophomonas maltophilia
atggtcgctaggagaagtctgttcttgctgctgagcctcttggggcttagtcaacctgccctgggggccgagagagtaatgtatgtgcatactgatgtcgcgggctcgcctgtggcttggaccgatagcacgggcgtcgtgattcggcgtgagttctatagcccatatggcgagccaacaattggagcggtgcgtgatggtccgggctacgctgggcacgcgacagattcggcgtcagggttgagctacatgcaacagcggtattacgatccggagttgggtgtctttctttccgccgatcctgtctccgcgcttgtggatccttggcgtgacttctgtcgctattgctatgcgcggaacaatcctttcctgtttacagatccagatgggaggcaggtgatgaagatcacaacctccattcctgagaaggaaatgacgcgggcggaccgtgaaactatgcgtgcatttaatcgagcccagttggcatacgagcgggcaataacggcgtctggggacaaagaagcgatggcgcgatacctcactacgccctttgagtatagaagagcattgagtccggaagcccaggtaatccaatccgcgtcgggtcagtccgatgctgggatcaaggcgtatcgagagccgggcaagggcgccgtgacgattctcccaggcttcttggagctcactgattcaggaaaggcgttcccaggctatcatggcatggagctcggtagaggcggcgatacggcagcagcaaaagtcgtcttccatgagcacggccatgttgaggataaggataacaatactcctcatgaccgagaggcaaaggcgagcgaatactccaatcggatgatggagtacgcgccgcggaatataaggatagggccgagagggcggcgatga

SEQ ID NO: 530062 - DNA, 5025 bp, Stenotrophomonas maltophilia
atggttgctcgacagaacagagtcgaagcaacatccgagttcggggagaggctcaacctctatgacgggtccgttgtgttttcggtcacgcctgtcgacatcccagggaatagccgcatccctgtgagcgtgacctacgtcctgcgggtcgctgacaaacagttcaacacgccatttgtctatgagatagatgtcccctatctgagcggagtctacaagtccggcgcgggttggactgtggaaggaagcaatccagccgcacgttgcaccttccacggaggcgcaccccaacccccggaagtgactaactcgtcggggaagcccgatacgttcttccccgaagaatactggcatgggaactacctaaatgtgcccggtagcggcccccaactgatgatggtgaccaaacctgaggacgctatccagccgtctgacggcaaggcctaccgctgggtcacgcagaatcgctggtacttctcatgcattaataacatcgtaggtgggggggaaggctttgttggccattcgccggatggcctgaagtactactttgatcagataggtaccaccggcgcttgggatgggattagtaagccagccctgctggggagtacaacgattctctccaggcgagaggttgccattcgagcgagtcgaatagaggacaactacggtaactgggttaactacggctatgtcgacggcaagctgtccagcatctcgtcaagtgacggtcgatcggttcaaatctcagctgcacagatttcctctgcagggcgtgtttggagtgtcgatacttctaatggcctcgcgattggctatccggacgggacttcatatcaggctcagatatctaacgggatcgagcgcattgggtggcgcgccatcgggtgcggctatggggatgctctgcgcaactcgcgcggaaccatgagtgtgagcattcgttcacgttcaggggcaacttcaactttttcatttgagcctgtgctcaagggtcaaacccaagtgccgttacgctgcatagatggcatgctcaccggccccagcgcgctggagaggacagtctcacttaaaagcaaggccgtcacagggtctgggattcaggcggcacaatggaattatagctactcgtcgaatggttgctataaccgcagtggaaacgatattcctcaagcaggttacgagtgcctcccaaacaccccgagcgtcaggactgttaccgtaaacgggccgacctacactcgagtaatgaatttctccaaccggcacggcgtcgacgccggtcagctgctgcttgacgagcttcgaacgcaggcaggggcgaccctaaggtccgatacctactcttaccggcatgtcggcgccgtcgggggtactggttttgcgacagcgggtgatccaagtgcttttgccgagagttggctggaattgtcgtccaccacccagcaggatggggacacgtttcagagccaggttctgcaattcgatgctttcgataggccgtctgtcgtaaaagagagtaatagttttggatttacacggactgagcaaagaacattttatgatgatcgagtgcgatggcatgttggccaaccacaggccttggttgaccagggttccggtttcgccgtctggcaaatcgagtacggttcagatggattgccttcgcgcgatatttccttctcgaggttagttcgctccaaggcctacaatagtgatgcaaccattgcatccatcagcgacggtagagggaatgcaactgcgttcagtggctggaaacgtggtatagcgcaaacgtggaatttgcctggagggagttctcgctccgctgaagtcgacgacaacggatgggtgaaatctgctaccgacgaaaccggggcgacaacgaagtttggctatgatctgatggggcttcttacagagaagcgctatcccgaagccgattccgtggcctggaatgtcgaaaccagtagcctcggacagatcgcaagcgccgagttcgggctcaatgttgggcactggaagcacaccagtgccttgggtaatgcgcggacggagcaatacttcgattcgctatggcagctggttctttccaggtcgtatgacgtttcagatatggatggtacccaggcgtttagacgctatgtatatgatacggagggaaggcaaatcttctcttcctaccctggatctagtccttcatcgacaacgggcctgtggacagagtatgacgcactaggtcgagtaacctccgaatctgaggacagtgagaacggaattcttatcacaaggtacgagtacctttccggtggtcgtgtcagaaagacggatcctcttggtcgtcaaaccatcactgcgtttcagatgtaccgagacgttgactattcctatcctgtagcggcgactcgcccggagaatgcgcttacatcggttgttcgcgatgtatttggaaagccgatggagattaccagtcagagcacttctggagcggagcgtttaactcgaaagtacatttacaaccctcagcagcaactgtgcaagattgttgagcctgagactggggctaccgccttcgggtacgacagcgcaggtaacctcgcatggtcggcctctggattagatctgccgagcgcgacaacttgcgattcggacgcggcgtatggatcaggcgtacgcgtcgatagcacctatgatcaaaggaatcgtttgctcacggtggcttatcccgatggggatggcgacagaatatgggcttacgagccagatggaaggccgtcccagctgaccacacttagtggaggcgacgtagtcgtaaatgcgttcacctacaacaagcgccgacttcttacaggagagtccagccagattgaggggtctcatctgtggagcgttggctattcgtacgacgctaacggatccgtctctggtgttcgatatccccgaggttcatttgtcgggctgagtcccaacgcacttggtcaacccacacgcgcaggatcctatgctacttcggtggcataccatcccaatggatcagtaaggaagtttacgtatggaaatggtgttgcatattccttggcgcagaacgacaggcagctgccactgcgcttgatagaaggaggggttcaggatgtcggctactcgtatgatcgcgcaggaaacaccactgagatcaccgatcatctttcatctgatagaacgcagctgttggcctatgacgggctcgatcgcgtgctccagtctcgctcgcctgccctgcgaggtgtaggggtaattgattatagctacgacgcattaggcaacttgcgcagcgccaagcttgtagggaggaaagaacacaactactggtatgacgcgcgcaatcggttgacaaatgtccaatccaacgatggcgccactcagatcggtatagcatacgacagcaggggcaacctagctgtgaagaatggtcagccgttcaagttcgatcatggcaacaggctgcgtgagatcgaggcactcgagtcgtacagatacgatggattcgggaggcgggtgcgaagtgtcgacgcttcaggcgcatcaattatctcgatgtatacgcgcgatggtcgcctaattcggcaacagaatcagcgaactcagcaagacactgaattcgtctatctcaatgatcgtttgatcgccgagattgtggccaacgatgatcccgaccctccaactattcaggtcccctctcgtagcgagaatggaaccttcacagttgtatggtcaacttctacgctagccgccacttaccagcttaaccagcggactgtcggcggagcttggcagcaagtctatgtgggcccggtggggtcctggacggcgtcatctcttgcgccgggcttctatgagtatcgagtgcggggctgcaaggcctcggggagttgcggggattggagtacgaatggcgctatcgccgttcgccagccaccggatgggacgccggcaatgaccaccccaggtctatcgacatcgggctcgtatggtgtctcgtggtctgctgtcgtgggcagcagcacatactctctggaagaaagttcatcggacgccccatggtcggtcgttcaatctagcgacgcccgctcttggactgctagcggcaggcaagcgggtagctattcctatagagccaaggcctgcaacgccgccggatgcggtgcctattccgcagtggtgacgactcgagtggtattcaagccggcggctccagccctctctgttccagtgcagtcatacgtggaccactttgatgtgcattggagtcaaagtgccggtgcttcagagtttcgccttgaaggaagcacaaatggcagcgcctgggtgctggtttcaacggggccggcggtctcggccagtatcgcgggtcggggggcgggatcccacagcttccgcgtccaagcttgcaacgaggcaggctgcggggactattcgagtgtagcgacgattgtcgtaactctaccgcctggctcagcgccgggcatggatttgccgcctagcagttcaaccggtagctacactgcatcttggagtagtgtcgctgcggccactagatatgtcctggaagagagcgcaaatggcgccggatgggtagcagttcaggatgctagtgctctaagtgcttcgctgtatgggcgaagcagtggtgcctacggttatcgagtgattgcctgcaacgttgccggatgcggaccgtacagtgacacacgcacagtcgctgtccttctgcctccaagcacgcccaaccctagtgggagtgtcgaatatttctatgacgacgatccgaagcgaccggcgcgtgaggatacattgaactggttcgcgatccccttcgcttcccactacgaagtaagggttggtgacggtgccacaatctacagtgggtcgagcaatttctacacgcgtcggcacacctcaataaagactagctatcaatactccgtgcgcgcctgtaacgcatcggggtgctccggctggtcaaattctctcactctgccttga

SEQ ID NO: 530063 - DNA, 396 bp, Stenotrophomonas maltophilia
ttgcgtgcagacgatgtagccgaagcggtggcgcggctggtcgcgcaacggcgcagtccggacgcgatcaacgtggacaacggccgggagtttgccggcaaggtcatggaccgctggggctatgagaacggtgtcgagcgggagctttcccggcgtggtatgccgacggacaatgcgatggtggaaagcctcaacggccgactgcggcaggagtgtctgaacgagcactggttattgttgctggcggacgcaaggggcgatatcgaagcgtggcggcgtttctataacgaggagcgtccccacagcgcactggcgtggaaaatccctgcggcaatcaccggagaacatgggccccaagcaaattccctggcgccaaaaagagggcggaatctctaa

SEQ ID NO: 530064 - DNA, 2313 bp, Stenotrophomonas maltophilia
atgaccgaccagaacaacgaaaccgacctagagtcacgcattgatgcaacacttgcccagattttcccgggagttgatctcgagcaccagcggtacttcaaacttcatgtcggtcacacggtccttgagaagtcgagccgagactacgtgaatggtcgcgccgatgttttggttaagcgagacggcgagaatctggccgtactggaactcaagcgctccggccttccgctgactgatgatgacgtcacccaaggctggtcctacgctgcactggcgggggcaccgctcgtcgtaatcagcaatggatcggacacccgcatccttagaacgcatgatcgcgccccgatctcagattcatcattggatgcagccgaactgacaaagcagttgcagtttgcggcgtcggctgccgaagcgtcggtcaccaatgccattgagcgactgcttggcaccgatttgggcctgcctgccacccaggcaatcaacaacgttgagctaggtgagcagagtggcagttggatggagcgcgcgccgtttgttgaagacttccttgtgccacgaacagttacagatgaggtccgttcgatcctgcaggcgggcgagcaccgcgcagtagtggtgtcaggcgctccactgtgtggcaagagctcggtgctgcgggagctcgtaaccaccatgccgactacggaggcaattcctctatatatcgacggatacaattgctctgagggcctattccgccgcctggccaacgtgctatcggccaagtttggttggtccaccaaccctgaccaggcccgggcctggctaaggaaagtggcgattgatccggcccgacctgtcgtgctgtgcattgacgcaccaggcgactcctcgcgcctccgtgcagagatcgacgaaataatgaccggcgatgtaggcaatgttcgcctggttcttgcccttgacgaggcagagctggacaactggcttatgaagcccggaagccgcaatgaatctcgactgggtaaaaaaggcaaggtggttactgtagaccactacagtgacaaggagttcgaggcagccagcagtcgcctagttgagctcggcggacgctttgttgacggctcgtcgttctcgcaggaactgcgagcaccctgggttcttcgagccgcggtggcgccacagatggaggcggcagagtccgagcgcatcgccgtgctgccacccaccttaggatgggacacgcttcgtatcgccgagcaaaaatttgaccgtctgggcgatcctcaagatgccctggagagcgtggctcgggcgtaccttgagttcattgtcacttccaagtcaggcgacttggatttggcctctctctatgacttccttgttgactaccagttcttgcgcgatcgcgtcgagaaggatgacatcaaggctctcgtacaggccggaattctccaagccagacgctcgcgggctaccgccacgctgtaccacgttcgtgtgccacccttgtttgccgccgccataacaaagcgactccatttctccgttgagaacatgctgtcgggtgacaaagaccccgaaaccatcgcaggctggctcatcaatcgttgctctcgcatgccgtttggagatgtaatcggcgctgcggtcgtccatcgtctactcacgctcactccaggcgaggccgcgctgccgctagtgaatgcactgctggacatgaagcctgcccttcaaaaactcgtaccaggggcgaagtggctcgcagaaatccctggtgtcggcaacgtcgagcttgaactggccgagggtcgcaacctcttggtacgtccacgtagcgaccgatctaaagaatacaaggtcaaactggacgatcatgagatgccgaccatcgcggatcagcatgcgtggctgattctctctcaaactcgattgttcaatgttcttgtcggatccaagggtcattcaaatctcatgaacgctgccgccgagatcttgctggaagttggaacttgcccggtaatgctgcgcaggcccggcgagcaggcagaagagttccacttccataacgtcggcagcacagaagtaccgtgctcggacatgggcattgttgagccagttacctgggcgatcgcagagctactttcgggcaggcccttccgcgatggccgagatgcctgggtcaagcgggcagctgagtcagacagtgttcccctgctcgctcgtgtaactcaagcactgcaacacctcaggcaggtcgcggggcattcagaatgggctgagacgatgctcagagatcactgccagccaaactggaaggaaatccactga

SEQ ID NO: 530065 - DNA, 2157 bp, Stenotrophomonas maltophilia
atggacatcaaggaactgatccaggacgccagcattcgacgggttctgttcgtcgacgacgacctgcgtgataggccgactctcggagaagtcgacctggcctcacatccttcacatctggtgtcggacatcttgcgcgatgctgacgatgatgacacagaggaactcattgccattgcgagcgagcatggcgcgaaagccggcaatgagaatgagctgtttgacagtctgcacaagccgcaagtgctggcggcagcgccggattccattcgagtcccctatgagaccgccagggacaagatcaaggatgcgggtgcgccggtgcgcaagatcattgagtgggtgaaggagtggaccggccacgatcccgtcctgcgcacggtgcctagcgctaccgtgcaggcgccagcggatatctttgatcttctggtgattgattactatttggtaggggacagcgaggccgagactgcgccttacatcaggagaatgttggaccttcacgaaaaggaggacaagccccttctcgtagtgttgatgacgtctaatggtggtggcgtggtggccaacatgcagacgattaagacggatatttctcgatcgagcgctcgcttccgaattctagaaaagccatcgcccgcaccaggcaatggaggcctgatcgccaaggagcggtgggcgcaggccctgacgcagctcgcgactcagcggcgcctgatcattcccatggagaacttcgtccgggcttggaaagctagcctggagcaagccgcaaaggccatggagctccggttgctggatctagacggcagtgcctttgcagtgctggaggcgactgcgaaggaagactccatggagattgaggagtatctgtcagatctactcagccgtcgtgtcaccgctgaggctgaagagcgcggtgatgttctcaggagcgtcaaggcgctccagtcggcgatggacaacgaccgcgacaagataatgcccatccttaacaggggtgttgagctccgtgatgctcagtttggcattcgtagcctgatgtctgacgtgatctggcatcggcctgcttggtggcaggttcatgaggatgttcccgctgtacctgacgcggaaaggggcgaggcagagccggtcgttgaagtggccggagacgccgaagcggctgcgggagacagcgctgatccggctcatagggctggcaggcaggacgtggttaagcgactggaagaagtgattgcgggagctcgtgaggagcagctcgatgagcacgcaaagcgactccagcgttccgctaccgctgagcgtctccagtggctgaagcggcatgtgcgatttggcaccgtactgcaggagcggcgcccaaacggccgcttcattctgaatgtcacccaagcatgtgatgtccagcacgtgtcgctcgaccaggtgacggacgccggatatctcttcatccgtggcgacttggcgccggtagatgtcggagtgaaaggtggtgggaagatggtcgagtcccagtatttccaccgcgatcgcaatgttgatagcttccaggcatttcactggaatctgcgccaagcgtacacgccaaggatctccgatctactaggtgagctggaggattatcaaattgttgggcagcttcgttacgagagcgcctatcgtgtcctggccaagttcgcttcgcaggcaacgcgcgttgccgaaatccgtatgcccaagttctaccggtggccagtgcacatcttccagctcaatcgagagaagaagtgggtgcttatcaatcgagaggttccactctcgtccagtgcttggagcatgacccaagatgtgcagagctggcaaatccagttctctattgaagaggctgccgccgcggtggagcttgttcgcgatttgatcgcgcctcaccgcgagggtgaggctgatgagccgatgactgaagagaacaaagggagcctcatgaatgcgctgtccaggggtgtcacacttaaaggcgctcagccaatcggtggaaacctagccacagctgtccgagtggtttcagtcactgatcagagtgaatcggatctcgccgaagcacttgagaaaaaagtcagcgcaaggtcgaagccggtcggacatgtagctttcgtattggtgtcgggccacaagtaa

SEQ ID NO: 530066 - DNA, 1158 bp, Stenotrophomonas maltophilia
atgaagtctccagcgcccatctatgccgattttgcctcttccgccccaccgttgcccgaagtcgtagatgcaatgatggaatggctaggcggctcgcatgccaatcctcacgctgaccacttgcctggtcatcgcgcggcaagagctgttgaggatgcgcgtcaacagatcgctgacctcattgaagctgacccggatggcgtagttttcacttccggcgcgaccgaatcaaacaacctggccctgaaagggctggctggctcatgcggcgaggggctgctcttcagccctttggaccacagctctatcgtcgaggtggcccgctatcttggccagagtggctcctgccgcgtccgacagctcaagcatgatgcacacggtagtgtctccgccggcgaggtagagaatgcactagcggctagtcaggggagggttctggtcgcgctcgcgcacggcaacaatgaaatcggcactattcagccgctgactgagatcggcactgctgtttcagaccggggccaccttctccatctggatgcttcccagacggcggcgcatatcggcatatccgttcaggacatgcacgtgactacgctgagtatctctggtcacaagctctacgggccggcggggatcggggtgctctgggtagaccccagtcatcaggcggacttgcttccaatatttcacggcggggggcagcaggcggggattcgatcaggcactgttcccacgtacctggccgttggattgggggtggccgctcggcttgctcgggatcgtatggaacaggcgcgtactcacctgcaggctatggcttcgcagttcattgcggccctcgccggccgcggtctagcgcctgttgtcattggtcacccctccgatcgcctgcctgggcaccttagtgtccggttcccgggtgtggcggcaccagacttgcttgccaggctattgcctctattggcagtgtccactggggcggcgtgttcagctggcgagctaagggcatctagggtgctgagggagcttggcttggatgaggagacggcaagtgagggactcaggatcagctttgggcggacgactacctctaaagaagttgcactggctgccgaatacatgtcagatgccgtccgtgaagtcctagattcaatctag

SEQ ID NO: 530067 - DNA, 327 bp, Stenotrophomonas maltophilia
atgcgcctgctcggactcgatcgcgccaccaatgagaccaataacttcgtccgtgccagccacaacagggatgtctacaaagcggccttggaccttggcccattcggcttgaatgccacggtgcgacctgccgacgtactgctcaaatgcctggtgcagtacgccgacgatgacaagacgcccctcacagcgactagctgcttcggccagctcctgcagcagatagatatcctcgcccgctgcagcggcagcctcaagcagcttacccatttcgtcaaggatgacgagcacgccaccaacatcaggattttcggcgcgcttgattag

SEQ ID NO: 530068 - DNA, 183 bp, Stenotrophomonas maltophilia
atggtagtcagcgtcagggtcaagtaccagatcaagatcaagggctactcactccgcaacgtaggcccaatcggcatctctgcccaggccaagacggagagcgcggtaatggaagcaatccgcaagcgagagtacgcatccgccaagcaggttgagagcatcgtaattctcagcattcagtag

SEQ ID NO: 530069 - DNA, 177 bp, Stenotrophomonas maltophilia
atgatgaaagaagtatccattcaatcccctcttctctgcaacagctgcttcaacagcaacaccatcaccttcagcagcaggcgcgtcgctattgcgttcactgtcaccatcgctctaaccatcgcgttgtcgctggcggtatgcgcaggtgcctgcgccctctccctccttgcctaa

SEQ ID NO: 530070 - DNA, 189 bp, Stenotrophomonas maltophilia
atgatctatgggctggccatccggcccgaactgccaagtcgggtagcgatagctgggagcaggcctagttacgtagacacccaagagctccccctcgcggcgcatctgacctactcgttgggcgctcccgcaggcaaacagattcagtccaacactaacctgctcggtggtgagccattgcgcagctaa

SEQ ID NO: 530071 - DNA, 324 bp, Stenotrophomonas maltophilia
atgacgtcctcagacatgtacgatgaaattggatcgaagcgtaacgtcgctcgtgccagtgcaagcggcgcctatcttcccccttggagaatcgatcttctgcccgtagccctcgtgatttccaaggacacagatcaccgggatgcccgtgaacgcactctcagcccatgcaagcactggctcccccgcatcgatgtcgccagcgattaccaccagatctggtcgactgagtgtcagatctggctgtgcaccacaaagcacactctgcgccgccatcggcgcatcacgccagatttcacggtgcagatcggagatggcgagtaa

SEQ ID NO: 530072 - DNA, 792 bp, Stenotrophomonas maltophilia
atgtacattgcgattgacgacacctactcatccaacgtcacgatcgattcaaactatgtaacttcgaatcggaggacaaacgtggcggtttgcttcgcagacgatgaggttgagcatgttcgcgaggagcttaatagctgtcttgatgagctcacagaactgcttggaaagcgaccgagcgaatttcatttcgtagagatcgtcaacaagaaacgcgactggatctcgctaagtgacgatcacgtcctgagattgctttcgttttttgtgaaaatctacaaccattaccggtggccagttctgattcagacggtcgatgaccgtaccttcgctgatcacggagttgcgatcgcgaccaatgtgcacggattagatcctcagaagaaggaggatcaatcactgttcctcttgatcctcaagttgcgtcagttcttgaagggtcagaaggttgtgctcatcatggacgaagggcgcggggatcccggcgacgagttcggaaaggacttctttcctgattggaccgggagttttgagggttactacgaaagctcaaagcaagagcccttgttgcagattgcggacttcattgcctatgcgatcaacaggcttaccaacttgtcgacgaagagcaatcggagctcgcgcgagcaagagcagatcagaattatgggtcagctcgatctcaatagcgatgacgtgaggatcgccaaggtgcgaccagaattcggtcgtgcagaattcgacgcccttcaccttgaggaccgcaaagcaaagggtctcgagccaagatga

SEQ ID NO: 530073 - DNA, 255 bp, Stenotrophomonas maltophilia
atggctcgaaaaacgatctaccaggccgagtatagaagcttgatcgaagccctacggcttcgacgtgaggcgctggcgagaagtcagacagaggtggcgagggcactgggctggtcccagcaggcactgtcggcggtagaagcgggggcgcgtcgtctcgacgttgtcgagttcgtccagctgtgccgcgtactcgagatctccaaggaggacgcattcgccctcctaacggatctccagtccgattcggtctga

SEQ ID NO: 530074 - DNA, 1785 bp, Stenotrophomonas maltophilia
atgaagagggtccgatctgcgccggagaaggttgatttcgatctcgcaaaatttggtgtccggtatgaagacggctgctgggagctccgtcagtacgtcgttggcgattcctatcatagggtctgtttagacttccgtaagtttccctccgcttggaggtcttccgcgaaagactactttgctaaaactcttctagggttggttccgcgggcgtcgactatcccattgacgttgagagagcggttctacgccatcaagtctttcgctgtctggtgtaaagagcacggcgctgcgtcgcccaaagaaattgattctgagctgattgagtattggggccgcgagattgtcggatttcagaagggtaggcggattacgccacgtgcggagggctgtcggtctgcgaacgtggaggattttctgagagggcatactgactgttctgtcgaggtacgggcggcctgctctgcggtcgcgcagcgatcgcgcaagagaattaggatggctgggaatgaggccggaacagacgctctcggcgaggatctgattctaagggtgctgagggacgcactggtagtggtacaggaggacgcaccggaggtacttaggctcgtcagcaagttctccggacccagggctacaaggactgccagacgtggacgtcgtcattggcactcagagtgggtaggggatcggccgaactttagctctgaggccatgaagaggcttggagagcgcacgtgtttgagcgaagagcgaatgattgggacggtgatcggagctgctatcgcggtgatcgcgcttctttcggttatgcgaacgtctgagttgcagcgactatgtgtcgggtgtgttgagaaagagggtgacggtgagttcggcagttgggtcatcaaaggaattctcgccaaaagtgggcgtgcccacacttggatagtcgtcccagaggtcaaagctgctgtggaggcaattgaactattgggggcagaagtacgagctaatagcggcactaaggcgctcctggcggcgcgagtggtgagcagaaaaccgtatctaagtggccggacgcgcgcaccatctaaggttgcatgggcttcgatgttgctatgcagggtgagagaattcgcccagctgtcgtgccctgagggaggaacggcgctggagcacctgacttttcggaagaccaggaggttcttagcccgattcgttgcaaggcgagatcgctccagtctcggcgccctcgcatttcagtacggtcacttggatgtgcagatcactgatacgtactatgtcggcaacgacccagagctgaccaagctactgaacgaagaatccagcttagaggtgatcagggccatggaggatcttgcgcgctctgattcagtacatacaaatgttcctgctgaagtgatggaagcgactaggcagaggatcgaagctgtactgtcgcgcgtgagcacccagaaggaggtgtttcgaatgctgggtgccggggttgttctgggtccttgcgattggggatactgcttctaccggcaagagcgatctaagtgcgaggggaatgaagacggaccgaacaaggcgaatagaactccaactacctgtgcgagctgcttgaacttcgcagcgacgcctcggcatgccgagtggtggaggcggcgcgttgctgacttggaagagttcgccaggtttcgaggaaccccggcgcagtccaagaggatcgccgctgagagactggcacaggcagtgaagattctctctgttattgggggaagtgatgaaccgtga

SEQ ID NO: 530075 - DNA, 1617 bp, Stenotrophomonas maltophilia
atgaagaatgagagcctagtgatcaggtttgtgagcgacattcccggacgggatgtggattcatacgattttcgtttgttgggtcttagtcctgccgtcgcctcgcatctagcaaggtcattccaagcattgacggcgacctacagatccgtaagcagaaggcaagcttgggcctcggtaagaaagtactgcagatacttggcaactcagcatgaccctgatgcggcaatgaagcgtcaatcagtcattaaggacttcctctgctccatggataggagtgttcgccagtcaactgcgatctctcactacaacttcattgcagcgatctatagatggctgtcgctgaacgacgtagcgaacacaattttgtggatgaacgttgattctggtccttgcggattgacgcgagaggcgaagtctgttcgcagtatcagattgtctgtcagcgacctatctatgattttgtcggccagtaagaagggcattgatcgtgtgcgtcgacgattagagctgggcgagaccgcgatcagaactggtgaatgtgaggagctctctggccgtgacgttgccacattggttggcatccagaaggggttgcagcgaggagtgctagcaaagcaccagctgacaaggaggggcttgattcagcacagctgccggtacagggaggttcgtcgctacgtcgtcctggacgcacgtgatttcatcccatatctcatttgtctgatgtgccagacactcgctaatcctcagtcagcaatggagatctccgtggactgtgttgaagcgcacccggttgacccgttgaaaaggcgtgtcgtatgggacaagtacagggccgggcggcaacaggtgctagacgtaagtgcagatggccgttactcagttcctgctctggtagacgatatcactcaaaaaactcgcgtcctacgcccgattgctggtgatttttcagcgcgcttgttcatcagtccgttcggggcaggagcgaggactcctaatgtccagggttggcacaacgcgctggccgaattcatcaaggagcatgatcttccggacttcaacttcgtcgacattcgcgcgtctggtgcagaagctctgagtacatccggtgttggaattgagtccatacagaggaagatgcagcacagccatcctaggacaacgcagcggtacctgagtcagcatcctccctcgtcacaagctcgaagaagagttgcgacgttcattggcaaggttctggaagaggccaggcgtccaactgtgcgtcgctacgaaacagtgacgggtttgcagtgctctgatccatcctcgggggtcgcgccgcagtcaattgttgggaaggagtgtctccagtacctgcagtgcgcgacatgtcccaatagcattgtggtgattgacagcgcgaagcatgtgtccaggatgctcgcgacactaagttcgctagagcgaatgaagaaggaggccgctaaatcagtcgatgtccgagcgcgctatctggcagcttttgaggaaacgcaccaggtcctgctggcattaatggaaaggattcccgaaagagtgcttgaagtagcgaggccgctcgctctgaagatcccgcatctgagtatggagtga

SEQ ID NO: 530076 - DNA, 1122 bp, Stenotrophomonas maltophilia
atgcttctgctgatagtgaaggtgcgtgatcccagcctgttcagtcagtatcttcctgccggtactcaactgggggccaacatagcaagcaggcttcctgaaggctttccattgctcatcgatggtgaggggaagctaaattgggcctgcttttgctatctcttggagaagtaccggatagatagtgctcgggatcgtcggagaacgctccagacctatgccgaaggattgaaggactggttacagcaccttgacgctcggggtatggactggaccaggccacctccagtggcactgagtgatttcagaaggtccatggcacagggtatcgggcgagggcatcctgtctcaaactctacagtcaatctaagaactgcaattgtcagggacttctacgccttcttggtcgattggaccagatggcgcctccatcatccttctgaagagatcgaccgatatccgattgataggtttctgcatgcggcatcgaaagtggcagccgccaaagcctacaaaaaagttccgaaggcgctctctgcgcaagatgctcagagcatctctgctggactgaagcttccctactcgctgatgttcaagtggtgcatagccacggggcttaggcggaccaacgttgcaaatttgactatcgcgcaactccctgaagaagttgacgaaattgcctatgtcacgctgacggtaaagggaggaaagccgctagatgtccctgttaccagagctctaatgagtgtgacttgggactacattgaaacggttaggccgaggcttctgtcgaggacgcgcatagaaacggatcgcatcttcgtcaatgaaaagggaatgcctgctacttccagctcctactacagcgcatttcgacgtgccgcaatgctggcgggaatacgcgcgtcacctcactgtacacgtcatacctttgccgctcacatgaacgctgccctcgagcgttgtgtagctagtggtgtcgggataaatccgaccaaagttctgcagcacattcttggtcattccagtcctgcgacaacagagctgtacctggatgccgttaaagcgatggacctcggagtgctgcgagcgctgatcgaagtgcaggagagtcttgaatga

SEQ ID NO: 530077 - DNA, 474 bp, Stenotrophomonas maltophilia
atgacaatatctgtcttaggcccggcctctgatgttgactgtttctttaattcagttgtgttctttcttgagaacggcaaaagaggaagcaagtacccctcggttacagagaagctctattgccgctctttaagtgaaagcgaactggctgagctaaaggtagatttggagagcataagggtggagttttatggcattcctgcggatggctttgataaaggcgctttcggggtcgatgagggaagcactcgtttgcttttgaatggtaatactctggctgacatttttgttcgattcttcaaagtcattcttgatgccgttgaatgttcagatgcttttcataaggagtttaatgagtacgtgcctttaaggctcggctttaccgacgcgcctgactatatttttgatgtgaatcgtcccgaagacttgtataactccattgcttctgacgagttgccgttctggcgtcgctga

SEQ ID NO: 530078 - DNA, 423 bp, Stenotrophomonas maltophilia
atgcctccagttgtgttgctgtcgctgtaccggcgtctgtgtccgattgccgacttcttcctgtttggcctggaggccgtgatcgtgctgtgctgggcgctgctgcgcgggtcgcgtcgccgggtgaaacggcgaccgacggcggcgaccgaagctggctggctctggcggggaccggtggcaatgctggtgctgctagcagcgccggcaatggcgggggcgccgcctgcgggtgaaccgggcagcgcctttccggtgcagggcgaacaggttcagcacgccattccagcaggctggacactggcctgggtggacggtgaccgcagcggcaacggcgtgatacttgccgaatacctgccgacggccgaggacttgcaaagcggtggcgcgtcgcagtccgcctgcacggctcagggcgaatga

SEQ ID NO: 530079 - DNA, 657 bp, Stenotrophomonas maltophilia
atgaacgggatcgggattgatgtcagcaagcgccaactggatgtcggcacgacggacggagagaccctgcaggtctggaacaaccgctccggcttttctgaattggatgtttggctgaagaagcgtccggtcagccagatcgtgctggaagccgccggcggctacgagcggccggtgctggattttctgcacgcggcgggtcatccggtggtccgcgccaatgccctgcgggcccgcaggctggcccaggggatgggccagatggccaagaccgaccggttggatgcctatgcattggcgcagatggcggccctggtgaaactgcccgcctaccaaccgctggagccttggcagcagaaaatgcgggaattcgtgcgggcacgtcgacaggcgatgcacgcgctgaccatcgcgcggcagcagcaggaaatggtcggtgatcgtgaattgcgccggctactgcaggccaacatcacccgcttgcagacgctggttgaacgtctgggaaagcaaattgccgagcaggttgcccagcagcctcaactggccgtcctgaagtcgatgaggggcgttggccctggcctgcaggcggtattggcaagctatcttcccgagttggggaagacggcaaggccattgccagcctggtcggtgtag

SEQ ID NO: 530080 - DNA, 312 bp, Stenotrophomonas maltophilia
gtgaactgccatgagggccgcctgggaggcgacagtgatgctatcggtcattttcagaacgttgctgtcttgactctggttgcgtgggggtctgctgccagcgcgcagacgatcacctatatccacaccgatgcgcttggatcggtggtggccgaatcggatgtcaatggcgcagtgatcaagcgccatatctatgaaccctacgggacagtatttggtggtcaggttgatgatggtcttgggtataccgggcacgtgagcgattcggccactgggctgagctacatgcagcagcggtatgtggatccgtag

SEQ ID NO: 530081 - DNA, 288 bp, Stenotrophomonas maltophilia
atgctcgactcgtcccgtcatcgcgcgaagagcagccgagcatggctcggctctacagaaagcagatcccgcgagcagatcaatccgggccatgcgtggatgcaagtcgcagtgcccaccaaggttggcacctaccagaggcggtggccgtggaacccggggcgttatgccccggattcgtccggcttcacccggaaccacgccgcgtacagcgccggcaggaacaccagggtcagcaccgtgcccacgatcaggccacccatgatcgaaatcgccatcgagccatag

SEQ ID NO: 530082 - DNA, 708 bp, Stenotrophomonas maltophilia
atgttgttcggcagggctgcgccctgcacccgcagaagccgaatcaacgtcaacgtcaaaagctggcttcctgaggggaggcggggtggctcaggttgcgggggacggcgcaagtacgtccctgtagcctcgatcgcgccatccatggcgctcacgcccccgcaacctgagccaccccgccttggacagatttccgcgatctcccgggactgcgtactgcactgctgttggtgggtgtcgaccttggtcgacaagtgtcttgcttgtggtgggtgtcgaccttggtcgacaccagagcaagcgcagcgaagcgacccgcttttgcttttctttcctttcttccgtggctggacgcgcacggaaactgtcagaggccggtcggggtgggctgcgcaggggcgtgagccgcatgggcccgaggcatgcctcgggcgggttgggcaggacgcccaaccccggtcttgccgtgtgcgcaggattgcgcacacgagcaagcggcgaccgagcttacatggacgtacttgcagcgtcccctgcgcagcccaccccgaccggccaagcacggcttctgctttcaatgagtccagccacgaggggctcagccgttcgccgccaactcaacatccagcgcgcgcaggcgatctacggtacccacatcggtccaacgcccgcgatggtgctgccccgtcatcaacccctgcgccatga

SEQ ID NO: 530083 - DNA, 270 bp, Stenotrophomonas maltophilia
atggataccccggaggcaatcaagaagacgtacatcatcacgacaaccctcaacgcctaccgccccctgacggagcgtccacgcattgaaactacagaaacatgcaggcatcaatacattatctcagcccacgcctccaccccattcctccataattttctcgactgccagtatctgatcttgcgcataggatttatcccggaaacggatgtccgcatcatcaaggtaatgccatatcaaatgcggaacattaatttcgtaggcacttaa

SEQ ID NO: 530084 - DNA, 1179 bp, Stenotrophomonas maltophilia
atgtcgcctttggtggcccccaccaagaggatgaccgtgagcactatgcaacagaacgccagcgtgttgatggatgaatcgaggcagttgagcctgttggtgaactctgtcaccgactacgccatctatatgcttgacccaggcgggctcatcagaacatggaaccctggtgggcagaggatcaagggatatcgtgcacaggaggtggtcggcacgcatttttcgcgcttctatcttcccgaagatgcagacgccggcgtgcccgcgcgcaatctgaaaactgcggccgaacaggggcgatacatcggtgagggatggcgcctgcggcaggatcgcacacgtttccgcgccagcgtcgtcatcgatccaattttggaaggtggcgagctgatcgggttcgcgaaaatcacccgtgacatcacggaactgtaccaggcccaggagcagctcctgcagacgcaacgagacctgctgcaggctcagaagatggaggcgatcggcaagctcacgctgggaatggcccacgatttcaacaacctgctgaccatcatggccaactgcctggacatgatcgccttacgggtgaccgacgatgcggttctgagcctgatcgacactgcacaaagtgcaggcgaacgcggctctctccttacccgccagatgctgacctttggccgcggctggacgctggctcccgagtccattgatcttgctggattgcttagggaaaacgaggcgatgctgcgtcgcgccgccggtgaaaccgcgagattgcgcatcgagctgcccaccgccgttgcgcccctccatctggaccgcgcgcaactggaggcggccattctgaatttggtgtgcaacagccgcgatgccatgccacaaggcggggacattaccatcacggcttctacgcgtcggctgcggcaccctgcactccagaacagcgtggagtccttgcatgcctgcctgagcgtcagcgacacaggacagggcatttcgcccgaacaccaggcgcgtgtcttcgaaccattcttcactaccaagtccataggaaggggcagcgggttggggctgagccaggtgttcggctttaccacgcaatccggagggttccccgagctcagcagcgaggtcggaaagggaacctgtgtaacgctttgtttcccgctccaagagcaatga

SEQ ID NO: 530085 - DNA, 372 bp, Stenotrophomonas maltophilia
atgcccatccatgtgctgtttgtagaagacgaagacgatctccgcgccgtcgtcgctgatgcgcttacgagccagggattcactgtcactacggccagcaatggcgtggaggcaatcgcctgccttcgaagtcctacccggtttgcagtggtggtgacggactacaacatgccagaaagtgcgacaggtctcgacgtagcgatggaggcggcggtaagccagcctgatgcccgcgtcacaatcgcctcgggcctgcagcgcgctcagctgccgcccttccccgctgcggtacggtttctcgccaaaccctaccgcttcctgcagctcatcaccgcaatccaggaacaggtgggtgactcgccagacggctag

SEQ ID NO: 530086 - DNA, 147 bp, Stenotrophomonas maltophilia
atggcccgcggcatcacagaatccgacgtacacaccgccgccgacgagctggtggccaagggcgggcgcccaaccgtcgactcgctggctggaaacgtggtggaaccggctcggcacgcgcctgcagccacagcgtccggactttga

SEQ ID NO: 530087 - DNA, 1122 bp, Stenotrophomonas maltophilia
atggagtggggcgtgcgcggtgccgtccatcgaccctgtcgccggttctccggcgtatgtgatcggcgtgcaggcgcccgctgcgatcagtgcaagtgccggggttgcggcatcataccgtgccggctgcccagcgaatgccatggcgcggcgcgttccgtgacggccgcgccaaggcatccaacacggcgcctactgcgtcgcgcactccaccttgtgatcgaactcggtgcccagtgccaccgaggtgatcgcaagcgttgtgccctctccggcgcgcagcgcaaacggtacgctcaagcggctcatgtctgccccggccttggccaggcacttgaagggaacgcccagcctgacccactcattccgcggcgccgccgacagcgcagggcccaatgcgacctcggcagcacacgccgccccgcaggcggtaccgagtgtcactgcggattccgccgagagctgttcgacacgcaccgtcgctaccacggagagctcgccgttggtctcgcgcgaccagtccagcggagtattggcacgccggagctgccggtgcgccgacgggtgatgacgggtgatgacgggccggcgcgtggccagagggtcgacggctgcgcgatagctcgccgcccgatcgcggcgaaccctgagagcgccgtccgggtgttggcgggccgaccgtcgtctgttacaagccatcagtacacgcagacacaatggatgatcgccttgtcagcgccctgttcagcgctgctccgcctgcagttgtgccccgaagatctctccagatggctcgcggcgcccgtgccggcagcctcccgatggtccgactggcgatgcatcgccgggcagtggcacctgggcgacggtgaatgcctggcctcttcaagcgacgaggcgttggatcacctgcttgcggactgccaggcgctgctggcccgctacccagacaatcgcgccgcattgaaagccttcctggcctctgcacaggctgagaacatccaggttgccgcctatgaccgcagcagcacgcactttgttgcaggatcgctgactattcggaaagcctctacgatctcatcgcgtttcttgcggtggcacgaagcgccgccgatttcctga

SEQ ID NO: 530088 - DNA, 141 bp, Stenotrophomonas maltophilia
atggcatcgtcattggccagcatcaggatgagggtgtcgcaggccgcgaatacctcgtccaccgcctcgcagacgttgatgccggcggtgcgcgcggccgcatggttgcggtcggagcgcgaccagccgcatacctcgtaa

SEQ ID NO: 530089 - DNA, 312 bp, Stenotrophomonas maltophilia
atgaagaagatgattgccgctctggccctgctgggcctgtcctccccggcattcgcccaggaagccccggctgcccagccggccccggccgccgaagttgctgccggtgctgaaggcgccggcgctgccgccactggcaccctgaacacggttgcgaccgttggcctgggcgttgctgccgccgctgttgtctacagcgttgccagcgacagcagcaaggacgatgcgggtaacaataatggcggtggcaccaccccgccgaccggcaccaccggcacgacgggtaccaccggcaccaccggcaccaactga

SEQ ID NO: 530090 - DNA, 474 bp, Stenotrophomonas maltophilia
atgaacgccatgagcccgcaccttcaccccgtccagccttcgaactacgccaccgtcgccagctggcccgaatctgccgaagccacccagcgctgggcgggcccgggtgtgccgtttccactaccgccggagcggttcgcgcaggtgcttgagctcgcgttgcgcccgggctgggagctgctggacgagcagggtgcctgcgttggattcggccagtactggacgaccgacgccggcaccgcacacctggggcgcatcattgtttccccactggcgcgcgggcgcggccttggccggctgctcatgcaggccttgagtgcacaggcgctgcgcgaagacggcatccagcggctcaccctgcgcgtctaccgtgacaacacagccgccgcgactctgtaccgcgatctcggtttccagcaggtcgaagcgtcctcgacgccggaacttctgttcatgcagcgcacgtcgggctga

SEQ ID NO: 530091 - DNA, 789 bp, Stenotrophomonas maltophilia
atgatcagtggcgtacaacgcaaggctgagctgctctgggcattgtcccagcgtgagatcgcagcacggttcaaaggatcctacggtggcctctcctggtatgtgatccagaacctgctgttgctgacgctttactcgttcgtgttcggtacgttgttcaagaaccgatgggggcagggtgatcatccgtcgggcaacttcaccgtcgcgctgttcatcggcttgatcgtgttcaatctattcgccgaatgcgttacgcgtgcgccaacgctgatcctggccaatgcgaactatgtgaagaaagttgtttttccccttgatgtgctgcccgtcgtcaccctgattacggctgtgttcaacgcattcgtggcgatgctggtgctcattgcagtgtcctggtacctggattcgcccatgcattggcaggggctgtggatcccggtcatcctgctgccactgatggtgctgatcctgggagtgacctggttgctggcggcactcggaacctacatccgcgacatcaaccagatggtgacgttgctgatcagtgccttcatgttcctgtcgccgttgttctaccagatcaccgcgttgccgaaggccgcgcagacctgggtgatgttcaatccgctgacattgccgatgcaggaatcacgcgcggcattgatgctgggccaatccccggattgggctgcgctgggagtctatctgctgatcgccgtgccggtagccgccttgggctacatgttcttccagaagatgcgtggaggcttcgccgatgtcatctga

SEQ ID NO: 530092 - DNA, 762 bp, Stenotrophomonas maltophilia
atgaagattgaagatcgcgtttcgccgtacgactacagtttcgatccggaaggaccgagtaccgctgcgcgcatttcgcggatggtgggacagggacagcgggtgctggaactcggctgcggctacggtgtcatctcgcgtcagctcagccaggcacaagggtgcacagtgaccggcgtggagatcgatccggtcagtgccgatcaggcgcgtccctacctgcatgcgctgcatgttggaaccctggaaggtgacgaatggttggcagcggttcgcggcacctacgatgtgatcgtctgcgctgacgtgctggaacacctgcgtgatcctgcgtacacgctcggccagctgctgaccctgctggccccggacgggcgccttgtagcatcggtgcccaacgtgggtcacgccggtatcatcgctgccttgttctgcggacgcttcgattacacgccgacagggctgctcgacgaaacccatctgcgcttcttcacctgggattcgctggagcgcatgctcaacgcacagggcctggaggttgccaggcgcgaagccgtcaatgccggcggaaaccacgagcaattccttgagtactggcagcctctgccggaaccgatcaagcacatgctcaaccgacatcccaccgccaacgtgttccagttcgtgctggaggcacgtcgcagtgaaacgccgcagcgcccgtggcgagtcgaggatgccgaagcgctgcagcgttgggccgatgaggtggcgggtggctga

SEQ ID NO: 530093 - DNA, 2121 bp, Stenotrophomonas maltophilia
atgccgaagcgctgcagcgttgggccgatgaggtggcgggtggctgaagtgaccctcgcaggccacgctgcgccgccacgcgtgagcgtggtgatcccgtcctacaaccacgcgcgcttcatcggcgaggccatccagtctgtgctggcacagacgatgccttcgctggaactgatcatcatcgatgatggttccagggacgattctgtgttgattgcaactgccatggcggcagaggatgaccggataagagtggtgcgccaggacaacgcgggatcgcacgcggcgatcaaccgcgggctgtcaaaagcgcggggcgcatggctggcggtcctcaactcggacgatatctgggagcctgagcggctggagcagatgctcaagcacgccgagcgcgaagatgcgcagttcctgttcagcgatatccgcttgattgatgccgatggcgagttcatcgatgacccgtctcattggtggaacttcagcgtgcagcgtttgcgcgagcgcgtacgcagcgaaggcgtggtgaacgggctgctgtatggaaacttcactgtttccacgtcgaacttcctgttccgcagggagttgctggccagcgttggccggttccggcgcttccgctacaacctggactgggactacgtgctgcgctgcctggataccgtgggcgtgaaggtggagttcgtcgaccagcgcctgatgcgctatcggttgcacggtgacaacgccattctcagtggcatgcccggcgctgcggccgaggcccagctgatcacgcggcagatctaccgtcgtcggatgcatgcaccgcagagcctgctgctcagtcaccagcggcatgatcgcctgttgcgtcgccacctgcagggccaggtcaacaagtaccgcgagtcattccatgcggttgaagcggatcgcgatgcccatgccgaacttctgcaacaacgccagtggttgatcgaggctgagcggcgccagcgtgagcaggccagcgaagccgagcgccggaaagcgcaggcggtcgaagcagagctgcgtgaggcgctgaaagtgcagcaggatcaccaggagtcgctggagcaggtgcacgcggaatatcgcaagcgtgcgcacgcccagcgcatggaggtatacggcgattctctgcgggtgaggtacgagcgagacctgcagcgttgccgcgaggtgcggatgctggaacaccttgaagggcgaaaccttccaggctctccagcctacggaatgccgttgagcttgcgccagcgcgtgtcgcgcgccatcaggagcgcgcgccgcatcaacgaatccatcggcttcctgcgcaatggagtcacggctggtacggtccgtcatgttgcgcgtgatcctctgccgatcgtacccttggtagcagatgtggcggtccatctgcacattttctaccgtgatcttgcccccgaactgatcgccgatgcgctgcgcataccgaacctgcgcaaagtggtcattaccgggccctggagtcgcgaggacttcgacggtccgctggatgaactggtggcgcgcggtgtggatgtgcagatcctggtcgtccccaatcgtggcaaggacgtgggcggattgctggcggcgatccgtgatggaggtctcctcgattcggatcttgtgctgaagctgcactccaagaagagccacaatccggaaagctacttccaggcgatttcggcgttgttcgggcaggaaatacgcgatggcgatcattggcgccgcgctctggtgcagccattgaccggcagcacctggcagatcaacaacgtgctgaaacttttccaggatgatccggcgatcggcatggtaggtgcacgaccgttcatcaccagcgttcccgatgccaacgcagcgctcagccaagcggcgtacgagcgctttggtgtgccgcagggagccccgttcgtggccggcacgatgttctggattcgatcctcattgctccggccgctgctcgagcttggcctgtcgctcgatgagttcagcctggacagcagggaggttgagggcggcctggagcatgtgatggaaaggatgcttggcgccctggtgattgggcgcggcttcgacatctttggagtggaaggatga

SEQ ID NO: 530094 - DNA, 867 bp, Stenotrophomonas maltophilia
atgagcgcactgtccaatcgcaccgttccggtcttcatcatttcctacaaccgggtcagttacatcagggacgtgatcgagcggctggaagcgctggatttccagaatctcatcgtggtcgacaatgcgtcgacctacgaaccgctgctggactatctcaaccacagtccgcatcgcgtggtccggctcgacaagaactatggccatcttgcgctgtggcgcagtggtcgtttcgacgacatcatccagcgcgagcgtttcatcctgaacgacagcgatgtcatgccggcccatgattgcccgtccgacatcaccgagcacctggctgagctgctggagcgctatccgcggcacaacaaggccggcctgtcactgaggatcgatgacctgcctgaccactatgcgttcaagcagcaggtgatcgcctgggaatcgccgttctggcagaacctgctggaggacggcaactatgaggcggcgcttgataccacattcgctctctaccgtcctggcgtccactgcgacgaggagcgttggtggcgttcgatccgcaccgcaccgccatactcggcgctgcacttgccatggtatcaggacacctcgctgatctcggacgaggacatgttctaccagcaggcggttgccggcatttccagccagtggagtatcaccgacccggtactgctgaagaaacagaacaccgagctgcagcacgagatcgcagcgctcaagcgtacaatcagcgagcttcgcggtgaggttgcgccggcgggctcaacggcatggcgcaacgctgtccgatccaccctgggtgccaccgggctgttgccgctggtgcgccgcttgcgcgacaacatgaagaagtga

SEQ ID NO: 530095 - DNA, 1809 bp, Stenotrophomonas maltophilia
gtgaccgatacccggacggcattaccgccgcagcagcctgtactgtggccattcttccttgcgttcgcgacgctgctgtcgatcgttctctccgcgctgaccccttcgttccagacgccggatgaacttgatcacgtcaagcgtgcctatctgttgagcaagggccaactcctgctgcatgcacgcgatggcaacccctccggcggcgaggtcgatacaggcctgctgtcctacatgcagcagttcacgcaactcgtgggcaagcgcgcgcagaagctgaccgcagaggagcttgcccactccgagtcgatcgcctggtcgggtgagacgctgtaccaggccccttccgggaccgcctattacttccccgccgtctatctgccccaggccattggactggccgccggcagggtgctgggatggagcgtggccgattcctaccggctggcccgctacttctcgctggccgcagccatcaccctgctggccctggcattccggatctttgctccacctgcgggggcactggccctgctagtgctgcccatgacgctgttccagtttggcggtgccgtgttggatccggttgccaccggactgaccttcgtcgccgtctctgctttcatgcgtcttgccgtcgacgaacgccgggccgatccccgcgttttcatcgcgctggcagtggcgaccttgcttgtctgtgcaagccgtgcgcacatgctgccgatgctcgcattgccctttgctgccgcatggtttgcgcgctgccgccgtcgcttctggatcgccctggccctggcagtgttcgtactgggctggacggcggtgacgatcaagacaacggtgtacgcccccggaccacgcgacgcagaccacgcagcgcgcctgatgcactacctcacccacccatccgagctgtggcacatgctctgggtaacctggtcgcacccggtccgcatgagcgaatactgggagtccttcctgggcgtgctgggctggctcgacatcggcttccctgcctcgttctatctctgggccggtacggtcttcctggcgacagtggtcacgtccgttgccaccggtgcctggcgcagcctggccttggcccgcactctgctggtggtcgtctgcttctcggcaatcctgctgaccttccttgccctgctggtgcaatggaccgagcccggctcgcacctgatcgaaggcgtacagggacgctacttcctgattcctgccgtctgcctgtcctacgcgcttctggcccagccgcaaccgcgtccgcgtgcactgcacctggcatcacacgcgctgctggccggcctggtgctcatctcaggctatggcaccgcgaaactgctggccgaccgctactacatgcagccggtacgccctgtggcctcgccagtgttctcgctggaggcgggacaggcgatcgccacggacgcgcccaccccactacagcttccacaagcagcgcaggcaccggatacggccatcgattcggtctccatcctgctggacgtcaggaaagccatcactgatccgaaggccaaggcgagcctgcgcctatggggctcggacggcagcgagcatcgcttcgaactgcctttggccggcatcggggacgacgactaccacgacgtgccggttgacgcgcttacctatgtcaggggcgatgtccggatcgatggcacagctgaagtgggactatgggaagccgttgacggcaacggcaagcgggcgagctgtctggtggtccataccaccagcggcagccgtctcactacgccgggctgccctctgccctag

SEQ ID NO: 530096 - DNA, 984 bp, Stenotrophomonas maltophilia
atgaccgtacagattgcgattgtgattccttgctacaaggtcaaggagcacattcttgatgtcatcgccggcatcggtgatgaagttgcccgcatctatgccgtcgatgactgctgcccggtgggcagtggtgattacatcgaagcccactcgacggatccgcgcgtgaaagtgttgcggcatgccgagaatcagggcgtgggcggagcagtcatgacggggtaccgtgccgcgatcgaagacggcatggatgtcattgtcaaggtggatggggatggccagatggatccagcgctgatcccggatttcgtggcaccgatcgtagccggcgaagcggactacaccaagggcaatcgtttcttcgatctggaacagatccagcagatgcctgcgctgcgcctgttcggcaacggcggcctgtcattcctcaccaagctctcatccggctattgggacctgttcgatcccaccaacggctacacggccatccaccgcgatgtcgcgcggcatctgccgttggcgaagatcagccgccgctacttcttcgagacggatatgctgttccggctcaacacgctgcgcgcagtcgtggtcgatgtgccgatgcacgcccgctacggtgacgaagtgagcaacctgaagatctccaaggtaatgaccgagtttcttggcaagaacctggcgaacttcggcaagcgcgtgttctacaactactatctgcgcaacttgacgctggcttcgctggagcttccgctcggacttgccttcacgctgttcggccttgcctacggcatcaagcactggttgttcagcatcgacagcggccaggtcgccagcagcggcaccgtcatgctcgccgccatgccagtcctggtcggtgtgcagctgttacttgcattctttggccaggacatcgccagcaccccccgccgcgcgatccatcgccgcctggcccgttcggcgctgcggggcccgagcgcgtga

SEQ ID NO: 530097 - DNA, 375 bp, Stenotrophomonas maltophilia
atgacccgttctgccgctgtactgacccccaccgtgatcgcgatgatcctggtcacattggccatgctggccagcgggcaggtgttgttcaagctggcctcctcgcagctgtcgttcagtcgccccgccagcttcttctccggcacgctgattctcgcgttgttcgtgtacggcgcagccacactgctgtggttggcggttctggcgcgtgtgccgctttcggccgcatttccgttctatggccttacgttcctgctggtgcccgcgttctcctggtggcttctgcatgagccgatccggccgcagacctgggcaggatcggtggtgatactcatcggtgtggtgatttcttcctggagtggtcgcggcagttag

SEQ ID NO: 530098 - DNA, 876 bp, Stenotrophomonas maltophilia
gtgattggacgtgatgagctctgcccaggctgtcattccacgctcgaggtgggcctccggccatggcaccgcgtctgcgccaactgtacctacgaaggaagcacactcagcgtcgatatcgacatcgatggcagcgttgaagtcgtcgatgaagccatgcgcgaggaagggctggaacacctgcggcaacgcaatttccagacattgaccgcagatctggggacgcggatcgcacctgccgatggcgtgcgcccgcgcttgctggacgtcggatgcgcccacggttggtttctggaggcgacccggccacatttcgacgtggttggaatcgaacccgatgcccggatcgcggcgatcgccgaagccaagggcctggacgtgcgcaagggtttcttccctgacgccctggcggacggtgaacgattcgacgtgatcatcttcaacgatgtcctggaacacattcccgacatcgattctgcgctcgtggcctgcacccgccacttggctcccggaggctggatcgttgtcaatgctccggcccggacgggggtgctttaccgtatatccaaggcaatggccggcctcgggatgccggcctctttcgaccgcatgtggcagaaggactttccctcgccgcatgtccattatctggacgacgccagcgtggccgccatcgccgcgcatcacggcctgcgcgtgtccgatgtccgcaccttgccgtcaatgagcaatcacgggctgtacgcccgcatccgcacagaccgcagcgtttcgttccccaaggcggtggcgctcacgtcggtgctgaccctggccagcccggtcctgtccatgatgcccgctgacatcaaggtctggctgcttcaggttgcctga

SEQ ID NO: 530099 - DNA, 150 bp, Stenotrophomonas maltophilia
atgctggatgccatggatctgaagcgaatgtcactcccggtcaaatgtgttgccatcgtgggcgccatcctgctcgcggttgcaggcgggcatctgctgggtagcatgtttccgcagctgttcctgcagatccatcaacggatgcagtag

SEQ ID NO: 530100 - DNA, 606 bp, Stenotrophomonas maltophilia
atgtctgcattcgccccgcgcaccctgcttccgcgctgcatcgtgttgctgtccctgctgttctgcgcccaacaggccgccgcatccgacctgccacgctgcggcgttttcgaggccgaaggcggcggcaaccagctgcgcgtggatgggcctgaccgcggggtcgagaaaggcagctacatctccgatcggcccttcgttgtccagcgcagcgaaggcagcctcaatctggttgatctcaccttcggcctcgtctctgaactggaggtccagcgcgatggtcgcgccctgcatagggacggcaagcgctaccgcctgatccagccggccgcgtgcctgcccccggtcgaacatacgcccggcagctgcctggccgacgcccggcagtgcctctacaaccaccatgagctgagccttccggcactggaatcgggctgcgccgaaggcgttccgcaactctgccagcgcctgcccgatcgctatcgcaaggccgaccaggcccccggcagcgatacgccgaccgaagcacagatcgcggtgatacaggccaccatggaaaaggcgatggccgagatggatttcccccccccagtgccgcgacgatga

SEQ ID NO: 530101 - DNA, 1017 bp, Stenotrophomonas maltophilia
atggccattctggaagagcggcccgagctcgtcgaggctgtcgacaccgccattcgcacggcctcgatggcggccagcatggttgaagtgttctcgcctgcagtcaagcccgcactgtctgacgcgcggctgcagcgcctgcaggggctgtgcacgcaggtccgcgaaagtggcttctgcgtggaggtcgccatgctgcagtgggacgccggcaatctgaaggaaggtcgggcggccttgcatgcggcctgcgacggcggcgacgagcgatcgtgccgtcaggcgtccgcgttgctgcagctgggcgaagcgctggtgcagcaccccgccgccgccgtgccctgtggccactatgcggcctccggcgggctgatggacgaactgactttcggcgacggtggcatggtggaggttggcttcggctcgcgagtacgcgcgcgcgtacaggacggtcagatccgcatgcgccacgagcgtggggctgactatgtactgcagccgttggccaacggcgacttgctggggctggacgattcgacgcgcttccagcggttccagcggcagccgggcaatgcacagtgcagcacgccactggtgttcgacgaaactccgttcccgcaggattgcccgcgcgcgcccatcgacggtgaagccgaagcctgctgcgccgccggcaggatgcagggctgccacgtgctgggcagtcgcgccgcgctgaacgggaagtgggtggaggcaagccagcattaccagaaggtctgccaggccggtatccgcgagggctgtgagaacctggccagcatgatggagaacagcagcagggtagacgtccgccccatgcttgaggccatctgcgaggccgatggcagtggccgccatgtagcctgcgacgtgctggcgacccgtaactgggggttgctggagttcggccaggctctggaccgcgcggtccaggaacagtccgcgcacgaggatcggaccagaccggccccacgcacccccaaccacaagcagtaa

SEQ ID NO: 530102 - DNA, 726 bp, Stenotrophomonas maltophilia
atgagcattgaagtagacgacgtcagcccgggcggcagcccgatcctggtgcacagccggcaaaaggacttcaccccggcccaaggtgaatcgcacatcgaggccatcagcgcgcacatcgagcgccacctggggccgatctcgggcgtattccacgaaatcgtctccgacctcgtgcatatcgacgtgcatgtcgtgccggccagcgagcagtttccgtacctgcgcctggtgacctcgggcatgagcgacctgccgatgaccctgcccgaaggggcgcccggctcggcgtacatggagctgatggtgaccctgccggccgactggccgatcagcgatgacgccttcgaagacgagcgcaactactggccggtgcgcctccttaagacgctggcacggctgccgcacgagtacgacacctggctcggcttcggccacaccattcccaacggccacccggccgagccctacgccccgggcgtgggtttcgatggcgccatcgtgctgccgccggtcaccgcccccgatggcttcgccacgctgcagctggacgacggcaggcgcatcacgttcatgaccatcgtcccgctgtacccggaggagatggacctgaagctgaggaaggacgccgaagccctgctcgaccgcttcgatgcgaaaaagatccaggatgtaatcgagccgggccgggtgaacgtggcgaagaagcgtttcggtttcttctga

SEQ ID NO: 530103 - DNA, 1830 bp, Stenotrophomonas maltophilia
atgaccgacagcggacgactgccatttcctcgccaagatgcaggtctgctgggcggattgagtccaaaccaggcaaggctcttcctgggcctcattgccgcgttctgcattgtgtatgtcgcacttgctttgactccttcgtcctactcgctggcattcgagcgattgggtctggaaccactgcaaccgctgctcggcacagcccgctccatccgctcggatgagtggatggtgtacaccccctatgtccagatcgccgttgccaacgattttggccaggtcaatgcgcattcgccgtatcacgagtcgctgcgtaccttccaggcgcttccgctgctggactggggcctcctgttcaagccctaccactgggccttctttgttctgcctccggcaaacgcgtattcgttcttcttcgctttcatggccgtggcgttcttgtccggctggaccacgttcctgcgccaactgcaattgccactgttgccagcgctgctgatcgccagcaccttgttcttttcgccattcgtgcaagtctggtggtccagcaacgcgggggcatttgcacttgccccttgggtcgcggtcgcctggctgggcatcggcaaccgctggctgcgcatcctggccggcgcctatgcactctctgcctggctggtggcagcaacctaccccccgttcaccattggctcgctgctgaccatgggcctgctggtgctggcctttcgccgcgaaacgttgtcatttccccggctgctcgatgcagtcgcagcgggtctgctttcactggcagtgttcttcggctatttccacgagatcatccaggtcgcccgcgataccgtctaccctgggcagcgtgcgagcgccggcggtggcgtaagcctgattaccctgcttgcacatctgtttcccaacctgatgacttacaaattcgcaccgttgcagtccttcaggacgtccaacgaatgcgagatcgcggtgctgggcagcctgttgccgctgtttacgcttgtactggccgatggggttcggttccgcagttgggcgcgcagcaaccgtcgtgcactgtggatcctggccgccggcctgctgatggtcgcctgctggatgttcctgccggttccagtgctgatcggcaagctcaccggcctgtcgctggtaccaccgatccgagccttgcttgccttcggcctgctgctcaacatcggctgcgccattatcctggtgcggtgtggtgtgctcattcaacccaggcgtgtgctactgctggcaggcctgctggccctcggcagcgcggcaaagtacctgttcggggatgatggtttccaccacctgtacagcagctacgacacagttccgtacctctgcctggccgcgctcgccatcgttgccagccgcccctggtgctcgaagcatgcgcccaccctggtattggccaccgcagcattggccaatctgctcggcaacggcctgttcaatcctgtgcagccggcggggccaatcttctcgatcgaccgccaggcagtgctgcaggcacagcaggcgcgcggcgcgcgcagcaacgccgacggggcactggttgctacagggagctttggtggcctgttgcccggagccggcatcccagcggtcaaccacgtgctgtatctgccgcagatgaagtatttccggaggtacttcccgaccatgccggacagtgatttcaacttcaccttcaaccgctaccaccacgtctcggtgaatcccaacagcgaggcaccccgcctgatacaggcagatctggtggaagttccggcgaaagcgatgctggcttcgccagccaaaccctga

SEQ ID NO: 530104 - DNA, 1422 bp, Stenotrophomonas maltophilia
atgttgcgactggacgatatagagcttcacttcaacggccgcccacttttcagcggcgtggacctgcgcctgcctgccggcgcgcgcgtcgccctgatcggcaacaacggcaccggcaagagcagcctgctgcgcatgctggctggacaggtcatgcccagcgcaggtgagatccgctggcgcgatggcgcatcggttgcctttgtgccgcagcacgtgctggacggatcggcgcgcagcggcggcgaacagatgcgccatgcactggcacgtgcgctggattcagcaccggacgtgctgctgctggacgagcccagcaaccatctggatcgcagtgcgcggcgctcgctgctggcccggctgcgccagtaccacggcaccctgttgatcgcctcacatgacaccgcgttgatcgatgcgctgtgcgacacgctctggcatatccacaaccagcacatcgagatcttccacggccattaccacgaccatcaggtggaactgcagcgccggcgcgacgcgctggatcgaaccgtgcgcgacctcgaccgcgcgcagtcgcaagcacatgacgcactgatgcgcgaacaggagcgcgccgcctcctcacgcaagcgcggcgcagtgaaggtggagcagcgcaaatggggcacggtgcgttcggccaccaaactggaacgcggcaacaccaccgccggacagaaacgccagcagatccgtgaggtacaggaagacatcgccgagcgccgccggcagctgcagcgcgacgaggtcatcgagccgcgcttccagcttcctgcgggctggcgccgggaaggcgtggtggtgcagatcaccgatggcgcatgcgggtacgctgctcccatgatcgtgcagcagctgcaggttcgcctggaggtgggcgactgcctgctggtgaccggcgacaacggcagcggcaaatccaccttcgcccgcgcattgcagggtgccaccgatgtcaagcgtgagggcgactggctgctgccggtggcggagcaggtcgcgctgatcgaccagcactatgacgcgctgccggccgcgctgacgccggtgcaggcaatggccgcttgccagccccaatggaccccctccgaatgccgcctgcatctggccgacttcctgttccgtggcgatgctccggcgcagacgacgatcggccagctgtcaggcggcgaacgcgcacgcctggcgatggccctgatggcggcccacccacctaccctgctgatactggacgagcccaccaacaacctggacatgagcctccgtgcccatctgctgcaggtcctgagcgcttacccgggcaccctggtggtgatttcccacgatgagggcttcatccagtcactacagcctacccagcggttgaacctgccgacctgtgacagcgccgccgcacgctga

SEQ ID NO: 530105 - DNA, 975 bp, Stenotrophomonas maltophilia
atgcccatgcctgtgtggatgcaagggtgcgtgttcgcccttctgctgctgccggccagtgccggagcagcctgccagcgcctcaaccctgccgacgacctcatcgatctggatcggcgcatgccgaatcttgatgcgccgggacgctactacagtggaggcagccatctcggtgggcttggcgatgccttcgactgcccggcggggcaacatcccttctccatcgatatccagctctcggggctgacctatgaaggtgaactgccttccgagggggtgatgctgccggtctacagcttgggcccgcgatcacccttgctgggtttctcctatgtggtctcggatggaaactcaggccagcgcacgccccttcggctggggcagcccaaccggtcaccgggccacccgctttctgcaagccaaccgatcattgcgggtatccacgtccacaccttttttcgaggtggtgccatggaagcggtaccaaccacggtgctgggcacggccgaatcctggcccgaaggcaatccctcgcagcggctgcgccatgcgatcagcgtgcggttcgatatccctcccgtcacctgcacgttgggtgatgccagccaccgcctcgctgacatcagtgccgatcagctggccacgcccggtgacacatccggagaggaatccctatcagtaccgatgacctgccccagcgccaatgtcgacgtgacgctggtggcgcgggacgctggcggtgtcgacactcctgatggcagcctttccgctgctgcaggcagcacggcggaaggggtacgggtgcagctgctgcgcgatggggcgccgttgccactgggcatcgcctggcaccatggctattccagcaagggcgcccaagcgatcgccttctccgctcgctatctgcgcacttccgacgctctgcagcccgggctgatcatcggggcggcggtcatcaccgcggattaccgatga

SEQ ID NO: 530106 - DNA, 723 bp, Stenotrophomonas maltophilia
atgaactatcgcgtattgatctggatggcggcgacgatcgccgctcccctggcactgcccgcctcggcggcggtgacgctgcagggcacgcgcatcgtgcacgatgtgagcaagggccgggatgtaacggtaaaggcgagcaataccggagagcggccagcgatgacgcaggtctggatcgatgacggtgacagcaccgcacgcccggagaatgtccgcacgccattccggctgacccctgcggaaccacgcctcctgcaggcgcagcagggccaggcctaccgcatcacctatgcgccccggccttccgagacgccgctgccgaccgaccgcgagtcggtgttctacttcaatcttctggatattccgcccaagcccgtagacgccgcaggaaaaaatctgctgcagttcgcggtacgtacgcgggtgaagctgttccatcgtcctgccggcctgccaggcaatgcccgcgatgcagccggccaactgcagtggcgcgcgcaggcgggcggcctgcaggtgagcaaccccagcgcctatcacgtgacgctgagcacgctgtccctgcccgatggccgcaaagtgaacgtggacatgattgcccccggtgcgcaggtgaatctgccgctgcctgcgggtgcagcggtgccggcaacgctgaaattccagtggctggatgactacggcacgccgcgcgatgccgacgcgaccgtcgttcgctga

SEQ ID NO: 530107 - DNA, 495 bp, Stenotrophomonas maltophilia
atgcgctactccaaaacccaggtgctgctgcactggatctctgcggtcatcatcctctgggccacgatcagtggcttctacgtagcgcttctggacgttccgcatgcccttgcggaagccatcggattcttcaacgtttccatcaccacggtattgattccgttgtttgtggtgcgcctggtgatcgccgtctcaaatcaccgggccgcacccgccagcggagcggattgggtggccttgattgcccacgcggctctgtatctcgtcacgatcatcgtgctgctgacgggcgtactgatgatggagcgtgagatcaacgtcttcaatgtggtgatctttccacagcccatcaccgacccgcagctgacaatgtcgttcaatactgcacaccgctacgcatgcgtggttttggccgggctcctgttcctgcacatttccgccgtggtcaagcatcatctgtcgggcaatccgatcctgaagcggatgagctggtaa

SEQ ID NO: 530108 - DNA, 756 bp, Stenotrophomonas maltophilia
atgaaaagcgcacttgatcacagaaaaagcacagttaacgtgaatggtggcttatccgaaaaacagatccgcggtggatggcgccggggatgcatcgcctcccgcagccccgccggcctgaggttgcgcggaaagcgtgcgctgcttatcgcgcccgaacatgcccatgctggtggcaacggccacaatcaacgctgcccgcgccatgttggttaccaggaccatcatcgagtcgcggctgcggccggtgattatccggtagtcttgcggcccttttccacagcgcagcaaacgggcatcccccccctaagaaagatgcgcctttcgcatcgcattctggatgccgtcgttctcgatcaaacttctcggcgtgcagcttcttcagccgcaggctctcaccccagactctcgagtcgcttggtgtcaagtgctttcatgccaccaaacttcctcaccgcaggtcggaacgacgccttttcacgtccaatccccttgccattgaggattggtctccaagccgcctcgcactcaatcccggggcgatgcgagatccagcatctgatccgctgtcactcatccttccgccaccacgcacccgagttacggaagccgattcgcctctacaccaaacgcccgagtcagcgcgcaactaccgggcacctcaccatttcgacctgcctgacattaaatcttccagattctttccataaaggactgtgccaggacgccagtcggacgaccacagactcgcgatag

SEQ ID NO: 530109 - DNA, 996 bp, Stenotrophomonas maltophilia
gtgttgctagtcgacttcgaccctcagtgcaacttgtccattgcgatgcttggcgagcaagtttttaacgagcagatgccgacgccggcgcagccctatgggcggactgtgcgctccttcctccagcggtttttgcaaaacactacaggcgaagagatctttctacacaagggtgctaacaccagcgagatggtcgacttggttgctggagatttttggcttaacgtttacgctgattcactcaacgtgggtagcgatttgctcgccggcacaggcttggcccgctatgtagcccttcgtaagctcatagcgaaagcggaggaagttgcgggttacaactacgactatgttatcgtcgacctccccccttcatttggcgcgcttgttagggcctccttctactcatcggactactacatcgtcccgtgtacctccgacaacttcagtgtctactgcgttggactgatcgggcagatggttccgaactttgttgaggattggcgcacgggccttcgccgctttaagcaggcaaacgacaacttcacttctttcgatcacttgggcaagccagtgttcgctgggtgggttttcaatgggttcgatacagccgcgaaacgccggagtgcggtcgagcttcatctccatgcgccgctgggtccacgcgagatggttcgagcagatcaaactatgcatgatcggatagtccaagctgtagaggacgacttggccggggttctcaccacccgcattggtgactactctcctgtagccgatggacttcccgccaactacagagttggcgacttcgaagacgcaaatgttttgatacagaacagtctttggctgagcgttcctttgggcgaactgcgtggccatcagcaagttgtgtccctgcgcgctcgtcaagcatggtcagagaatcagctagctcagattgatcttttcaagtcaaagttcaatgactgcgcgcagaatctgatcaacatctgcatctag

SEQ ID NO: 530110 - DNA, 582 bp, Stenotrophomonas maltophilia
atggaagtcactgttaaacgtatcaccggtccgtgggatgatgggtatgccctcgacaagcacatgcttaagagcgaagtgatcggccacaacgagcatggacatgcgatcttcgatagcacgcgcacggcggccggcgaggccgtgtttcaactgaagtaccggagtgatcacactcaggcactgacgttggctcaggcgctgaatcaatacatccttcctcgcctcgattcaccacgacttattgttcctatgcctgcttccaacacacgggcacatcagccagttaacctggtagccgatgagctcggtaggatttcaggtctacctgtcttccacaagattctccagaaggcggcgaatggcgtttcgttgaagaacttgaacggtagggatgagaagatggatgctcttaggggcaccatggccattcatgatgagattactaaccaaggccgctggaatgccataattattgacgatctgttccacagcggcgcctcgatggaaaccgcgacgaccacactcagaacatataacaagattaataaagtcttcgctgtggcgatgacttggagatag

SEQ ID NO: 530111 - DNA, 558 bp, Stenotrophomonas maltophilia
atgacgactgtatttatcgctggttcgatcaccatcaaagaaattgatggcttagtcaaggatcgcattgcgaatattattgacgccggccacaaaattattcttggtgacgctgatggagccgacaaggcagtgcaagatcatctggccctagacgggcgagcccacgtaacgatttactgcagcggagaacagccacgaaacaactctggccattggccggtggaaagaatcaacaccgatgccaagccgggcacaagggcattcttcaccgcgaaggatcttaagatggctcagatcgctgactttggcctcatgatttgggactccaagagcaccgggacactcagtaacgtgatcgagctgacggggcgcggtaagaaatccttggtctacatcagcaaggctaaggagttctgctcagttggcagcgcttccaacatagacaaacttgtccgtgtgatgctcgactcggcgagagaaaaggccgaaatcaagattaatctctcgcaaaagatcgagcagcttaagcatgcgcagagtgggtttgacttctag

SEQ ID NO: 530112 - DNA, 1983 bp, Stenotrophomonas maltophilia
atgaccgaccgccgcgacgatgatttccgcatccgccccagcgccccgaagaaccagggccagggcttcgtctccaaggtgctcaagcaggcgggcaaggccagtagcggcaagtcgtcggtgcgtcgtcctgggggagctggcaagggcgcaggaaccgggcatcggcccggctcgcgtctggggcgcggccacacggcggcgcgcttcgccggggcgaagctgacgcccatgtcgcggcgcgtgaccatcaagacgctgttggtcaatcagcgccaggccagcccgcaatcgctcgccaagcacctgcgctacatcgagcgcgatggcgtgggccgcgatggcgagccaggccaagcctacgggccgcagaccgatgccgccgacctcgacgccttcaaggaacgctgcgccgacgaccggcaccatttccgcttcatcctctcgccggaggacggcgccgagttggaagacctgcgcacctacacgcggcacctcatgggccgcatggaggccgacctgggcacgggcctcgattgggtggccgtcaaccactggaacaccgacaacccgcacacgcacatcgtcgtgcgcggacgcgacgacaccggcaaagacctcatcatcgcgggcgactacatcgccgatggtttccgccatcgcgccgccgaactggcgaccgaatggctggggccgcgcaccgagctggagatccagcagaccttgcaacgcgaggtggaacaagagcgatggacgagcttggatcgcacgctcaaacgcgagttgggcgacgatggcttggtgcatgtcgaacgcctcaacgagccgagattgcaacgccagcgcctgctgctgatcggccgcctgcaacgcttgcagcgcctgggcctggccgacgagatgcagccgggcacctgggccgtccataccgatgccgaaaagacgctacgcgccctgggcgagcgtggcgacatcatccgcaccatgcagcgggccatgcgcggcgagccgcgcgaactggcggtgttcgacccgggcgacgatggccgaaccatcctcggccgcgtggccgcgaaggggctggccgacgagctgcgcgaccggggttatctggtcatcgacggggtggacggcaaggcccactatgttgcgctcaacgcccgcgacgaactggcgaactatccgaccggcgccgtggtggaggtgaagggatcggccgacgtgcgtgcggccgaccgcaacatcgccgcgctggcgagcgatggcctgtacctcaccgaccaccacctcgccatcgcgcagagtcaggccgtgccgggccgcgatccgcaggaagtcgtcgccgcccatgtccgccggctcgaagccctgcgccgagccggcatcgtggaacgtgtcgccgaaggtctatggaaggtgccggacaacctgcccgagcagggccgtcagtacgacgcgcaacgcctaggcggcgtggccgtggaactgaaatcgcacctacccatcgagcgacaggcccgcgtgatcggcgccacgtggctcgaccagcagttgatcggcggcggcaccggcctgggcgaactgggctttggtggcgaggccaagcaggcgatgcagcagcgcgccgacttcctggccgaacaagggctggccgagcgacgcggccagcgggtgatcctggcgcgtaatctgctgggcacgctgcgcaatcgggagctggcgcaggccgctaaggacatcaccgccgataccggcttggagcatcgcccggtggccgacgggcagcgcgtggcgggtatctaccggcgtagcgtcatgctcgccagtgggcgctacgcgatgctcgatgacggcatggggttcagccttgtgccgtggaggccggtggtcgagcagcggctgggccagcagcttgccgctacggtgcgcggcggcggcgtgtcctgggagataggacggcaacgtgggcctgccgtcggttaa

SEQ ID NO: 530113 - DNA, 693 bp, Stenotrophomonas maltophilia
atgttcattaggaatgacgtttttgaaattcttattgatgaaatggcagatagaggcaaagagccaaaggcgctgcttgattggacggactcagagctgcttcggcaattgatattacgcagagcgtcttatcactcagagagcgaaatcgatagtttcgattcgctttgggcgcaggtctgtgtcagccatatacgcggggaagagacttcgcagtacttgattgatcgttccatgatgcgtccgcgctatctaatagatttaataaatcactgccgtggtatggcgatcacgcttggtcgcgagagaattgatgttgatgatattgataaagggatgaatatattttcatctgatcttatcgctgatcttagtcatgagattcgggatgtgtatccgcaaggtgaggacattctttactcattcattggtctcgatcatgagctatccgatgacgagctgcgagttgccctcaaggatgcggaagttcccgactgtgatgaggatcacttgataaagatactactttggtatgggtttctagggtgtctggatgattctggggagccgaaattcattcatgacgttgcctacaatccgaagttgcttgatgcgtacaaaaatcggcgggcgcgacacgctaagtcctttgtgatcagtcctgccttctggccggctcttggaattaaatag

SEQ ID NO: 530114 - DNA, 1473 bp, Stenotrophomonas maltophilia
atgggagactttctcgttgcagatattactgtcttgaactttaatgtggtatacgagatcggttacgcgattggcaaaggtaagcgggttctagttgttcggaatgagccctattcagcatcgacggcaagtaaaataaacgagctcggtatattcgatactctggggtataggtcgtacgtaaactccaaggagttgcaggagtatctttctggaattagggagatatcccctatttcaatttctttcgtgttaaataaaaagtctcccgtatatcttactcaggataaatggaagacggatggtgctactaggattttatctagagttcgaaaggcccgacttgccttcagaagttttgatccgactgaacaaccgcgcctatctgctctagatgcgatgcagcaggtagcccaatcctatggtgttctcgtccacctcatatcaaatggcgtggccgaccatgagatttccaatctgcggggagctttcatcgctgggcttgcgcagggcatgggaaaggttgtttccatactgcagtcgggaacagatcctgtgcccttggattatcgcgacctggtgcagtcctatgcccatcccgagctgattgatgactttattagcgactttgcaggaagggtctatgaggaggttcagcgctcccctgacgagattcaacgacgagagttcacgacgctggagaagttcgatctaggggcgtcttccgccgagaatgagcttcgggatctccacaactactatttgcctattgacggataccgtcgcgcacagcgaggggaagttcgccttgttgtagggcgaaaggggtcaggtaagaccgcgcttttcatgcaagttcgagacaggatgcgatcgagccgggataacgtggtcctcgatcttaagccggatggctaccgacttattaagtttaaggacagagttctgaagcttctcgagaaggggagctttgagcataccatcactgcattctgggacagtttgctgtggctagaaacctgccacaaggtcgtagagagggacagagattcctatctctatagggatgaagaggtggtggatgcctacagagccctggcaagcgaatatcagaagtttggctacgaggcgcaaggggattttgctgagcgaatggctcgtctcttagggagaattgagaatgactatgctcagaagttcggggggattgactcccagatgttatccacgcctcaaattacagaattaatttacagtagcgacattaaaaacctgcaggataagttgctctcatatctttcattcaagaaggcggtttggatactgtttgataatattgataaggggtggtcgagtcgggggataaatgaggatgatttaataatagttaaatctctggttgaggcaacgaggaagctggagcgaaggattcagagggggggggatagatgctcatacactaatgttcattag

SEQ ID NO: 530115 - DNA, 1563 bp, Stenotrophomonas maltophilia
atgccacgtcgttccatcctgtccgccgccgagcgggaaagcctgctggcgttgccggactccaaggacgacctgatccgacattacacattcaacgataccgacctctcgatcatccgacagcggcgcgggccagccaatcggctgggcttcgcggtgcagctctgttacctgcgctttcccggcgtcatcctgggcgtcgatgaactaccgttcccgcccttgttgaagctggtcgccgaccagctcaaggtcggcgtcgaaagctggaacgagtacggccagcgggagcagacccggcgcgagcacctgagcgagctgcaaaccgtgttcggtttccggcccttcaccatgagccattaccggcaggccgtccagatgctgaccgagctggcgatgcaaaccgacaaaggcatcgtgctggccagcgccttgatcgggcacctgcggcggcagtcggtcattctgcccgccctcaacgccgtcgagcgggcgagtgccgaggcgatcacccgtgctaaccggcgcatctacgacgccttggccgaaccactggcggacgcgcatcgccgccgcctcgacgatctgctcaagcgccgggacaacggcaagacgacctggttggcttggttgcgccagtcaccggccaagccaaattcgcggcatatgctggaacacatcgaacgcctcaaggcatggcaggcactcgatctgcctaccggcatcgagcggctggttcaccagaaccgcctgctcaagattgcccgcgagggcggccagatgacacccgccgacctggccaaattcgagccgcaacggcgctacgccactctcgtggcgctggccaccgagggcatggccaccgtcaccgacgaaatcatcgacctgcacgaccgcatcctgggtaagctgtttaacgctgccaagaataagcatcagcagcagttccaggcgtcaggcaaggccatcaacgccaaggtacgtctgtacgggcgcatcggtcaggcgctgatcgacgccaagcaatcaggccgcgatgcgtttgccgccatcgaggccgtcatgtcctgggattcctttgccgagagcgtcaccgaggcgcagaagctcgcgcaacccgatgacttcgatttcctgcatcgcatcggcgagagctacgccaccctgcgccgctatgcaccggaattccttgccgtgctcaagctgcgggccgcgcccgccgccaaaaacgtgcttgatgccattgaggtgctgcgcggcatgaacaccgacaacgcccgcaagctgccagccgatgcaccgaccggcttcatcaagccgcgctggcagaaactggtgatgaccgacgccggcatcgaccggcgctactacgaactgtgcgcgctgtccgagttgaagaactccctgcgctcgggcgacatctgggtgcagggttcacgccagttcaaggacttcgaggactacctggtaccgcccgagagaagttcaccagcctcaagcagtccagcgaattgccgctggccgtggccaccgactgcgaacaatatctgcatgagcggctga

SEQ ID NO: 530116 - DNA, 297 bp, Stenotrophomonas maltophilia
atgtgcgagttgcttcaaatcatcaggatcgccggctttgcactgtgcgtgattgcagggttaaccgccgtactttctgcaaacgcatactgcaaaaagaacggaatcaacatgaataccttcgagggcatgttcgagatgtaccggcgggttttcagatttgagaacaaacgcctctcgatactgatgttgtctaccacctatggcggggccgtggtgatggcgggggttgtcgcgattacattctggggccaggcgcaagggtgtgacttccacatcaacaggctcgcgcgctga

SEQ ID NO: 530117 - DNA, 891 bp, Stenotrophomonas maltophilia
atgatgcgttcccccctgttcctcgctctcgcgttggccgttggtgccggcgctccgctgtttgccggcgatgccagcgcgcagaccacgcgcgccgtgcgtgccaccgcagagatgagcatggtgctttccggcagtatcgatgtcactccggagggcgtggtcagcgcgctggtgctggaccagaaatcgacactcacgccgagcatcgcctccttcgtcgaaggcaccatcggtggctggcgcttcgagcccacgctgcgtgatggcaaagcggtcgcggcccggtcgccgctgcgggtgcgcctgcgaggaaagtcgatggccgacggcggttacgaagtcagcatgaccagtgtcgatttcagtgaatatgatccgaaggccaccgactcggtgacccgcaagcgcatgactccgccgcgctatcccgaagacgcttatcgcaacggcgggcagggcgaggtgctgctggcggtcaaggtggcgcgtgacggtacggtagccgatgtgatcgccgagcaggtgaacatgaccgtggtcggcccggaacggaccatggccaagatgcgcgacatcctggccaaggccagtatcagcagcgcccgcggctggaccttcaatccgccgaccaccggcgaggacagcacccgcgacagctggacggtacgcgttcccgtgaatttcgccctgggtgacgaccgcaacgcagggctggagcgctatggccgctggcgtgccttcattccgggcccgcggcagaccgtaccgtggcgcaaggtggacccggtcgaacaggccggcagcgatctgctgcccgagggcggcgtctacatggtggacggtgccaagcgcggcctgcgcctgctgacgccgctggagcagggctga

SEQ ID NO: 530118 - DNA, 1017 bp, Stenotrophomonas maltophilia
atgctgcccctgccccgtcccatcgaagagatccacggcctgcaaccggcagacctggccgcgcacctgcccggctggaccacgcccaaggtgatccgagggttggtgtcgcactggccggtggtctccgccgcgcaggcatcacctgccgcggtggtggcccatctggccggcttcgacccgggccagatgccggtcaccgccaccacggcggcgcccggatccggcggccggctgttctacaacgaggacatgagcggcttcaatttccgccgcgaacaggtgccgctgaaagtggtgctggccacgttgctgaagtacgccggccatccgtcgccgccgtcgatctacgtggcctcgaccacgctggacagcttcctgcccggcttcagcgcgcacaacccgctgccgctgggcgtcgccgatccactcaccagcatctggatcggcaaccgttcgcgcattgccgcgcatcaggacgtgcccgacaacctggcctgcgtggccgccggacggcgccgggtcactctgttcgcgcccgaacaggtgcgcaatctgtacatcggtccgctcgatttcactccggcaggacaggcgatcagcctggttgacttccatgcaccggatttcgagcgcttcccacgcttccgcgaggcgctggcgcacgcacaggtggccgagctggcacccggtgatgcgatctacattccctcgctgtggtggcaccacatggaagggctggaggcattcaacgtgctggtcaacagctggtggcgcccggtgccggcctggatggattcgccgatgaacgcgctgatgctgtcgatcctcgcgctgcgtgatctgcccgaagcgcagcgcgcgcactggcatgcactgttcaatcactacgtgttcgacgccgatctgtcgaccagcgcacatattccgccccaggtgcgtggcgtgctggccccgttgcaggccgagagcgccgaacagatccgccagaccctgcagcgccgcctgcagcgctga

SEQ ID NO: 530119 - DNA, 2997 bp, Stenotrophomonas maltophilia
atgaagacgtacacggccgtacctcgcaagacgatgctcacgaccgcgctgctcgcagccctggccgcgcccgcctgggcacaggagacacccgcagccagtgctgctccggccgacccggccacgctcgatacggtgcaggtcaccggcatccgcggcagcctcacctcttcgatgaacctcaagcgcgacagccagggtgtggtcgacggcatcgtcgccgaggacatcggcaagttccctgataccaacctggccgaatcgctgcagcgcatcagcggcgtgtcgatcgaccgcacctccagcggcgaaggctccaaggtgaccgtgcgcggcatcggcccggactacaacctggtgctgttgaacggccggcagatgccggcgtccaatctcggcatcggcggtgccggcctgtccagctcgcgctcgttcgacttcgccaacctggcctccgaatcggtgtcggcggtggaggtctacaagaccggccgcgctgacaatccggccggtggcatcggcgccacgatcaacatcaagacgctgcgcccgctggaagccgagccggtgatcagcctgggcatgaaggcggtcaacgattcgtccaacgacaacctgccgcgcacgctgcagggctccagcgtgaccggtgaactgtccggcatcttcagccagcgctacgccgacgaccgcttcggcgtcgccctcagcgccagccaccaggaacgcgattcgggcttcaaccaggctaccgtggccgagggctgggccaccttccgcggcaacgacgccagcgatggccgcgccctgccgctgccgggccagggctactcggaccgcatcaccaatcgccccggcccgaacgatgtgtacggccgcccgcagaacaccgcgtacaacgtcaacgccgtgcagcgccagcgcaccaacggccaggccaccttccagtggaagccggcggacaacgtgactaccacgctggactacacctatgtcgagaacaaggtgcagcagcaacgcagcgagctgtcggtgtggttcaactacggtcccggcgacagcacctggaccaacggcccggtgtcggcgccgatcatctacagcgaggacatgaccggttcggacgtatcgatgggcgggatgaaactggccaccaagaacaccatgcactcgctgggcttcaacgtcgactgggaagtcaacgacgcgctggacctgtccttcgacgcacacaactccaccgctgaatcgcagccggatggcccctacggctcggccggcgtgctcggtgtggccgcgttcgtgcgtggcaagaccaccgtggactacagcggcgacctgccgatcatccacatggagctgccgcccggcggcgtacagccctcgcaggcgctggtgaccggctcggtgttccagaacagctacaacaaatccaaggtgcagcaataccagggccgcggtacgttccgcttcgccgactactccgcgctggatttcggcgccggcttcgccaaggtcgagaaccgctcggcctcggccatcatgcagcgcaacagctggggcgggctggggacgccggcggactacgatgacagcatctggtatgccgacgacatgagccgctacttcaagtcgttctccgggcacaacgatccgcgcatgaccggccgcttcctggtgttcgacttcgaccgcctgcgcgagcgcgcggcgcaggtcggcaccgaagccgatccggcctgcccgacctgctatgtggcgccgaccgaatattccgaagacatccgcaccaccgagaagtccaagagtgcctacatgcagtaccgcaccagcttcgactggtcgatgccgctgcacgtggcggccggcgtgcgctacgaacagaccgaggtggaatcgctggcactggtccgcgttcccaccggcatcagctggggctcggccaacgagttcaacatcacctacgcgcccagcggaacgttcgtcggtggcaagggcaagtatgactacgtgctgccgaacctggacctgaagctggacatcaacgatgcactggcactgcgcggcagctacagccgcagcatcggccggccgggctggacgcagatccagagcgggtcgcgcgtggatgacatcgtgcgtacccagggcggtaccggctcgcgcggcaatcccgcactggagccgctggtatcggacaacttcgacctgtcgctggagtggtactacggcgaatccagctatgcctcggtcggcttcttccgcaagaacatcaagaacttcatcagcaacaccatcgtgcgcgagaacaccggcaccctgcacacgccggtgggcggcgcctactggaacgaagcgctggcctcgggctgcggcgccaccgacatgccctgcatccgcgactacatcttcaccaaccatgccggcgcaccgggcgtgaactacaccggccgcaattcggccggacagatgaccggcaccatcaccggccagcccggcgacccggtggccggcttcgataccaccgtgccggccaaccagcactccgaccacctgcagggctgggaagtggcggtgcagcacctgttcggccagtccggcttcggcgtggccgccaactacaccaaggtgaagtccggcctgaccttcgacaatctgagcctgggcgaccagtacccgatgatcggcctgagcgactcggccaacgtcgtggcgttctacgagaagtacaagtggcagatccgtgcggcctacaactggcgtgacaagttcctcaacggcatcggcggccagggcccgaacccgaactacaccgcggcctacggccaggtcgatctcaacatcagctatgcggtcagcgaccagctgacgctgagcctggaagcgatcaacctgaccgacgagaccatgcgcacctacgcgcgccacaccaacatgctgcgctatgcgacccagaccgggccgcgctacatgttcggggtgcgctacaagttctga

SEQ ID NO: 530120 - DNA, 759 bp, Stenotrophomonas maltophilia
atggcctggccatggtgttcaccggcgtgcgccacttccgccactaaggggctgagcttgagcaaggactctgctaccaatcatcttcttaccattgcaactacagcccgaaacctttcaattgataggcctttcattgaaggttggaagatcctttttgacatttccgatacgaccgaggcctatcgaaagatcggccttgtctacaagctaattgacgttgccgcccaagaggtcctggccagccaccctgaacagctcgaagcagtgaaccactggaggagccagctctacactggaatgcaagctacgtccgcagggaattggcttcactttatcaagtacatcgatgtccattccatcaactacctgaggttgcaggcgtccctagtccacctcacgatcggtgagatgcaggttgatcgagatgatctgacagaagccaagaaccttttgattcaagccattgatgagataggcgcatcacacttaagcgatcaaaccaagattatgctgataaaacgcattcgctgccttataaccgcgatagaggattattggataactggaaacgacgctattttcgatcaattcaaagctactgtgtacgacttagcggcaaattcagaaattcgcgacaaaggacttggcgagaaactgtctcaagctgctgaaattctcgccaacgtagtcacttcggcaagcgggattcagcagcttatcgcaccgacattgaagctacttggcataggcaaataa

SEQ ID NO: 530121 - DNA, 624 bp, Stenotrophomonas maltophilia
atgaccgttgccaaccgcctgcaggccgccgtcgatgccgaaggggcgctgctgttcctggcccgctatgtgcgccatgcgcgttctggccaaggcgcggcctggtgcgcccaggccgatgtgccgacgctgcaggccgaagccgaggagcgttggggtgagcaggccgagatcctgtcctgggacgtgcagcgccgcgaacgccggcgctggcggcggctggagttcaaggtctacctggacgaggacaagcgctggtatggcgatgccatcgcgctgcatcggcgcgcgccaggcttggctgagctgctgcgggtgatgcacgcacagcagtggctggagccttttgagctgtatctgtacgccgatggcctggatgagggcgcgatcgtgctgcccgccggcggcatcatccacttccagcgctcgcgcggcggtgtctaccggctgctgtcgctgcaggcgggattcgcggatgcaggggcacgcgagcgggccgtgcaggcagtgcgcaatgcgctgcagcgtagccatgactcggcctggctccgtcgccatatcgaccctgggctgctatggcaggactgcctgggccagcccgaacctgccgataatcgcatttga

SEQ ID NO: 530122 - DNA, 312 bp, Stenotrophomonas maltophilia
atgcaactcgcatcccgcttcgcttcccgctccccggtgctgcgttcggaacgtcccttgtcggatgaccaaatccgggccgtggccccgtcgatcttcgccaaggcaccgcacgaaagccgctccgagcggtacagctacatccccaccgccaccgtgctgcaggaactgcgcggggaaggcttcgagcctttcatggtgacgcaaacccgcgtgcgccacgacgaccgccgcgactacaccaagcacatgatccggctgcgccacgccagcagatcaacgggcgcgaggccaacgaaatcatcctgctga

SEQ ID NO: 530123 - DNA, 309 bp, Stenotrophomonas maltophilia
atgaaaagcagccgagtgacgttgtgggcgctggccgccatgatggccgcagtgggcatcgcgcacgcaggggaaatccaggtgcatcgaggcgcttacgcactgcaggccgaagagacgggggccggcccgatcaccgtggtctttgaatccggtttcgggcagggcgcgggcgcctggaaggaggtggttgcctgtctggggcgcgactaccacagcatcacctacgcccgtgcaggactcggcaagtccggcagcgacggtaccccaagcgcatcgatgcgcatctggccgacctcacggcagtga

SEQ ID NO: 530124 - DNA, 1344 bp, Stenotrophomonas maltophilia
atgagtaacggcatacttcaagggttcctgaataggggtctgatcgatgtcggcggggacgatacgaagctcgagaagctcgcgcaggctgcaaaggatttggcgggggcgctgaagaagaatccctccaaagcgctcaattattcgcttatcgcgttcgatcccgatgcgcccgagggcgatcccgtggtccaagaagcgttggtggcgcttcaaaacagatggacaacctaccgcaacacttttgcggcaactccgatcgcggtgatccgggcaattttgcttgatgcgctggtcgacgctgcggaggaggatgaccgggtcggcgtgtgcttcgtcgcttcggcccgcaacgcgctcccgctcctgccgcttgataatgagagaaacatctgggctagcgttgtcgagagcgtcgagcgccgcgtcgatgttcgtgctgaagaggaatgggctacgccagagaccatactgatccagccgttgaagtacgaggtcccgaccctaagtgcaccagaggtcacggtcggcaaggcgtccgagagcagcttgcgcgctggcatgcgggcggccgcaggcccacagtatcaagatcctcagcaaggccatgttgcaacaaacggtaatcaggcttgggcccataatgctcctcaccaatgggttgccgaatttggatcacaatccggaaagcacattgccgccgccatcaacactgccatggccagtatcgaagtcagtcagccggacttgaccgggcctttcagtgcattggcgacagcggtctccggctatgttgacgacaccctaaaacaagttagcgctgcgactgctgggctccagcggcgaacgaatcttctgtggtggcgtgaagcgatgtattcgccctccgttggcaagagttaccgtgaactcacgccctctgtggctgctgccctcatggcgtttgacctattcaaggcggtgccactgttttcgccggcgagcgttgcggctttcctaactgaggcggtcatgcatcttcagggtgtggcaggtcacgacaagcggcctgtttacgacctggttgcagaagcccagagccatgttgaacttgctcctcttcgcgccgtcgctgcgaagcttgcggcgcccccaggtgggcggggaccattacttgccctgatcggtcactccgcgcatagcgactcgcaaaaagaagacgagttccagcggctcacaggcgtaccgtccgactctgctctcagtgctgccgcatgggcggcatggctcttccgggagcttcaggcctcggaggcaacgaagggtgcagttactgccaagcgccgctcgcagaagaagggctga

SEQ ID NO: 530125 - DNA, 969 bp, Stenotrophomonas maltophilia
atggacgattgtccgcttgcgacgtgctttgtccctgatacaggctgcgatcttggccacacggacctgtcgaaatgcccgcgctggcacggtgccaaagcggacgcagctactgacccgaacccttctggtgaaatgttgatgccgtggtcaggcagcgcgttcggtttgtcggacttggggttcgtttcggggcgcgcaaagcctatcgttattggagtcgttgggccgcagaatgctggcaagacgacgctgcttgcggcatggtacctcctgctcgggcgaggcttggctggtatccaagaccaactgtttgctggatcttatactctgtctggctgggaggcagttgcgggttcgatgcgatgggcgccagggcagccaccgcgctttcctgctcatactacaagccgggtcggcagggctcctgggcttcttcatctgacttttcgcgagaagagtggggggcatccggttgactatcttttcactgatgcacccggtgaatggttccagagatgggccatcaatacggattcagacgagggggcaggcgcgcgctgggtgtcagacaacgccgacgcctttatgatcgtcgctgaccgagaggcgcttgcaggcgaatcgatgggtgcggcacgtggtgcgttgcagcgaatcgcgaagcgcctaggcgctgaacgaggaagccggccggtcgctctggtctggaccaaggctgatgtcgacattcggccagagatggaagagggagtgcgtagcgccgtcttggacgcgatgccagatgtggctgagcattcggtgagtgtgattggggcagccggtgacgattcactgccaaatgtgggcgccgggctggtcgagctcttccattgggcgatcagcgtcaggcggccaagtattgagttgcctccaatagcgtcaacctccgacgacccgctgtttatctacgggaatagaatcctgtga

SEQ ID NO: 530126 - DNA, 720 bp, Stenotrophomonas maltophilia
atgaacggcgcggctactaatctggaggcattcgaggccgcgctagagagtctcgacgaaggacttgcggcgggccacactgcgcggtccgttaacgtcgatagtatctggccagtgatcggcacaaacggccacgaggccaatttggtttggcccgaatatggcggtgagcagatcaagtccgtaatcgatgatcggagactacccggtgcctggcaaaagcgagtcgatgaggccgacgcctggctgctgttgattcggcttcagcagactcacgttggcgacgatatgttcaccaagccgctcgcgagcttgaagggcgtctcgatcgatagcgaacgggtacatccgtccgaccaagccaggttggtagagctgctccaaatgctcgtcttttgctttcggtccacaagcagctctaaccgccttccaaatctcggcgtgctcctcacttgctgggatgaggtgcatatcgcagagactccatcggaggctctggaagcgcgacttccgctcgtttcggccttcatacggtcgaattggcgacagcagtcaatcatgggcctatccgcgctcgagcgcccactaagtccaaggactagcgacgcggaatatgccattagagggcccgaacattttggctacgtcgtagatgagaacggtataaggagcagcgaccttagcttacccatttatcgattgctcgacgctgacacctaa

SEQ ID NO: 530127 - DNA, 2508 bp, Stenotrophomonas maltophilia
atgcgcgttgatcaggcgatgtacggcaccattaaaaacgggcacgcgctcagatgtgcgagcggcgacctcgagcttgccaacgaattggcgcagcgcctcgacctaccggacactgagccccagggtgctgactggtcgcctgttacgtcgggcttcgccgtgcgcaaccggtacgttatatcgaggacgttcagcgatccatcggttggccggtcaggaatggtggtcactcatgcgttaatttgcgatctcgacgagattgccgctatagatgatctacgcccgctactcgcgcacctcatcacctcgttcgacgcggggcgggatgccgtagagtcgcttgatgtagcgccgacgctcggactaccgcccacgacaggcgatctcgtagatacagctcgagcgcttgttagccgtggatccggacctgtggtgcgaattggatcggatggcttcgaggatctcatcgttgggctgtggggtcagttgtggccagcgctgcggcggcggctctactttcgactgagctttagcccaaaggacgtgatcgagaagccagagccaacgatcgtttgtacgcccgcctctctcgttgggaggtggcaacagcagcggatcgttggtcgcagcagcatcgagcggtcccgcgcagcagagatgattgacggcatgggtgctggtatcgatctcctgaaatttggtgaagggatcggcgcaaatcttgatgatttcaaagagctccatttgcttgagcaggcatacaccatgcagtctgcgacgcctgacaaagttgggcagcttgtgtcggccgcgcggttgattgagcgattatcgccagatcctatctgcggtgaggccgaaaagcgcatcctagttgagcgtctagtggcggcgctcccttcggctcagccttcggaagtccttaccctgcgcaacttcgcgctacaaggtttcgggaagagcggccttgtctggcaagctctcgagttgtggtttgaatcgaacgattatcgaccctcgcatgactcggagatggtggccatcctatccgatgcgctgatcggggaggacgccatcgccccttggaaggatgccgtgaaacggggtttgggtcgctcggtccttgctgcgggtagcaagattttcagtgggttttggcgctgggcgaagtctgaggttcgcgttgccttgccgttcatcgagctggtcgggcgtgatcagaagggattggagtcgcttgaggatgctgccccgaaggaactggatgccgctactgcgaagctgatcatggcttttgcagcgaagcagaagctctttcgactgcacgctattgtggccagcgccagcatgacaccctcggaggcggcgatggctcagagcgtggcagagccgggagctgatgctggagcgatgcgacttgcaatgcgtcgtgcaaagccccaagagatccttgatgcggtggcaagcatcccggatgggcgaatacttgcgatcgcaggcgagatcgtggcgaaggacccgacacttcttgtaaagcgcgacatgtcgaatgtctcaaaccggagcatatggttgacggcactcaagatcgacggggcagtgtggcgtggccccgaggatccgcggaaggatttcaacaagctacttgacgagcaggtcgatggtggcagcccgtcaatggaactcctccatcttttgtcagcatcgccgcttgcggatctgactgcgtacccacgcaggaacgaggtctggaacaatgtgccagcgactatcagagatcgcatgcttgctgcaaccaaagatacgtggttcgcgaacgcagcggctggcaagcggagtgcagcaatcgaacctgaactggtccaggaaatcctttgcgatccccgtcttgagcagcttctaacgtccttcccatccagcacgctttcagatggcctctatgtgattgatgaactcggtgacattggcaacacgcgattccgccagtgggtatcaacggcggcccgcgcaattagccccctttccgcgttggacgctgatttgctcgggcgcgctctcgctaaccgcaggcagcgtgacattgttgaggacctagtttccctgtaccgggcgggtcgcaaagacgtcaagccggtgctcagccactgtatcgatcaggtcggtgctttggattgctggttcctcggactatcgcccgtcagcgtaactcagaagtgggacgcattcatcgagcttgctgccgaactctttccgaacggaccagaccaggatggtttgtgggagcgggccggtggaagggatgccgatcttcggtatcagggaacgggcaaggagcgttggcgcggcgcgatccgagatgtacaaaacggaaaagtgttccacgtttcaaagctaattcagcaaatgcggtcagattttcccgggaattctagcctcaggctgatagctagtgactcgctgttcaaaaatcataacggccggtcccggtggccgatggagctttaa

SEQ ID NO: 530128 - DNA, 1083 bp, Stenotrophomonas maltophilia
atgacgttcgacaaaggtcgcgcactcatcattggtatagccaagtatgagagtgtggtgagtcttccccccgccgtgctcaacgatgcactcgatactgctgatactctcaagtcgccagattattgtggctatctcgaggagaacgttacagtccttgctgacgatgaggccaccctcgagaagattcgtgaagcactggctgaactcgccgcaatcgctacccctgatgacaccgtagcgattttcttctcaggtcacggcgcacggatcggtcaggggggcggcgcgacgagtgcgcttgttccctacgattgcattccttctgaccttgtgaggacgacactcggcgaagtggagctatccgccgcacttgctgccatcaaagcgccgcgggtcatcttcgtcgtagatgcatgtcatgctgccggcaccgctacccttaagtccagcttgggtggtcatggtgaggaagagatcaacgaggggttcgcagaaaagtcgctacagcgactggcgcaggggagtggccgtgttgtactggcgtcgtcgcgcgcaactgaaacgtccttggtaatcagtcaacagaggaatagcgtctttacgactgcaatgctctccgggctcaaaggcgctgccgctgccgctagtgacggtaccattcgggtatttgacctgtttaactacgtctccgaaagggtgagagagtccgttccgggaaagcagcatccagtattcaaggccagtgatttggaggagaacttcccggtggcgattgcgcgcgacgggctcaaatccatttcggcgcctattgagcagcaccaacgtgcgctcgagcagatcatgccggatctctatccgctcggtcccacggagcaagacatttggctgcgagctggcggcgatgtttcgcgccttaagctgagcggtaacggaagggcacagtggttcggtgcgcttcgcttgatcactcttggcggtggtggtggcatctcacgcgagagcctgatcgatgctgcactggatgagtttcctgctcaccacgagctcagggagctgcgctcaagcgctaactccctttag

SEQ ID NO: 530129 - DNA, 846 bp, Stenotrophomonas maltophilia
atggaagcattcgacgacttgatgcgcgacggttatgccgtggtccgccaagccatcgcgccggagctggtacaggacatcaaccagcgcatcgatcgcttcaagctgcgcaaccccaatgcggtcggccgaaacctggacgagcaccagcgcctgtaccgggtcgtcaacctccatctggtggtggatgcgatcacccgcttgctcaccgagaaccgggcgatcgaagtctgtgatcgctttcttggtgagccgaccaccctctacaccagcctctattacgagcgcggttcggaacaatcgctgcatcgggatacaccgctgttctgcacctccccaggcgagcgctacatgggggtgtggacggcgctggaccctgtggatgacaacaacggtccgctccgtgtggttcccggtagccacctgctgccccccgttgatgtcgccgcactgcgacgcgagctgttcgccgatggcccggttccaccgatgtccagcgaaggctgggctggttatcagaatgccgtcgcccgccagtgtgaggaggcaggcctgcaggcgcaggccgtgcacgtgcagcccggcgatgtgatcgtctggcatccgcaattgttccatggaggggcgccgcacccatcagccgggacacgccgcagtgtggtgatgcatgtcacgccaagatcgatgccggtcggccacatggacgtgttctacggggccaccacgccgccagccaaggcaccctggcgctattaccgccgaggcgaacgcgagatcgcccgcttcggccaggtcgatttcggccacgagtacacccggcgcacctggttcttgcgtcgcgcctga

SEQ ID NO: 530130 - DNA, 1065 bp, Stenotrophomonas maltophilia; identical to SEQ ID NO: 342009

SEQ ID NO: 530131 - DNA, 375 bp, Stenotrophomonas maltophilia
atgagcgaggaagcctatcggctgctttcgacggcgccgcgccgggagggctgcccttatgtcctgccgtcgcccaacgacccggccaagcacctgacctttggcgaacactatggcggctggtgccgggtgctcaaggccgccggcgtcccgcacgtcggcacgcacggcatccgccatcgctcgacgaccgacattgccaattctggcgtaccgaccaaggtggggatgaagctgacgggccacaagaccgtggcgatgttcatgcactacgtccataccgaggacaagccggtgcgcgatgccgccgagctggtggccagccggcgccaggccatcacgggcgcgcgccagcttgcggaggcggcagcatga

SEQ ID NO: 530132 - DNA, 432 bp, Stenotrophomonas maltophilia
atgattcgctggttgttcttggcacttgctgcgctgccgttcgctgccagcgctgtagtcatccgccacgacgttgacgatgatcgataccggatcggcggatccgagtttccggccctggccgacatgcccggcgaagggcagggcgttctgatcgcccccagctgggtgctgacagcggcacacgccgcgccgatggaagggatggggcagaccatcaccatcgatgggaagggctacggcgtggaacgcgtattcctgcatcctggttaccggagaatgcctgacgccttgggcaaggaggcattggcaacgggaagtcctgcgaagatccacgctttcctggccgggtcggatgacattgcattgatccggctcgccacccccgtgaacgatgtgcagcccgtagcgctctatcgcggcactgcctag

SEQ ID NO: 530133 - DNA, 990 bp, Stenotrophomonas maltophilia
atgtcccacccgctttaccgcccgcgccgcatgcgccatgacgagttctcacgccgcctgatgcgcgagaacacgctgaccaccgacgacctgatctacccggtgttcgtgcacgaactggccggccgcaccgcagtaccgtcgatgccgggcgtggagcggctgtcgatcgaagaactgctgaaggtggccgaagaggcgctggagctgggcattccggtgatcgacctgttcccggtgatcgacccgtcgctgaagtcgctggatgcatcggcggcgtgggccgaggacggcctggcgcagcgtgcgatccgcgcgctgaagtcgcgcttcccggagctgggggtgatgaccgacgtggcgctggacccgtacaccacccacggccaggacggcatcatcgatgacaagggctatgtgctgaacgacatcaccgtcgaggcgctggtcaagcagtcggtatcgcacgccgaggccggcgtcgacatcgtttcgccgtcggacatgatggacggccgcatcggcgcgatccgtcgtgcgctggatgccgacaatcacatcaacgtgcgcatcatggcttactcggccaagtacgcctcggcgttctacggcccgttccgtgatgcggtgggcagcgcggccagcctcggcaaggccgacaagaagacctaccagatggacccggccaacggcgacgaggccctgcgcgagatcgcgctggacctggaagagggcgccgacatggtgatggtcaagccgggcatgccgtacctggacctggtgcgccgggtgaaggagacgttcggcgtgccgacctttgcctatcaggtcagtggcgagtacgcgatgatgaaggccgctttcgccaacggctggctggacgagcgcgcctgcgtactggagtcgctgctgggcttcaagcgggccggtgccgatggcgtgctgacctatttcgcgccgcaggtggcgcgatggctgcgcgagcgctga

SEQ ID NO: 530134 - DNA, 1983 bp, Stenotrophomonas maltophilia
atgcgcaggattgtgctggctgcactgttgggagcggctgtgggtggggcatcggctgcaacgctggacctggatcgctatctgcggcaggagtcgtttaccgacatcaagatttcaccggggggcgagtacatcgccgcgacggttccgctggaggcgggaaccgcgctggcgatctatcgcattgccgacatgaagatggtcggcagcttccgtccgccccgcaacgatcacgcccacaccttcgactgggtcagcaacgagcggctgctggtgggcatggcacagaagttcggcgtgctggaccggccgacgccgaccggcgaactgttcggtatcaatgccaacggcaagggcggcgagctgctggtggggtaccgggttgccgaccagagtctgggcaccaacatcaaggtcaagccggcaggactggtggccgcgtacctcagtgatgaactcaaggacgatgatcgcaatgcactggtgaccgtgatcccgctggtcggcaattcgcacgcacaggtcgagcgcatggatgtggtcaccggtcgccgcaacgcggtggcacgggctcccattcccgatgcggactttacgatcgatgagcagggcgaagtgcgtttcgcacgtgctgtcgttaccgatggcacgcagaagctctactaccgcacaggcagcaacagcgactggatcctgctcaacgatgaatccttgagcaagcacatcgagctgcccctgggcttctcggccgacggtcgcctggcgtacctgcaggtcgagcaggcagacggacctgatgccattgtcagctgggacccccagagcaatgaacggcgcaccctgctgcgcgatgagagcgccgaccccgcgcgcatcatccggcgccccggcagccgcgtgccggtcggggcactgttccttggcggtgcgccgcgaacggcattcttcgatgacgcctcggacgaagctcgcctttaccgcagcctcgaagcgggcctgggcggcgcggcctacgtcacctccagtacacgcgatggcaagacggtgctggtggaaacctggtcaggcagcaatccgggcgatttctatctctatgacacggttggcaagcgtgcacggcacctgatcagccgcagcgactggatcgaccccgcgctggcggcggaggtgcgtccgatcagcctgaaggcgcgtgatgggcgtccgctgcatggcttccttaccgtcccgcatggccgcgacgcccgtgcgctgccgatggtggtggtgccgcacggaggtccgatcggtgtcgccgacgatggtggctatgacaccgaggcacagatgctggccgcggcaggttacgcggtattgcaggtgaatttccgcggctcttccggctatggccgggcccacgtgcaggctgcgcgcaagcaatggggactgtcgatgcaggatgacgtcaccgatgccacgcgctgggcgatcgaacagggcgtggccgacaggaaccgcgtctgcatctacggggccagttacggtgcctatgcggcgatgatgggggcggtgcgcgaaccgggcctgtaccagtgcgcggccggctacgtcggcatctacgacctgccgttgatgtacgcgcgcggagacatccagagcgatgagtcaggcctggcctacctgcgcaactggctgggatcgcccaaggatctggcagagcgttccccggtgaatctggccgcgcaggtgcgggtgccggtattcctggccgcgggtggccaggaccagcgtgcgccgatcatgcacagcgaacgcatggaagctgcgttgaagaaggccggttcgccggtggaaaccctgtacgtcaagaacgaaggacatggtttctattctcccgccaatcaacgaacgtactacagcaggttgctggccttcctctcgcgcagcctggggggacaggtggctgggcaggcgacgcctgcggagaagagcagcgcgccctga

SEQ ID NO: 530135 - DNA, 216 bp, Stenotrophomonas maltophilia
atgttctacaccaccaagtcgcgcgacaacatccgcaaggaaagtgacatctcccgcaaacaacgtcacgtcctgatccagctttacaacccagcgaccatcacgcgagaacaaaaaatgatcacgcaggaagtttccatcttccagccagtaggagcgcaggccatccagacctcgctcaatttccacggggtttccgccatcggagctctctga

SEQ ID NO: 530136 - DNA, 459 bp, Stenotrophomonas maltophilia
atgaagaaccagaagggcttcaccctgatcgaactgatgatcgttgttgcgatcatcgccatcctggccgccatcgcgttgccggcttaccaggactacaccatccgcgccaaggtgtcggaaggtattgtccaggctgatgctgccaagctggcagttgctgagaccgctcagtcgcagggtatcctggcgaccaaggtaaccaacgaagaagctgcaggttatgtcagcaaggcgaccaccaacgtgaagtcggttggcatcgcaaatggcgtgatcaccgtcaccactcaggccacgggcgcgaaggctgatccggttctggtcctgaccccgacccagactgacctggactcgccgattacttgggcttgcacctacacttcgggtgaagctaagcacgttcccgccagctgccgcaccaagggcgctgcaccgtcgggcggtagcggtagctaa

SEQ ID NO: 530137 - DNA, 462 bp, Stenotrophomonas maltophilia
atgaaagggatggggtggggcctcatcggcgtgctggtggccgccggttggctgctggaaaccattggtgagtcggcttttaccgtcgtggtgtggatcgtcgtgggcttgttcctcttggctcagatcgcatcactgctgaccaagatgggggggcttcgctctccgacagccccggcgcccggtcagatgagccctcaggacgaacggcggtggcagcgctcacgccaacagcgcgaccgcgggattgccgccttgttggtcgccatcgagcaacgcgacggtgtgtccgtggagcggttggtgctcctggaaaacgtgagcccctatgagtcaggccggtttcagggccgccggcttatcagtgcgcatgccttggccaaggagcggggattcgacgaggcgattcggttcttcgacgcgtggacacgcaacgggagcgacgcccgattcggcgaatga

SEQ ID NO: 530138 - DNA, 894 bp, Stenotrophomonas maltophilia
atgaagcactttgtctggtccggcgcgttggcgctggcgttgattgcagagcaggcccacgccgatccggccaagctgggttccacccccgcgccggtggtgacggtgaaagggcgcagcgtccaggacgttcagaacgccatcgtggcgatgatgctgcccgcggggaagacccctgtccggcaggatcagaatgtcatgatctacgaattcccgctgtctttctggcaatccattggcgtgcagatggcgcaggggaacagcgggtggcaggagcccaaggggcgcttgaccttcacgatggcccagatgggttccgacgtgatggtgagcaacaagttcgagaccgtggccaccaacatgttcaacgccagcaattcggtggagatcaccaacccggtggtctacaacgagaaccacctggggttgcagctggtggcggcgttcgctgaggggcgcatggttcccggcgagcacaacgcgttgggtatccaggcctacgaaaagcccactcggaagacgcgcaaggtcggtgcagttatcgagacgctggtgcccggcgcaccggccgaacaagccgggttgcgtccaggggacgtcatcacccacatcggcggtgtccccttggccgaacaaagcccagcaaccatccagttgctcggttacctacagatcggagaggccaacctgcaggtgctcaacaagggcgaagtcgtcgtgcacaagcggttggcgcccaacgcgcctgcagtggcccgagccacccccaaccctgcccccgcagaggccgccgttccggccgcttccgtggttccggatcccgtgtcgcccgctcctgcagcgtcaacgcaggaaagccgacagggttggtggcagaagcagaagggcgactga

SEQ ID NO: 530139 - DNA, 315 bp, Stenotrophomonas maltophilia
gtgacgctgacgtccaagcctcccttgacggccgtgctgccgaaagtgtccctttcttcaaccttgcgccaggcattggccgcacgcgctagagcagccggggtgagcgagagcgaagccgtgcgccaatggctcaccgcctacctggcgcgcccccagctgctgcgctctcccgttgccggccccaaggacgaccgcttgccgcctatccgggcttcccgagacctggccgaccgcgtccgccgcgaggcgcagcggcagcacgtgagcgtggcggaactcatccgtcgggtggttgcgttccacgcgttctga

SEQ ID NO: 530140 - DNA, 639 bp, Stenotrophomonas maltophilia; identical to SEQ ID NO: 511396

SEQ ID NO: 530141 - DNA, 777 bp, Stenotrophomonas maltophilia
atgaagctgctgagcgcattgctgtggtcgtcactgctggccacgatggcgccgtctgcgtgggcgcaggccaataccattccctcgcagccgcacctgctggtgaagggtgagggcgcgcgaacggtgatgccggaccggttcgcggtcgaactgctggtcaagtccaccgatcttcagccggatacagcgcgctcgcgcgtgcagggcaatgtcgatgcagtgttgagtgcgttcaagcgaaaccatgcactgccggaaagcgtggtagccgacaacctgaccatccagccggactaccgctatagcgtgcagggcaagcaggaatacctgggcacgcgggtgagccggcgcctgaagggcagcttcggcaccaccggtgacctgcaggccttcctgcgcgcggtcgatgccagcgaggacctgcagatcagcagcatgcggcctggctactccagggaagccgcactgcgtggcgaactcaaggccgaagcggcaacgcagacacgcgcctccgccaagcaccttgccacggcctacggcgcgcgcatcaccggcctctacagcatctccgacgtggccccgaacttcgcctacggcgtgcaggcaggcagctggccccgcggtggtgacatggtcacgccgcccagcccgccggctccggcgcagaccagcatcgagacaaccggcgcgcgcgcgcgcgaatccatcgaagccggccccatcacctacaccgaaaacgtatacgccattttcctgataagcgacggaacctga

SEQ ID NO: 530142 - DNA, 1095 bp, Stenotrophomonas maltophilia
atgagctatattcaagtagttcagcatagtccgatgccactccgctggtggtttgagcaaatgcttgcaggaaacatcgatctcgaaccgccttatcagcggagatcagatatatggacgacacagaagaaggcacacctcattgactctctgatcaatgatttcgacattccaaagatatacgttgcggattttacgcgtgctcgatcccctttgaatctaagcaagcaaccctacgctatcgtagatggcaaacagcgattgaaggcaatatttgacttcatgtcgggaaacatcaagttaaatcgctcaagtctttggctagaaaatccggacgctcagattaagggacttggcttcgctgaacttcgcgaaaagttcccttctctcgcactgaagattgaagttttcgagccagttgtcatgagcatcgctaccgatgacgacgcgaagatctacgagatgttcgttaggctaaatagtggtgaggcagcgaacagtgcagagaagcgcaacgcacggccaggccctattccgggaattgtcagacagttgacttcgcatccgttcttcaccaatcgagttagatttaataagagaagaatgcaagagttcaacttggccgcaaagctgcttctgattgaacatagtggcgctctcgttgacacgaaagcgaagaatctcgaccgattggtagaggatgccgcaaagtccgttcaggacgccgacgtcaaggaacgcgagcagatcatctcgagctatgaagaactgcagggaaatgttcttgatgtgcttgaatacatggcggagggattcgaggagtccgacgcacttcttgcgagagccggcaatatccccgtttactactggctaattaagcaacacccagaggtgacggacaatatccgagactttctgattgaatttgaacttaatgtattaaatgcgatgcgcgccgaaagggctggagcacctgcggatcaggaaatgactcgatactacactctttccagatctacaaatgatcagctgagtctacgcggaagatatcagatactagtaggtgctcttcgaaggaagaggcttatcaactag

SEQ ID NO: 530143 - DNA, 855 bp, Stenotrophomonas maltophilia
atggcacatgtcgacgtgattaaagcaaaatccgtctgggagtacgctaaagccgtagaagatttgttgaaagccacccaaaccagaactggtgaaatctccgaccagaattggtatagggggcacgggcggtcagagtcctttgtactaaagcctacgctatacagacatccggatcgggtgacgctagagtcactccttgatctggaaacagagctgatgcgtgcctttatgagccaccatcttctccacaccttgaccgcaggggttgatcagtctggaaagatggacactctgttttacatgcaacactacggcgtcccgacgcgacttctcgactggacaaacaaccctctcattgccctctacttcgcggtatcagatgcgcgcatagacagaaatacagggaagtatcctgaaggcgtagcgatttgggttctggaccctacatcttggaacctaaaatcgttggaggatcttcgtccgccaaggggcgccttaaattcaagcgacgggaacttggagtcctatataccgagggcaccatggaaagccgcagacaggaagggcatgtatctagagcccgtcgccatttctggcggcgcgaacacccagagaatgctcgcgcagagaggtgtttttaccatgtttggcgctgacactcgtgcgatggatgagctctatgacgtgaacgcctacccgagcggctgccttaccaaagtcgtgattgagcccgatgacatcaagcccgttctggacactcttcatgcaatgggctatacggattcagtagcgtaccctgatcttcacggtctggcactggaacttaagcgactgaacgggttcaacctatga

SEQ ID NO: 530144 - DNA, 828 bp, Stenotrophomonas maltophilia
atgtcctggacagactacaaattcgacttccttagaactgtatccaaacagctcattgaagagctaaattcattgaagaagacagagctaaccgacgcaaaccttgatctactttctgaatttcagaaggaaaagaaactaaaggaaggcgtctacatactttacctagatgattctcccgtctatttgggaaaatcagataacatacgcgagcgtctacatcagcatatttcaaagctcagggggcgcctgagcggcgagtttccgatggacgtttccagggtcttctttaaggcgcttttacttgacaacagcatgagtaccgctgccaatgagaagctgttgatctcagaattttccatagagcatgaaggactatggaatgggaagggatttggccccagggatccaggcgtacatcgcgataccacagagcccagctactttgacaagacctatccgataaataagtcgatcgaagtccctagaattccagaccgtatcagcatcggcgaacttttttcaagaataaaggaatttgcaccttttgtatttcgatacgaggtcattcccggcgaagtatctgagaaatatctagacttgaatgggaaaagcaggtccgccgacgcactagtatctttcgcgataacggcgttccccccgaattggcattacgcgatcgtaagcttcggcatggtcgtctatagctcgagaagagcctattggcacacgtcaatcgtgggcgtttctcccggctcgccgccaccacttccgcctttgaagccaaaagaaaagaaggccaaggccaagagcaaagcgagaaattga

SEQ ID NO: 530145 - DNA, 3348 bp, Stenotrophomonas maltophilia
atgcctcgcaacggacctgactttcaagaccatcacgcgatcgagcagcgtacgctagcgcgtagcccactgctcaggatgctcgccgactccggtcattttgatatccacgccccggagaatcggatctttctcccggctgatccggcgtttgctcaaacgctgggaatcactccgcacagtggtggccctatcgccgactatcagatcggcctcctacaacgtttgcgtcgcttggagcagacgtccgacggagtggccgcgttcaacggagacgctgcggcacaggcgcggatttccgggcgggtagaggcactgcgcgacacggtacgggtcggcctgatcaatggtgatctctacaccaacgctccctatggtctgaagcctgacgatattcggccacaggttcagagcttcttcttcaacgaagcccgttatggccagttgaacgctccccagcttcaacagcttaggagcttcacgccgatcgatagcggctgggcgggtgttactcattcggagcatcgtgtagtggccacgctccggcacattcagtcatctcccaatccgttaacacgtggaggtggagcggagttgcagcgtcaaggcctttcggaggcaatctccagcgcctaccacggtggcaggctgagcatatcctcagagggagtcctgatagttgagaatgctctgggtaaggaagcggcagacccattgcgcgttccgcaaggtcagcgaggatttgcaactaccagcatcctcctcggcgaagcctccaccagccaactgatccgctcagggggcctgctcgcctccggcgccgacgccgtcatcaccgcccgccgcacctcgcagctgctggaagaaggcaacggcaccgccgcccagtccgaactcacccacgctctggcacgcaacggcggtggctgggtcggtggcatggccacggcatcggtgatcgggacctccagcttcgtccctgcggccatcgtcgcgggcgatgcgttgctgatgagcaaggcgttcgacaggggcgccgatctgctcgacaaccgcgccgtctaccggcagaccgacaaggccgatgtcagatggcagttcgatggccgcaactggcagcgccaggcggtcatggacagcgcgggcgacggcctgggcaatccggctgagcgcagtgtgggtgccagttacgagaaggcccgcgagctgggtgcgtacgcccacgtaaaagcggtagagctggcgctgggcaaggcgccgccgccgcaggatcctttcagcatcccggcgaaggatggcgagagccgtctggacaaccccaactggcaccgcgatgcgcagaccgaacagtggacgcggcaggtcaagattggcgtgtccggtgccaacgaccggggtgtgtatgagacgcagaccgccagccccgaacgcgccaacgagttgaatcgtgaggcggtgcagcgcatcgagaacaacatcgccaacggcaaagccgccattgccgccagctacctggagacctacgccgctacccgtgccagcgacttcgtgccgctggtgccggaagcggtggagcaggcgcgtgccaggcccgacgccatccagggctcggacaaccagctttaccagcgcaatgacgcaggacaatggcaccacgctggccagatcgcgcagggcaacatggcgctggagttggagctgacccgcaccatccagcagccgtcgctcgatcagttcaaccagaccattgccgcattggaatcgcggccattgccgtctgcggcggaagtgaaccagaacgagctgcgccacagctactacgctgcgggcgttgcgctgtcaccggcatgggagcaagcgattgccctggccactgcgcgcacacgcgagcagcacggcataaccggggccacgttgcaggagctggggcctgtagccgagggcagcgccggcgcctcccgacccatcacccattaccaggtaggccaggatggcgttgcgcgcgccgtcgcgaccaccagtacgctggagctgcaggcggcatggaatgaggtgcgggcgcttgccaatgggcaggcgccggtgccggactcacccgagctgcgcattgccgcgctgtcggcgagtgagcaggaggcgtaccggcaggcaatgcaggaggcaaatcggctgggtgctgcgcaggtggatgcagggcaggctgcccgagcggccgcgcaggtggcacatggcgacaagccatccgagcaggatgggaacgtggaagtgcggcctgaagagccggcgactgcgcaacccatcgcggctgcgacggttgtggcggcgccgcccgcgaaggcggtcacgccactgcctacgcccgccccacaggataagcccgcgcctcagcggcacgccgagcagcgcgatccgccgcggcgtgaggcggagccccaacctcagccccatccaaacagcgaggcgcccaccgaaaaccgtaccgcctcacagacgccggagcctgctgggccgatgcatccgcacccggccgcacctgagcgcgcgacgcaacatgccgccgcgcctctggatgcggcaacgcaggcgatgcccacgcagcgcacagagcaggtaccggagccggagcggatggccgcggtgcctgcggttgctcccactccaaagcaggacatggcagtgcaggaggtggaaccggtgcccttcaaggagtcgctgcctgctgagcctgcgcgcgatccatggcctttggagcaggaagcggcacaacacgtgccagagcccgaaccggctccattggatgacctccagcccgtcactgcggctgtccctgttcctgccgagcccacgacagcgccaagccctgagccagccgcgcccgcaccggatgaggcatcggccccgaaccgggcgctgcaggaccccacgcagcccggccaccccgaccatgcgctgtatcagcagatccgcgacggcgtggaagcgctggacgtcaaacacggccgcagcttcgatgaagtcagcgaacgcatgactgccagccttctggtactggccaaggacaacgacctggaacgggtggaccatgtgctggtgagcaacgctacgagtgaacatccggccgggcacacgcttttcgtggtgcagggcgagccaatcaatccggcccatcagcgcgctgcgatgcctaccgagatagcggcgcagacaccggtggaggaatcactgcagcagttcgatgcggtcagccgtgaagcgcatcagcgtgcgcttgccgatcagatggaccagcagctggaagatcagcgggtgcagcacgacatccagattcgtgcggccagcgggggatga

SEQ ID NO: 530146 - DNA, 777 bp, Stenotrophomonas maltophilia
atgaacattgcgatcaccggccctgagaaattcttactccaggacatgatctgcgttgaagcagcattggctctaggccggagcggaggttgctcactggtacctgagcccgaggcgggagaggacgctcgtatcgtttggccaggcgccacgccttgtacccttgaagtgcaggtgaagggaggctccgaggctctctcagtgtccaagcttgtagagcacctggcccactaccccgccagaaaagacactccatccctgctacggcggctgatggatgagagcgagacctacgccgcgttcgtactaagctctagggtctgtgacgacctagtggagcttttgacgccccagaaccgcttggacaggccgcaggccaggcacgcgagccggcgcctagccaaggccgttcgtcaagcggtcatcaatcagtccgcctcgactctgaagaaagcagcagatccgaaggaaaaggtaactgcgctggatatcaagcgcgccgaagaacaagccgatgttgcgctccggagcgaggagcacttccgccaagcccttggaaagatagcgctggtcgagcgcgagacagcagagtctgtagagatcagactgcatagagtcctgcaggaagaacgattcgacacgccctctattcgagggatcattggccggctcacagacaccatcactcaggcgaaaagaagccagaaggacgttgtccccgacttcctagagttgctaagagtacatgccccagcccagcttcagcccgcaaactag

SEQ ID NO: 530147 - DNA, 702 bp, Stenotrophomonas maltophilia
atggaaggctttccgcaaaaaaatggacgccgtatgcgacaacaccaaggcatgatggtcagagtgttgcgaatcctctccgtggttgtgcttgggcttctgattatttcagcaaccgttggtgcgtactacttcattgttggggctgcgcatccactgtcgtccagtggcgaggactgggggaattttggggactacttcggcggcgtggccggagcattgctctctttcctgagcatcgtgctgcttgtgtacacagttcatctgcaaattcaccaactctcagccgcccagcacgagacgctaaagcgtgatttgctggcccatgtaacaaaagccgatgatgagattgagcgatggcttcagcgaaagcttgcttacacaagcatgtcagggcagacggtagagtttggcgatgtcgtatgggggattctaaaatccgaggacatcaatccaccggaatttgagcgagccgtcgttcgtctccatgtgctgacaagcctctattgcgaggctctggccctctacagggacaacatcgacccttacttcattttcaagtaccacaaacaaaaggctcaggcgctgcttgacttcctaaaggggcacagagcactgcttggtcagatggccgggccatcattgcagttctgccagatgcacctagacggcaagcatgagtccaggaaagggcaggcatga

SEQ ID NO: 530148 - DNA, 561 bp, Stenotrophomonas maltophilia
atggcagacctccaccagtccacgaagatatctaaatcctgcactgtcacccgttacctgtccctacaagatgcgcaggaccgtagcgcgattgcggattttgtcgtcgagcgctttacggagcgctatttggaccccatcgaggcggaccccgccaagaagaacggattcaccatcatggctgttagctgccttatggtcgaatcgctagagtccttccgtcgcggctggaaggacactcgcaacaagtccgagcaggcgttcgcgtccttcttctcccactgggaccaattcgccgagttccgcaccgtctcggcggatttctatcggcatgttcgctgcgggattctgcaccaagccgagactaccggcggatggcgaataatccgcacgggaccaattcgcaacaacaaaaccatcaatgccaccaagttctcaggctcactccggcatgctctaggcggttatgcatcatcgctccgcacagagagctgggagtcagagacatggaaggctttccgcaaaaaaatggacgccgtatgcgacaacaccaaggcatga

SEQ ID NO: 530149 - DNA, 570 bp, Stenotrophomonas maltophilia
gtggcccatcacattagacatagcttggcatggcattaccacaatgatgctcgggagttccttcgccgctatggactattgcggccagaggatttcaccaaatccgggcgggtgaagaattttgtggacgtgctgctagctgctgagtgcgctctcaaggcgcacatcttcttgggaaagagtcaggccgagccgctgacgctgtatcgagaggtccgaggactcggccacggcattcgctcccttgccgacagggctgactactcggacgacagagagccgtacaatgccctctccgctcgctttgaccagctatctgtcaatctcaggtattccctcgacatgtgggagaccttcttccctggcttagggggcgaagaccaagtcgcacgatatgacaacaccgtggccaacacccaatggcgggaagcagcagttgccgaggtgcagcatctggttgagatgctacgcgcggagctcaccagggagttggactgcgggatagatgatgagttcagacagatgttagagatggctgagttcgtgcgtcaagccaaaatcattcgctag

SEQ ID NO: 530150 - DNA, 300 bp, Stenotrophomonas maltophilia
ttgcgaccgctctttccggcctgcccgacattagcctgggagcgcgagcgcggtgaagacgcacaccagctgatgctctgccagatccatcgcgatgagttgatgcaggatggcgcgaagaacgatgcctaccagcgcgccaaggcggtctgcgatcttctggggcgtgagtacaggaacaaatgggatttcgatgcgcaggaggcattggcggcatcggccgtggatctggatgagctgatccggcggggagacctggttgaggtgcctcccacaaggcgggaccgcgccttcgagtga

SEQ ID NO: 530151 - DNA, 237 bp, Stenotrophomonas maltophilia
atggaaaagacgcgtattgacgtctacaagcgcgtaggtgacttctggtcctacaggtacaccaaccgggctggcactgttgccccttcggatgtgtggaagactcgagatgaagcacttgatgtcgccatggcggtagctgaggagaggttccgcgagcatggcgaaagtgtcgaggtgtggctggaggaaatggggcggtttgttccccataaccatgggttcttggcgctgtag

SEQ ID NO: 530152 - DNA, 984 bp, Stenotrophomonas maltophilia
atggaacttagaaaggaaatacagcgcaaccctgtttctgacgaagttcaagctcttatcgctgtcacaattcccattcttaagggggtacttttcgcggtcaaggctgaggctgtcaacgatgcgggagggctggatagggtgctgcttcggcagttgcctcgcatctatcgccctggcgatggtgattgcggcatcagcttcgagtacgcggttcatgatgcaatcgcaaatgcaaatccgttgatactggatcgcgtttcgaccgcgctgagagatcactgccgcattcgaggggcagctccctcgtctatcctctttggggcggagaagaccggcgcagtgcagctcatccagactgccagagacgtgcttactgatgagagtcgcctgttatctggtagtagaggtcagccagttaaattgaggcgtcacattgattcggtcgctgctgcgtttaggcgaagtgcggttagaaaggacctgcctgactcaatcaacggtttgtggaaggcagatctttttgtcggtgacaccggccccgatcagtgggtcggcacaacggtaaagatcaatccccggcatctagagggtgctcaagggcttaggcttgcaatcgtgccttcacagcaaggacggcacgatcagattaggcgtgacgatcatcgaaatttggtcgtggtgccacttccatacgatggttcgttcatggaggtcttctaccaaggctggcaaatcgttcagcagttcatacacgctgatgcacaggtgcctcgggaagtctcgctcccgcgacctgctgaccgccaagtctgtcgcttcttggaagagcggcgagactatccgatattggacgtactcgcggcactcatgccgcttgctcagcctgaactccttgcaacgcaagagggagacttagatgtctcgctgactcgaggacagggtagtgaaaccggtctgattattgctccggttgctgcatga

SEQ ID NO: 530153 - DNA, 4011 bp, Stenotrophomonas maltophilia
atgaacagaatctaccgacgtctatggaatcgagcccgacagtgctgggtggtggccagcgaactcgccagttctcaggggaaagtgatgcgaggcggccgctgctcggcgttgattgtctctctactgttgacgccgacactggcccaggctgcaacgtctccaagcgaagaaagcgtggaagccatgaaagaagaacgtgcgctgcaatgggcattcggtctaccgatgacgccgcaatcagccattacggccggtcctacgccagtgcgccaagtgtcattgacaaccgactattcgtatcgagactccactgtgagtggtgaccacctggttgtactcggctcgcgctctagcctcgtgggcagtacctctgtggggtacggaaacctgatcgagtcccgcggcgaccacaacgtggcggtaggcttcggcgtaaaggtcaggcagggctacagtaccgccgtgggtggtagcgcgctggccgatggcgtcggtgcgaccgcatttggcaacaacgcaaaggcctacaccaacaactccattgccgtgggtagtggatcctccaccgacagtggtgcaggcatctcaaagatcgccatcggcggcgatgcacgtgccggaaccggtggctggacaggtgcgatggcgattggggggaattccagcgctacgcacgacagcgtcgcgctgggctatcaggcagtcaccaccaccactggcgcggtggcgctggggcgaggctccctcgccaatgaagccaacacggtatcggttggcaatgcctcgacaaggcgtcgcatcgtcaatctcgctgatgcgcgtctgaacaccaccagtactgatgcggtgacaggcaagcagttgaatgcgacaaaccagaatgtctccactgcaacgagcacagccaatactgcacgcacgacggccaacaccgctaaaaccaccgccgacagtgcgcttgccagggcgaaccaagccaccgacctgatcagccagacggccgcaaatggccaggtgcgattgggcgcgaacaacaccggtactgtcatcgatgtaagcaacaagagcggcgccaagcgccgtatccagaacatcgacaatggcgtgttgagcaccagcagcaccgatgctgtgacgggacggcagctgcatgctaccaacctgggtgtcaccaaggcgcaatcaaccgccgacgccatcagtacacgcctcagcgcaacgacgctggccgtgggctccggcgccagcgcagcgggacagtacgccaccgctaccgggcacaacagcaatgccagcggcgagcgtgcctttgccgggggcgtgaacagtgtggccagcggtgcgcatagcagtgccatggggagtggtgcgaaagcgacgcacaccaacagcgttgcattgggtgcaggttcggtcacgtattccaacaattcggtatcggtgggcaacaccaccaccaagcgcaagatccagtacgtggccgatggtggcgtcagcgctggcagcaccgacgcggtgacgggcagccagctttttgccaccaatcagaacgtggcagcagcccaaagtacggccactgctgcgcagacatccgccgcagcggccaagagcagcgcggataccgcgctggccaaggcaaatcagctgggtggtctggtggggcaggcagccgtaaacggcagcgtcaggctcggcgccgagaacacgggcacggcattggacgttcgcaacaaggccaacgccaaccgaaccatcagcggcgtagcggatgccggcttgaccaccacaagcaccgaggcggtgacgggccgccagttgcatgcgaccaatacccaggtgaccactgcgcagaacaccgccaccgccgcgcagatcgcagcgaccggtgccagaaccgtggctgacaatgcactggccaagacaaccgcgctagatggcctggttcgccagacagccgccaacggcagcgtgcggctgggcgcagagaacactggcaatgtgctggacgtacgcaacaaagccaacgccaatcgcaccatcagtggcgtagccgacgccgcgttgagcgccgccagcaccgaggtagtgacaggtcgccagctgcatgcaaccaatacgctggttaccaccgcgcagaacacggccgtcggggcaaagaccactgcggatgatgcgctgggcagggccaccgctctgagtggtctggtgggccaggtgtcgacaaatggcaacctgaggctgggtgccgacaacaccggcaccattgtggacgttgccaacaagtccggcggcaagcgccgcatctacaacattgccaatggtgtactcggcgcgggcagcaccgatgcggtgaccggacagcagctgtacacgaccaacacgaacgtggagacccagcgccagacgctggccgcgcattcgttggcgctgtcggatcaatcgggcctgatcgccggtaaccggagtgatctggatgcgctgcgcagtgagttcgacgacttcgatccggatctggaaggcgtggtcaggtttgaggccgatggtgccatcgatttgaacggtggcaaggtacgaggcgttgcagcgggggatatcagctcggcggcgagtaccgaagctgtgaatggtgggcagctgtttgcgacgaatgagcgtattgcatcgatggagcaaggtggccggttcttcaagattggcactgacagtgaaagcgaagatgctcacgctggttggttcggtatagccatcggcgagtcggcggaagcttcccggaccggcgagggcggcacggcagtcggggcattcactaaagctctaggtatcaactccgtggcattggggcgtggcgccttcgtgcatgaatctgcgactcaggggtttgcgctgggctccagttcacgcgtggacgttgcaggtggcgtagcgcttggttctcaagcacgggtgacggcgtctgcgttgaacggggtggccctcggctacggctcctttgcggatgaggcgaataccctttccataggcagcgaacatgtgaaaaggcgaatcgtcaatgtgggccgcggtaccgccgagcacgacgccatcattgtttcccagctcaacgaatcgcttggtgccctggggggaggtgctcacctggatgcaagcggtgatgtcgtagcgcccacctactccgttcaaggtggcactcaaagcaccgtcggagacgcgttggttgctctggatagtgccgttgtcaccggatcgaaccgcattactcaggtcgagtcccaactccgctctgtctttcaagacagttccaccctccgctccgacgggctgaaccagctcaccttcgccggtgccaacggcatggtgctctccaacgtcgccaacggtgccatcgccgccggcagccgcgacgcggtcaacggcggccagctgcattccctgcagcagcagctcaacggccgtgtggatgggctggagcaacgcatcgatggccagccacagtcgcgctcactcagtgtggcctcggtggaagcgccgtcggctacgccagcacactcgccggtagccgatgagtcggtcacgccgccggcggcagatacccccgaggccgacaccggcgctgctccaccggtggccccgcaggccaacagccccaaggtcgaatcgcccacgccgcaggtcgataccgctgaactggagaagatgctggcccgcgccaacgaatacaccgatggtgccatcagcaacttcgaacgccgcctggacaagatggacaagcgcttcaaccgcatggcggcgatgagcagcgcgcagacggccatggccatgaacaccgctggcttggccacctacaaccgcctcggcgcgggcgtgggttatgccgaaggcgaatcggccatggcggtgggctaccagcgcgtgctcaacgaaaaaggctcagccaccttcagcctcaatggtgcattcaccaacagcggtgaacgcagcatgggcgtgggtgtgggcatcggctggtaa

SEQ ID NO: 530154 - DNA, 705 bp, Stenotrophomonas maltophilia
atgaagatcaccgccctttgcctgattcccatagcgctgctgatggcactgcctgcgcaggctaacctcaccgtccacccgatgcgcgccgcggtggatggcaagcgtgccacccagatccgcatctattcccagtccacccagccgcagtacatccaggcaacgctgcgccggatcgtcgatcctgcaggtgccgaagagagcgaagtagagatggagccgagcgaggccgccatcgctgttacccccggcaagttcgcgctcgcaggcggtggcaaccgcctgatccgtgtcatcccgctgcagcctgtgcagcaggaaaccgcctatcgcgtttacttcgaaggcgtgcgcggtcctgaagagacgtccgcaccagagggcgagggtgcccaagccaacattggcgtgaaccttgtctggggcgcgctggtgaacctgctgccgcgcgatggaacggtgctgccggtggtgcatggcagcaccctgcgcaatgacggcacgctgcgactgggtatcaccagcatcgccgattgcgtaggcaatcgctgcactgcgcatgacgtctcccgaagcctgtatcccggcagttcgctgcagctgcccttcaccgcatcccccggccacaccgtgcagctgcgctaccgcctcaccagcgatggctatcgcgaacacgtacagacggtcacgccgtccgacatctga

SEQ ID NO: 530155 - DNA, 579 bp, Stenotrophomonas maltophilia
gtgaagctgaccgcacagacaccatcgtcgcggaacctagcagagcacgtattcgcgttcgacctcaccatcaccgaccacaacgcggtctccatctacttccccgcgttccccaacgtctctccccttgtagccctcaatgccgggtatgacccgatcagccggactatcggcggccacaccgtattggacatgtgtctctacgacggtctgggctcacaagcgcagtacctcggcgtcaccgtacgcgacaccggcgcgcggccacctgggccgagcgggttttccctgtggcatgacaccgccggcagcgacgacagccaacgcttggactacaccgtcacgcttgaccacaacggcatcacggtgccgctgaccaacggcgtggaagagcagctgcacggcatcgataccgcacaactgcggctggtgatgctgccgggaatgagtcaaccggtgttctgcgtgcccacgccgatgacgctggatatcccgcgtgtccctatttccacaaaacgctcgggcatctactggggcgacctgaaggtcgagctccgtgtgcccaccgcaacgccctga

SEQ ID NO: 530156 - DNA, 2724 bp, Stenotrophomonas maltophilia
atgaaagctcacgcacccgccatcacccggctggcgatcgcgctcgccttgtcgttggccagtccgctggctgcggcacgtggcgttccagtcggtttcgaggaactggccgaaggtcagaccgaacaactcgacgtacgtctgtttggcctttcagccgggctgtcgcccgtgcgcgtgaccctggggcacgtgcaggtggaggagccggcgcaggtgctgcaggcactggggctttccgccgaggcccaggcggcattgctgcctgcgctgtcgcaaccgctcccgcgcaacagccacctggcctgccgttatggcggtgccagcgcaggctgcggctatctcgatccgcccgaggaccccaacaccgtgcgcgccctgtatgacgaaggcgagggcgcagtgcgcctgttcgtcgcccgccagtggatcaacgccgagccggcgaccgaccgcttccaccagatcagcagcaacgccgagaacgcgttcctgcatcagcagaccgtcaacctcagtggcgggcgcggctaccaggcgctcaccgcccagggtgccggtgcgctgggcctgttccagcgcggccacctggccgtggactggaacttcagcagccagcagtaccggcgtggtccacgccggcagcagttccagttcgacaacgcctactaccggcatgacctgggccagcagcactacctgcaggccgggcgcatggaccgccgcaacctgagcagcccgcagggcggcaccttcagtttcagcatgctgccgatggatcgcttcgccggcctgcgcgtgggcaccacccaggcctacgtggacaccgattcggccgtacaggccacgccgctcaccgtgttgctggcccgcgacgcgcgcgtggacgccttcgatggtgagcggctgctgcagaccttctacctgcaggccggcatcaacgacctggacacccgccgtttcccgttcggcacctacaccgtgtcgctgcgcatctacgaagacggcgtgctggtacgcagcgaagacgcgcccttcgacaagggtggcgactggaccaacagcagtgtgcagtggttcatgcagggcggccgccgcaacgagcgccgcagtgaccgcttcgacggcgagatggcggccatgaccggcatgcgcgtgccgttcgggcgcgatcttgcgatgacggccggcgtcgcagatcttggtggtttcagctatggcgaactgcgcgtcgatttccgccgcctgtttgccactcaggagatccgcgcctccttcagcggcctgcgcggcagcgacggcagcagtggccagcagaaccagctgtcctaccgccgccgtgcgtcatggaacgtgtaccaccagcgtctgcgtggtaacgcctgtcactttgaagacgacgcacgcgaccggctcggctgcgccgattcgctcagcgcctccatggcactaccggtggcgggcggcagcgcctatgtggcctatacacggcggcagacctggcggcgcggcacgctgctgccgggcgaactggacgacccgatggcggggctggaccctttgttgccgccgtgggagccgcgcttcgatcgcgagccgcagctcacccgcacctggcaggtcagctacagccgcgtgcagcgctggcaggaattcagtgtgtccacccgcgtgggcgtgtggcagcaggccatccgcagcagcctgaatgacggccgcgaccgcggcatctacctcaacctgtcgctgacccgcctgcagcgcggcgagcgcggcagctcccagcgccgctacagcctggacatccgccaaccgcagcattcccggccggatgtcagttacagcgccgggcagaccctgcgccaggacgtggacgcgcagtaccgcgaggccacgctggacctgcgcggcaacaacagcgaccgctacagcgcctcgctcagtggccaggtgcagaacagcatcggccacaccggcgtgaccgtggcgcgctaccagcagcgtggcagcaacgaaatggcctatagcgctacgcacagctcgggactcgccttgggcagccgtggcctgtactggggcggcgggctgggcgccgaagccgggctggcggtacaggtggacgataccgatgatctggagctcaccggcgtggccgccgagctgcaggtgggtggcctgcgccgacagcgtctggcgctgggcgaacgtcgcctgctgccgttgtcggcctatcaatcgcaccgtgccgaagtgcaggatgccagcgcgttgaacagcgatgccgccatccgcgtaactggcgtgggtggtgcccgaccgttgttcctggcgccgggccggctggtgcagatgccggtaccgatcgaggtgacgtacaccttcatcggcagcgcccgcgatattgccggcgtgcccctcagcggcgcgcgcattctcaatgcgccggtgccgggtaccggcagcaatgggggcttcgttgccgatttcccgcgacgcgaacgcgtgctttacctgctgcagcacaaccagctgctgcactgccccttgcaggtgcgcgagcgccgcagcgtggtgatgctggtaggccaggtgcagtgcgaaccgctggccgtggcgcagctgccgcctgacatccgccagcaggcgcgtgtgagccggttgttgcaggagcaggcgctgattgctgccacgccgcagaccgctgcggtggggggcacgccatga

SEQ ID NO: 530157 - DNA, 507 bp, Stenotrophomonas maltophilia
atgcacgccattctgaagaaggccacgctcgttgcagcgctggctaccgcttcgttgtccgcgaatgcggccgaatcccacatcaaggtctacaccaacgtggacaccacgctggcgctgatgaaggccgacggcagcgccttgccggacctgatcacccttgcccatattccggggcagggcttgaatgcccacaccgaacgtgtgcgcatttacaccaacgatgaagacaaggacatcgaagtccgccttaccgcggacccgtcgcttgtgctgcggagcggcggcggcacggccatcccgctggcagtcagcctcaacaagaagcgcctgacggttgccgcacaggacttccttgcctcggacatctacgacggcgcgctgccgggggcctcggtggtgatggatctggagatcggccaggccacccgtgcgccgatcaccgtggcaggcgagtacgaaggcattgtcagcatcgccatggtgcagaagaccggcaccccgtaa

SEQ ID NO: 530158 - DNA, 1002 bp, Stenotrophomonas maltophilia
atgcgcaaccccgcctctgccattcctgcatcgcatcgctccagctacgtgcagatgcttgctttgctgatgttgatcggtggggtcacggcattccctgccgtcgcgtgtcaaagactggtgctcggtgaccaggtgctggaccgtagtggtttgatgcccaatttggactttcccgaccgcaactacaacggagttggcggcttcctgacaaatgcctatgactgcccgcctggcgacaccgagttcgtcgttgatgtgccgttggctggacttacctatgtccgcgataccgtctaccaaggtctggcgctttctctttaccagttcagcgatcgctcgccactgattgccatgcgctaccagctgtcgtccgcctccggcaggcactcgatgtcactgcatcctggtatacgcgcaacgctgccagttacgtttggcacaaccgaaacggtcaatgctggcgtggtcttcttcttcttctttcggggcggcgccatggaaagcgtgccataccgatttctgggcacaatcgaagcgtggccgatcaccgaccctggtcagcgcctgcgctcaccggtctcgctgggtttcactctcgcgccggtcacctgcaccatcgccaacgcgtcccacagcctcgacgacgttctcgccaacgaactcgccgccagcggcagcaacgcgaaggaatccagcttcgacgtcgcgatgaactgcccgatggacaacatcgacgtgcagctgtcgctggccgacgccaatgacccgggcagcagcaacggtcagcttgcacctgcccccggcgccaccgctggcggcgtgcaggtgcaactgctgcgcggtggccagccggtgcagttcggccaggcgtggtcgcacggctggtccagcaagggtcagcaggccattccgttcagtgcacgctatctgcgtacggccgatccgctggtgcccggcgacgtcaaaggcgaggcggtgctgaccgccgactaccgatga

SEQ ID NO: 530159 - DNA, 441 bp, Stenotrophomonas maltophilia
gtgccggtggaagagatcgatgagctggccgcgaccggcgcgaagacagtgccggtgatgatgccgtacatcacggcgttcttcatgccacgccaggcaggtgaccgcccggacgtggtgccggaaggtgcggtgaacttcgccttcatcggtcagttcgctgaatcgaaacagcgcgactgcatcttcaccaccgagtactcggtgcgcacgccgatggaagcggtgtacaccttgctggggatcgagcgtggcgtgccggaggtgttcaattccacgtatgacgtgcgctcgctgctggccgcgaccggacgcctgcgtgatggcaaggaactggacattcccgggccagcgttcctgcgcaacctgctgatgaacaagctggacaagacccagatcggcgggctgcttcgcgagttcaagctggtgcaggaggactga

SEQ ID NO: 530160 - DNA, 1056 bp, Stenotrophomonas maltophilia
atggagttaacattagccagctttctggaaagaaatcgaattgaacagacagactgggatcgcagcgagtgcgactgggagtcgctaaaacttattgcggacgaccataatgctaacaggcaaaatctcgagcaagcagtcgaaatgcatgccggaattatacagcaaataggggcagtgcattcagttcgctggcgaatcaaggacagcgagcatgtgctagaaaaaatcgtccgcaagaagctagaaggcgaagaaaagtacaaaagcatcgacgttgacaattacaagagcatcatcaccgacctaatcggacttcgcgcactccatcttttcaaagaagactgcttcagtattcatgaatcgcttatcgcgacctttgaaatgcctgagacacccaaggcttacattaggagcggtgacgccgacggcatatccaagagatacaaatcctgcggaatggaaatcgcaactcatccagccggataccgttcaattcactatataatttccagcaaaccacttaaagaagttatcaaagctgaaattcaagtccgcacactattcgaagaaggatggagtgaaatcgatcatcgaattcgctacccaaactactcagacaatgagcttattatgtacttcctccagatattcaaccgcctggcaggtagcgcagatgagatgggcagcttcgtttcagagcttgagcgttcattaagcgagaatgaaaagagactagcctcgcacaatgaggaaagacagtcgtcctttaatcgcatagatgaactagttaagcaattgcaagcagccacaaaccaagtagccgctgtgggcgaagagcgagattcggtaagaaatacacttgaacgcctccaggacgagatggcgatacttaaacaagagacagctagccctgagggaattgacggggcgatcacttatcacaaatttctcacgagcattggaattcaaattcctcatcccttgacggttactcgccaaaaaagatcgattaagaataatttacccatcaacaccacgccaccgaaagaatag

SEQ ID NO: 530161 - DNA, 1392 bp, Stenotrophomonas maltophilia
atgacgttcccagcgtatccggcgtacaaggattccggggttgagtggctgggtgaagtgccggagcattgggctgtgaatccactcaaacgggctattgaacgaatcgagtctggaacaagtgtcaacgcggcggatattccagctgagcctggctccgtgggtgttctgaaaaccagttgtgtttacaccgggaaattcaactgggccgaaaataagacggtggatgacgaagaccttggcagagtcagctgtccgcttcgtaaagacacgcttattgttagtcggatgaacactcccgatttggtgggggccacgggtctggttaccgaggcttccaatgggatttttctcccagaccgactctggcaagtttacgtcttggcgaaccactctccaggtttcattttttacttcaccaagtctcgggaatatcgggagcaggtaaagatggcctgttccggaacaagcgcaagcatgcagaatcttggtcaagatgattttaggggtttgatcttcgcagggccgccaaagattgagcaaatccaaattgcgcgcttcctcgaccatgaagttgctcacatcgacgcgctaatcgaagagcagcagcgcctgatcgaactgcttaaggaaaagcgccaggccgtgatctcccgcgccgtcaccaaaggcctcgaccccagggtgccgatgaaagactccggcgtggagtggctcggtgaggtgccggcacattggaagcagattcgtatcaagcacatattgaacgcaatgattgatgctgagcataaaactgctgaatatagtgatgatggtgagtacttggtttgtcgcacgacaaatgttcgaaatggcttgcttagtcttgacggggcaaaatatgccgacagaaatacttacattgactggactaggagaggggtgccagagccattagatatacttttcacgagggaggcgccggcaggtgaggcatgtttggtgccagaagaccttgagatatgcttgggtcaacgcatggtgctttttaagcttgacaagactaggattgatcctgccttcactgtccactcaatatatgccggtctggcttcagacttcgttaaacagttgtctcaaggaagtactgtcagtcatttcaatatggcggatatcggaaatattccactttttgagccgcctctgtctgagcagaaggggatttctgatttcttagccaagcgctgtgactcttatgacctactaatcaacgaggcacagtcttcggtgaagctaatctccgaacgccgctccgccctaatctccgccgccgtcaccgggaaaatcgatgtgcgcggctggcagccaccgacccgcgcgtcattccccgaattagaagaagaggccgtgtaa

SEQ ID NO: 530162 - DNA, 462 bp, Stenotrophomonas maltophilia
atgaaacgtaaaattacgcttgcatggtcctacgctgtcgaagttatccttagcttactaacactaacttttggagcaatcaccctcggctgggaatccatccagaaattgacaattcagttatcctcaaactttacaacattgtttctcatcgtaatgctggccgctgcgatcactgcaacctgcacactttacgggaagtcggaaacaaaatttcttgtatggatggagaggaggaggattctaagaccatatattcacgcaatgagctacgccactctagttttcgcgacatcaaccgtagcatcagttctcattagcaaattcaaccacgccgccctggtgaccgcgacagctttcctcttcatcctgagcattataaatacgtacacaatgctctcgaatttccatggattatttaagttgaacatgacgttcaattcgattgacaaaagcctctga

SEQ ID NO: 530163 - DNA, 879 bp, Stenotrophomonas maltophilia
atggtcggccgcacggcggtaataaggtccgacgaaggcatcgtggaattgctagaagctgcatgcgcaccagagcatgacgtaacgcaagaaactaagagtgctgagttcaaatggagtatccgctacttctcggaatatcaagttcccgaaagaaggcgacacctatgttcagttttactcgccaggagcgttattagtaaagacggcctgattgtcatggatgatggcatcgccactggaacgtcatcctcgttccctccacttgcttcgacgatgagcatatttttcgacctcagtcgccatctcgtcgctgtagagcacaccggcgatctcgctccaacggcgtggaaagacttcatcgagaaaatattgcagcgagctgcaatctctattgggaaatcgactggagtgtcactagagccagttccggaggagaacggcatattgggtctattccgctccttcgatgtacttacccgacttaaagttacactaagaattccaaacccagagctgacaagatataccaagatgatatatgaagagctcgtcgatggagacatcagggaatacacacaagacatgaagaacagccgagggatttctaagtcagaaacatccaggccgtttgcaaccgcagtcttggccgcgcagggctataagagcggcgaagttcagatggaaggaattcgcgatggctcttttgacaaagtactttccgggtcaaatgcagcaagaggatcaattccaatgttgcgagaattcgttcgcggcatgcatgcaacagcaaagacaaaagaggcaaaggcgacattaattgcgattattgcagaaatagacaaaattcaccccaaggaccaaccaaatgaaacgtaa

SEQ ID NO: 530164 - DNA, 369 bp, Stenotrophomonas maltophilia
atgagcgcaacgaagctccctggtttgaacacgcaacacgatcctgccaacaccgatgacgaggatgaccatgcacccgatcccaatagcttcatcgccacgctgcaccgcattggtgccggtgcaggtgtcgacggtcggccatggcctgagcgcaatctgtcgatcgggcgcagcatcgaactagccgatgcggactgcgcgctggtcggcttgcgcaccgtggccgagatggcgctggctggcgagcgtgcccgtcagaacggcgcgtcgcgcgaggggctgggagagcggtcgatggaggggctgcagatggcggtctttgcattgaccgtgatggcgactgagcgggtgcagggccgccgctag

SEQ ID NO: 530165 - DNA, 216 bp, Stenotrophomonas maltophilia
atgctcggctccggcatcatcaggggtcagagcctttcccgccgggaaagtgatccgcccctgggcaacgagcgcgcaaagcgcgcgacccgctcctgctcttccttcttcaattccgcggtggacgcgcacggaacctgtccgtggccgggcggatgggttgtgcaggggcgtgagccgcatgggcccgaggcacgcctcgggcgggttgggtag

SEQ ID NO: 530166 - DNA, 300 bp, Stenotrophomonas maltophilia
atgggcgatctgcaggccatcatcgacgatggcgatggtgacgccctggccacggatgccattgcggaacagaccatccacgttcaggtcgttgccggccaccggcagtgtgtcagccgggaccgtctgcccggtgttgagcaggtgccactggatacccgccagcggatcagcctgttgagcctgggcggtggcggccaggctgcccagcaccagggcagtggcgagggccaggcgcgcggagcgcggtggcgcggtgcgttgcgtgtgtcgcttcatacacgaatccttctgttgtga

SEQ ID NO: 530167 - DNA, 123 bp, Stenotrophomonas maltophilia
atgagcaagatcgatccccatgatcgcatcgaactgaccggcccttgggccggtttcggattccaagctgggcacatgttcacccctgagggtcatcagttggagccttgcgacatgacctga

SEQ ID NO: 530168 - DNA, 630 bp, Stenotrophomonas maltophilia
atgtttgtcctaaacgacaatctttacgctgctgcatacccatcagcatccatctgtctgtatggctttccagcaaagcactgcacagcactggccgggaggtcgccacaccgagagccgggaaggttctcccaaccaccttcaattcgacggaagaacatcccattgatacagcgcagaccctgcgctttctggggtggctgtgcctgcaggcgttcgggaggcgtcgatggcgtcgaactgacagctgtcgaccgctcaggcctcgccgtcgacgactgctcagtggcctcgatagatcgccgcacaccttcaaaacgctcactccaggcaccgttagtccggccaagcgtaagcacgccgatggttgtaaggctcaccagagtcaaaaatccggtgatcagccacgggaaattccagcgccttcgctcaatcggcggaaggtactcaggccgttcgcgctccatacgcccccccaatcacgtccagactgcaggggcagcgcccctacggaagcgccttacacgcgctggcgcggtctcggcccacggctcatgtagaccacattggatgcctcggcgtcggggccgggatcacgtacgccgaaccgtcgctctcggcgaattctga

SEQ ID NO: 530169 - DNA, 975 bp, Stenotrophomonas maltophilia
atgaaccgagacgaaccactgacgccggaagaacgcgagctgtcccgcctgctcggccgtcgcgccgaacaggcaccgccggctgcactggacaccgccattctggccgcggcccgtgccgccgtggatgctccggctgccgatgccaccgccttgccggacgcgccccgcgtgcggcgcacccgtcgctggcctgcggtgttcggcatcgccgcctcgatggtgttcgccatcggcatcgcctggcagctgcgcccggaaccgcccccgattcctgccggtgagaccgcggttgccccggcaccggccaacgccgaaattgccgccgccgaccagactgctgaaagccgtgcggccgacagcgcgactgcagctgcagaaccggccgcaacgccggcagcgccgccgggcgccgatacccctccacctgccaccgcgcgcgcgcgccaacctgcaccgatggaagcgcctcaaccaccggcaccggctgcacggtcgatggctgcagaggccgccaccgatacttcgttcgcagcgctgccgccctccccggccgcggcccctcctgcgccacccgctcctgtggcgtactcggcaccggcaccgacgttcgctccggctccggcagccgcgttgaagccgcgtacggcagccgcgccggtcgccaatgctgccgacggcgaatccgcggtgatgcaggaccgggtcgaaatcacctcgatgaagcgcgaggcgccccgccgttctgcgcccggcgtcatgcagcgcagcagcgatgcgggcctgagcgcggatgcggtgcaggctgaagtgagcgccgatgcgcgcctgccgcgccggcaatggctggaaaagatccgcgaacgccgcgatgagggccagcgcgacctcgcccgcgccagcctggaacgctacatccagcaatacccggaatcgcgcctgccgcgcgacctgcgcccgctgctggacgactga

SEQ ID NO: 530170 - DNA, 489 bp, Stenotrophomonas maltophilia
atgcgtacctatttcgcctcactcgccgttctactggcgctgtctcctttcgcagctctggcctccggcaaaactgccatgccaaacccggacaccacagcaatcacccgccagcttgagcgctatgagcaggcgctcaacagctctgacgtcgacgcggtaatgcgtctctactcggacgatgcggtcttcatgccgcagcacagtctgccggtcgccggagccggagcaattcgatctgcctatcagcagatcttcaagaccatccggttgagcatcgacttcaccattgatgaaatccagccgctatcgcgcgactgggcattcgcccgcacgcgttccaacggaacggtaaaggtactggccaaggatggaccggagggggcggaagccaatcaggaaatcttcctgctgcaccgtggcaaggatgggcaatggaaattcgcccgttacatcttctccaccaccaatcctccgcgtcagccgtga

SEQ ID NO: 530171 - DNA, 987 bp, Stenotrophomonas maltophilia
atgaaggcatatgtgattgaacgggtcggcggccccgaggttctgcagctgcgcgacattggcgcacccgagagcaacaacgatgaggtacttatcagggtccgcgcattcgggttgaatcgtgccgaggtctatcgccgccaaggcaagatgggcccgatcgatagccctgttgtacccggtatcgaggccgtgggtgaagtcatccgggatccgagcggcaccttccgcacgggacagcgggtcgcaacggccatgggcggactgcagttcagccgcccgggcagctatgccgaacaggtgagcgtgctggcacaaaatctcatctcacttgacggtatcgaccttgcctgggacgagctggcggcactgccggagtcctatctgacagcctggggcgcgctggatcacagcctccggatccagcgcgggcagaccttgctggtgcgaggtgccacgtcagcagtcggcatggccagcgttgcttacgccaaggcacgtggactgaatgtcattgccaccacgcgaacggtgagcaatgaagcgcggctgaaggaagcaggtgctgacgaggtcatcgtcgataccggagagatcgcggccgtggttcgacggtcgatcccagccggcgtggacgccgtgctggaggttgtcggcgcagccacgctgcgcgactcggtcaaagcgcttcgcccctttggcggtgcatcggtcatcggccttctggggggggctccggtactcgagtcgttccacctgatgcaggaccttcctggcgcggtccatctgaacttcttcccgagtggactgcttggaaccccagcattgccgctgagcgaatccccgcttcgatggattgcgcaggagatcgccgccggtcggatcccttctttgcgtagcaggacctttgatttcgacgacgtccggcaggcccatcgactgatggaaagcaatgcggccgtcggcaagttcgtcgtacagctttga

SEQ ID NO: 530172 - DNA, 378 bp, Stenotrophomonas maltophilia
atgtctattgcagcagttctcaagtcctacgaaaccgccctgaatggcaacgacaccgacaccattctgagtctctacagcgccgaaccggtcttcatgccgcagaacgcacctgccctggtgggccgtgatgccgtccgtgcgggctatgagcaggtatttgccaccatcaagctcaacgtgacctttgacatccacgaagtcgttcaggttggcgagtgggcgtgggtgcgcacgagctcggccggccgcacccgaatcctggctgccgacgtcgaggtgactgagggcaataacgagttgttcgtgttccgcctggaggccggcgagtggaagatccatcgctacctgttcgccaccaatcagccgcgctcctga

SEQ ID NO: 530173 - DNA, 906 bp, Stenotrophomonas maltophilia
gtggacttgaacgccgtgcagatgtttgtcggagtggtgcaggccggaagcatttcggccgcagccgagcgactcaagctgcctctgcctaccgtgagtaggcgggttcgcgagcttgagcgcgagttgagcgttcagctgttggagcggtcgacccgaggcacccgcctgaccgacgccggtgcacgcttgtacgagcacgcggtgcgcgggatcgaactgctcgccgaggcacagcaatccgtggtcagtgaccaggcgcgcctgaagggacgcctgaggttgtcacttccacctgcgttcgagccttggtgggagctgctgtcgcggttccagctgcaatacccggacattcaattgcaagtgcacaccacagaacggcgcatcgatctgattgaggacggaatcgatgttgcgcttcgtgtcggtaccattacccatgaagccatggtggcaagacgggttctggagtatcgccacttgctagttgcgtctccagcactgatagggcgccttggagttccgggatcgatcgacgatcttcatcaattcccgtgcgccacttgggtcttgggtgcaaatgcacggggtcgttggctaatcggggggcacgacgttgagcctcgcagtgtcctcgccacgaacgactatgcacatctgcgcagccgcgctctggccggagacgtcgtgaccgagctgccccccttcctggcggcagatgcaattcgcacgggtgacctcgtggaactgttgcctcagtgtccattgccccagcagcagattcacctgctgtatccctcgcatcggcatccttcgtcaatcatcagaacctatttggacttctgccaggccgagatctcattgctcagcaaggactggctgcagcaaggagaggtacgtgcctga

SEQ ID NO: 530174 - DNA, 855 bp, Stenotrophomonas maltophilia
atgcccctcacgttcggcaatgcttgggagcgtcagttcaaggcggacgtgttcgcccggatcgtgcagcagttgaatcggatgagctgggcatgcgaggtgcccgccgagatgatcgaacgctatgggatcaactttgcgcgacgtgaccgctactgccgaaaaggcgacttgcacgcgcagctgagcgtaggtgggcgacacatcgagctgaagttctggcaggagctgcacaacgtctccaaccccaacggtgggcgctacgacttcgacaaagagcagcgcatgccgtatctcctccgcctgcagatggaacacacccggcgaaagcttcgtgactacctggtcaacgtgttcgatggctactccttccaggcacccgcgatcaccagtcccaatccatgccctctggcttacttcaacgagcgttgggatagcgaacacgaaaagaggcgcggagcccaccggttcgaccgcggcgtcgacggctggccttctgaaaaggcgctccggagctggtgcaggaaggatgcagacggtgttgccctccagcatggcgacgtgcgatgcattcgcgacaggcaaggccgggtgcgcaggggacgggtttacggcggcatcaacggcatgtggatgcttgtctatggtcctggccaacgtgaccacatgcacgagaccgctggcagtttcttttcctacgtcccgggtatgccacgcaaggtggtttcggcctatcaggccaacaagcggctgcagcaggaactcgcccaggcgatcaacaaccagaacttcgagcgcgccatcgtcctgcgcaatgtgacggcacagcgcgcggaggtggccacccatgggtaa

SEQ ID NO: 530175 - DNA, 768 bp, Stenotrophomonas maltophilia
atgctcggtctggccacccagggggctccgctggccgcttgcggtaactgcggctttgaccaggcgcgaaaccgcgttcgtggcagcagcggcagccggcagaccgcgcaggttgtctgcacccgctgcggtgcgtatggacagctctacgtgggcacggatgccccagaccttgccgcgaagaactgggctcacaggccccattccgtgccggcaccttttgttgaacggctaccgcgcggccggctgccggccgcggagccaaccctgcagcgtgacccgctggaactgattgcccggatgctcgttggcagcagtttccgcgaaccgtcggacgggcggtcaaccacgcagccgctcacctctgccgatattgctggtgctgtggggttgatgcgggatccggtcgcaaagcaggcagtcgtagccgtggcgctgcgagggcagggcgtgtcactggcctcgctggggcggtcattggccaggcgcgtgatgcggcagattcaatgggaccggcggtacggcgcagggccagtgcttcgaatggacgagccggcagaccgatggcggatgcgccttgtgctgcaggatgccgtgaatgacctggtgtggccggaaaggaaagtggcggcgcaaaatgcggcgaaggcggccaaaatgcggaagggcgcatatctgcgggtctatgccatcgccaccgcgacgttgcgtcaggcgctggatgatggccggcaggagttcaaagtgcggctgttcgcaaagtggtga

SEQ ID NO: 530176 - DNA, 243 bp, Stenotrophomonas maltophilia
gtgagtgttgcacttgaaatcaaccgagtcacgagagacgcatctttcacccacgtcatcatgacggaccagattgctgcaatggtctatgacgataggggcgcgaaaatcactctctccctcaatactggtaaggaattcacctacacatttgcttcaaaggatgaggccgacgcgttttatgaagaggtgaccgaagcgctcaaggcgaacggtcaccacttcgtaaacaccacaatctga

SEQ ID NO: 530177 - DNA, 1224 bp, Stenotrophomonas maltophilia
atggcgcagaaattcatcgatcagacgaccatccagccggatggcaagccaggcgacgacgcgttcaccgcgttcgcgacctgcaacgacaacttccaggatgccgagcatcgcctttcggcgctggaaggtggatcatcgaacatcggccaggaagtggtcgacctgaaagctggtctgctgcaggaggcgcagctacgagccgatgccgatgccgcgctcggtgcgcgattcatcggaaagaaccgctttatcaatggtgacttccgcttctggcagcgcggtacgaactttcctgccgccaccggtacgcgctacacagctgacaggtggaactcgaacggtacaggctccagcatctgggtgcagcgcgttgatgtacctgccggcggcgggtctgttccgctgttgaagaacgccaagtacatgctgcaagcagtcgttggtagcgttgctggcgcagggaacttcgcgttgattcagcagcgagtcgagggtgtgcgtgagctatccgataaaaccgtaacagtcagtttcaaggcgaaagcgtctgttgccaatttcaaagtcggtgtcgaagcgcaacagtcgttcggccctggcggttccgctggcgttgacagcattgtgtcgtcggtaacacttggtacggattggcagaaattctcggtgcagttggccctcccatctgtcgtaggtaagaccatcacgactggtgattacctgcagattagtttctggctggatgctggtgcaaactttgcgggcaggtcaggcaatgccggtcagaaaaatggaacggttagcattgccgaagtgcagctcgaagaaggagcaatcgcgacgcagtttgagtatcgaccggatgccctcgaactggctctatgtcagcgctactatgaaaagacgtacagcatgggagaaggtccgggcaccgctacccgtgagggttgtgtgcgaagcggactgatgggcagtttcttccttagtgtcggttccattgcattcaaggtcactaaacgtgcgccacccgcaatcacgacatatgccgcaagaaatggtgtggccgggcaactgtcggaagttaacaatcaaggcgtctacacaaccaacagaagttgcaatccgtcatctatcaatgagcatggattcaacgtaggcggcgacgcatacaccgcaggtagtaatggcgagtatcactggattgcagacgcggagctttga

SEQ ID NO: 530178 - DNA, 153 bp, Stenotrophomonas maltophilia
atgctttttgagagcgcccgcgagacgttcaagcgcgtgcggatggaatccgacgtccacttcatcaattacgagaaggcctccctgatatgcagccccctgttcgcgcctcagtcgattaaaggatgcgaatgccgtggcaatactgcctag

SEQ ID NO: 530179 - DNA, 630 bp, Stenotrophomonas maltophilia
atgcaggcgccactgccgccaccgagcttgccggacacggccgatgtcgccgcgctggccgactatggtgcgccgtcacgcatcgcgctggccctgcaggccgataacccggcgcaggtccggcagcaggcgggctggtggggccgcctgctggggcgcgatgtcgatcgcgaggcggaaggacgtgcgctgcagtcgcagctgggcgtgctggccctgcaggcgcgcgagcaggcccagcagctgcagcagcagctacagctgcgggccatggccatcgccggacattcagcggcggccgcagcgctggacgcctgggtcgagctggcagcggtgcggctggcgtcgctggataccgccggccaggccgcgctgtcgcaacggctcgatcacctgcgccggctggccacgctgcgccgtctcgaggccggccagtggcagctcctgcaggaccaggacaacgtgctgctgcaacgcttcgcgcgcatccatgacgtcctgttgccagcctggcggcaggccgccgcggcgggccaggccgcggccggcgccacattggcggcgaaggccgccacgctgcacgcacagatcgatgacgaggtcgcggcggctcaggctagactgccttga

SEQ ID NO: 530180 - DNA, 1437 bp, Stenotrophomonas maltophilia
atggccggcctcgatgcgcgacaggtcgaggatgtcgttgatcagtgccaacagatcgttgttggacgagaggatcgcacgggcgtacttcacctgttcctcggtgagcgtgccgtccttgttgtcggccagcagcttggccaggatcagcgagctgttcagcggcgtgcgcagttcgtgcgacatgttggccaggaactcggacttgtagcgcgatgtcgcggccagttcgttgctgttgcgcaccagctggctctgcgcgaccagcagcgcctgcttctgcgcctccagctcgtgggtgcgctcttccagctgcacgttgctctgttccagctcggcctgctgttcttccaggtggctctgcgactgcagcaggctgcggctctgctcttccagctcctcgttggccacgcgcagctcttcctgctgggcctgcagctcctcgccctggcgctgcgactcttccagcagcaccaccagttgcgcacgcaacagcgatgcgcgcagcgccaggccgatggtctcggcacagcgctccagcagctcgcgatccagatcacgctgttcaccgacccgggcgcggcccagttcgatgatgccgaccacggcaccatcgctgctgagcggcgccaggatgcgctcgcgcaccggcagccggcccaggctggtctgcagttcaagcacggcggcatcgtcgccatgcaggtggcggatccgttcatcacgagcgacctgcccggccagcccttcgtgcagggccagcgaggccggcgcgcccgaaggcagcgccatgccaccggtcagctgcagccgtccgccttccagccgatagaccgcaccgacctccgcgtccagctgcccggccaggctcgtcgcagccgcctcggcgatctgctccggccccaggtcaccgcgcaggctcgacgccaccgcgttctcggcctcctgcagccagagcgcgcgcatggcctggcggcgggcctggatggcgcgcgagacgatcagcgcgatcatcaggaaggcgcagccaccgatggtgcggttgacgaacgagaacgacgagttgttgctggcgggcgccacgttgaagccgatcaccagcaggacacaggcgatcatcgcgaccacgaacggcgcgcgcgcactgcgctggaacaccgtgacgcccacggccaggaaataggccagccagaccgcgtatcccagcggcaccaccagttccagcgcgatggtcgccgccagcaatacggcagaggtcatccagatccagcggtcacgcgtagtcgcaccaggacgcatgcaggtcggttccagaaggcaaagggtggaagatggtactccgtgtcgcattcagccgcacaggacaaatggcacgtgtcaggtgtgcacgcatccttcacacttgaatgcctagcttcacgtccctcacaggggtaa

SEQ ID NO: 530181 - DNA, 447 bp, Stenotrophomonas maltophilia
atgacccgaatcctgcttgccctcgttcttgtcctcggcctcgccggctgcggtttccatctgcgcaacaagctgatgctgccgaccgacactgccccggtgaaggtggtctccaccgccccgtacagtgaactggtcaagctgctcaaccgcagcctgctggcctccggtgccaagctggccgatgaggacagcaagggacccaacgcccagctgcaggtgctgtccgagcgctggggtgacctgccgatcgccatcgactcgcagggccgcgcacaggaatacagcctgcgctacgcggtgatcttcatcttccgtcgcgaggatggcagcgaactggtgccgcagcaggtgatcgaactgtcgcgcgactatgtgtcgccgctgtccgcgccgaaggccaagccgatcgagggtgcggtgctggccgccgacgtcaagcactga

SEQ ID NO: 530182 - DNA, 279 bp, Stenotrophomonas maltophilia
atggccagcgccagcccggtcaggatcacgcccaccatccatgccagttccgggccggtcggcagccagctttccggctcctcggcactgccggggaagaactcgaccagcaccgcgtacagcagccacgatgacaggatcatcatcacgatgacgccgatcaccatcagcgacatcgaaacgatgatgtggcggctcagcccggagcggcgcagggagggcatcagcgatcggccatcagccggtagccgacgccacgcacgctggctgggacgttga

SEQ ID NO: 530183 - DNA, 615 bp, Stenotrophomonas maltophilia
atgcacctcggccgccagccgcgccatctcggcatcacgctgctcgcgtgccgtcagcggtgcatccggttccggctgctccggtgtcgggcgcgcctgcgcctgggccactgcctcttcgccgttgcggctgctgaccacccgcgcctgcggcgggggcgccggcgcggccgactgctgctgttgcggcaccgggctcagccccgcctgggcctgcggaacgatgccggcctggttgtcgcgcgggcgctgcgcacggtcgtgctcgccgccaccttcctggctggcggcggcaaggaaatcggcctgcttcggggtcagtgcggtgcgggtctggctgaagatcacctccagcgtcggcaccagtggtgcgtcgcctttcaccgcaaaacccacgcccaggatcagcagggcgtggaccacgatcgacagcgcgatggtcgcgcccagccgttgcgcttcgcgcgccggcgggggcaggacggcaggtgcggccgccatcagcgcaggccggcctcgagcgcgtcgaacagggtgccggcgatgttcaggccgtactgcgcgtcgagctcgcgcacgcaggtcgggctggtcacgttgacctcggtcaggtaa

SEQ ID NO: 530184 - DNA, 630 bp, Stenotrophomonas maltophilia
atggtccaccgccatccgcgcgcgatccaccggcgccatcgccccggtggccacctgcttgtcggccgccgccatctgttcggccgaactctggcggttggcctcggcaatctgcgcccgctcctgcgcgcccttcaggccgaaataggcttcatgcagtgccacctgctgccggcgccgggtatcgagcatgtccagcccggccacttccagcagcgcgtccgcctggcggatgcgcaatgcgcgcttgccgccgcgctcccaggtccagcccaggcccagcgtgctgtccacccgcttgtcctgccagcgccccgggccgatgccgtgcttcgggctgatcttgctgctgccgatcgacagctcggccgctggccgcaacgcagcggtcagcgcatcgccctgcaccccacgcagttccaatgccgccgcgcgcaggtccgggttgtgcgcttccattgcacgctgtgcatcctgcaaggacagcgccgaagtcgcaggcgcgcacgaaagggcggccagcacggccgcaagacgacgggagaaattcatgcacgtcacggtaaggtgacgcacttgcgccaaacttgccccaaccttgcacgaagcttgcaatgcgaatcctgctga

SEQ ID NO: 530185 - DNA, 1059 bp, Stenotrophomonas maltophilia
gtgaccaacaccccgtcttccgccccttcccccctcacctaccgtgacgcgggtgtcgacatcgacgccggcaacgcgctggtcgagcggatcaagcccctggtcaagcgcagcttccgcccggaagtgatgggcggcctgggcggcttcggcgccctgttcgacctgtccaacaagtaccgcgagccggtgctggtgtcgggtaccgatggcgtgggcaccaagctgaagctggcccaccagctgaaccgccacgatacgatcggcatcgacctggtcgccatgtgcgtgaacgacgtgctggtgcagggtgccgagccgctgttcttcctggactacttcgccaccggcaagctggacatcgacaccgccgcagcggtcgtgggcggcatcgccaacggctgcaccgaggccggctgcgcgctgatcggcggcgaaaccgctgaaatgcccgacatgtatgccccgggcgagtacgacctggccggcttcacggtcgccgcagtcgagaagagcgagctgaaggacggcgccagcgtggccgccggcgacgtgctgatcggcatcgcctcgtccggtccgcactccaacggctactcgctggtgcgccgcatctacgaccgcgccggccgcccggccgacctggagctggagggcggcgtgaagctggtcgacgcgctgatggcaccgacccgcctgtacgtgaagccgatcctggcactgctgaagtcgcacggcgaggccatccacggcatggcccacatcaccggtggcggcctgaccgagaacatcatccgcgtggtgcccgacggcctcggcctggacatccaggcatcgtcctggaccctgccgccggtgttccagtggctgcagaaggaaggcgccgtggccgacagcgagatgtggcgcaccttcaactgcggcatcggcttcgtgctgatcgtggcagccgaccaggtcgccgccgtgtccgaggcggtcaaggcgcagggcctggaccactggaccatcggccaggtggtcactgctgaaggcgccgagcgcgtccacatcggctga

SEQ ID NO: 530186 - DNA, 669 bp, Stenotrophomonas maltophilia
atggccaccactgcgcgccggcagcggcggaatcaggttgatcacaccggcaaccgcacccgggccgtacagcgccgagccaccgcccttgaccacttcgatgcggtcgacgaacccggccgggatctgttccaggccgtacacgctgcccagcgtggacagcagcgggatgccatcgaacagcagctggttgtaggcaccgggcaggcccagcagctgtacttcgctggtgttgcagttctggcagttgctctccacgcgcaggccgttgatcagctcggcggcgcgcgagaagtcggtggccgcgcgcagcgcgatgtcttccttgcgcagcacttcggtgcggatcggcacgtccgacagcaggcgctcgctgcgggtggcggtgctcaccttgacctgcacacggtccagttcggtcggtttcggagtgtcggccagtgcaggcagcggcagggtcagggcaatggcggcggccaggggcagccgatcgaagaggggcgtggcaacgggcatgagggcgtcgtccttggggaaagaaaggcggcgagggcgacctggctgacgcatatgaaagcagtggcttatcaatatagcaagtgctatataaggaagccgcagtcattccgagcggaacgccgaccgagccagatcatggcagtgttataa

SEQ ID NO: 530187 - DNA, 627 bp, Stenotrophomonas maltophilia
atgcgcggcaaccggggggatgccgcacatggccggcgtcgtgcgtcggcctgcctcatgcatgccccaccgtggtttccgtcgacaggcaggtccgggagactgacgaatgctggtaggcacgtacaacccgtggctggtggcgatctcgctgctggtcgccgtgatggcttcatacaccgcgctggcgatggccgggcgcacggtgaccgcaccgggcaggggcgcggcttggtggtggcggctgggcggcggcttcgccatgggcctgggcatctggtcgatgcatttcatcggcatgctggctttcgacctgcccattccattgggctacgaccttcccatcaccctgctctcgcttgcgcttgccatcgcctcatcggtgttcgcgctgtggctggtctcgctgcgcaccctgccccacccgcgattggcggtcggcgccctgctgatgggcaccggcatcgccggcatgcattacgttggcatggctgcaatgcgcatgcagccgggcatcgactacgacccgggttggctgctgttctcgctgatggtggcggtggctgcctcctggaccgcgctgtacgtggcgttccggctgcgcgcccagcgcacccgcatcggtga

SEQ ID NO: 530188 - DNA, 1095 bp, Stenotrophomonas maltophilia
gtggcgcttgcgccattgcttgagcacggcggtgcgcagcgacagcagcagcaaccagcacaggaagccgatcgccagccagccgctcagcgtgaacacgtcattgaagccacgcacgttggcttcgcggcgcgtggtctgcgccagctgcgcgctgccctgcgcactgcgcagcaccgggtcggtgatttgcgcagcgtacagctgctgctggatgcgcagccgttgcgcgaccaccggatcggccggatcgagctggctggtcagcgcgctggaatacagctgctcgcgatgcagctggaaggtccccagcaccgccgaacctgccaggccacccagggtctgcgtgatcgacagcgtcaccaggaaggtgatcatgtggtcgacgccctgtttcaacgcggcggagatgccgagcatgatcagcgggcccatgaacatgccggcaccgaccgaggccaggaactggctggcgtagaagtcgtgcggccggtccaggctggtgcggtgctggtcgaagaacgcggcggcgcccagcagcaggatcgccatcagcagctgcgcgatcagccgcttcggtccgaaggtgagcgaggcgccggcgatgccgacgatcaccccggccaggatcactacgaacaacggccgcatctggtcaggccccatgcccagcgtgcgcatcaggttgaccacgccgtaggactgctcggtagtcaggaagcggatcaggaacgcgccgacgatgaagtgcagcaccggcagcttcgacagccagcggatctgcagcagcggattgcgccggtagtgttcgatgatgaaggcggtggtggacagcacgatcgaggcgaccagcgcccagcccagccatggggtgttgagccaccagcgcgtgtagccctgcgccagtacgatcaccagcagcgcgaccgccggcgcgagcagggcgaaagtgaggaagtccaatggctcgaacgcctttacctggatgcccggcggcagcttcagcaccaccactgccgcgaacgcgcacagggccaggccggcttcgaaggagtacagctggtgccattggccggtatcgaccaggcctggtga

SEQ ID NO: 530189 - DNA, 1752 bp, Stenotrophomonas maltophilia
gtgtgcaccgagtgcggccagattggcgtcgatcgcatccatttcctcgcgttggcggatcggcagctgctggcgcagctggacgcgcaatgcctgccacgccgggaccgcctgcgcactggcagtggccacggccgcggacagcagcgcctgctcgtcgcccagcggcaatccatagccgtcatcctgcagcagcgtccccgggcgcagccactgcccgctctgctccagcaacccgcgcaggctgcgcgtttcagcgctgtccggtgcggccagcagctgccgcttgagcacatcgcgtgcgcgcagctcggcgcgccgctgcgcggcctgttccagcagcaacaggccggcactggcacgcaggtcaccctgcagcagccacggtgcgcgttgctgtgcaggcagcttcaaccagccgcgcacatcacgagcgggcaaggccagctgggccgcggccactgcgaacaactgctggtagtggtcgcgcgccgaggcgaagtagtagccctgcgcctgcgctgcagtgcggtccgccagtaccctctcgtcgagcacgtccagccgcaccagtcgccgcttcaggccgcgcgggctcagctgggccaggcccgcctcgccaagacgcggcaccccggcctgcagcagcttggcggtttccaccgcgcagttgttgctgacgaagtaatagcgcccgtcatagctccagtgcacctgcgcggtgcgctcgagcaggctcgcgatttcgctgcggcccagctgcagcggcagcgactgcagcccgcgcagctcgaccttggtgtactcgtccaccacctgctgcaggggcagcacgaacagccgcgacggatagccgccggtcaggccacgccagttggatatctgcacgtcgcccacgaacgcgcggaacgacagcacgcggtggtactccaggtccaggcggcagtccggcccaggtacgcggcccggcttgcagaccaccagccgcagcatgctgtggccccagcgactcatcggctgcgcactgccttcggcgaacaggtagtccaccgcgtagacgcgcgccggatcgagctgcagcagcgatgcagcgccctcctccgattcggcctgcagcaggggcagcgtcgtggcgcaccgcggccgtggcagcgacggtggcgttccgaaatgcgcctggtaccactgcgccaatgcgggccgccggcaggcgaactcgccgtcgaggacgaaatgctcggcattcacggccaggtactcggccgggttcgtcagttcatagacatccgggctgcgatcacggaaatcgttgtcgccccggccgaggtgccagggcttgcgctgccagcccgcaaggtcacgccatcgcacgctctgcgaccagttcgcaccgccacggtcggcgacgtgggtcagttcatgcaccagcgcactgcggcgcgcacggcggttgccgggcatgccgtcatccagcagggtgcggcgcaacgtaatgcggccggcgaaagcgcgcccgtgcacctcggcgggaaggtcatcactccagcgcacctgcacctgagccggcaaagcgcgcagcaggccttccggcagcagggactgcacgtcagccagggtctggctggcgagctgctgctgcgtcggatcgagaccggagggatcgagctgcagccgatcagccgcatgggcggaagggatgagcagccatgccaatgcggccatccacccgcaccgcccgctgtgcttccgtag

SEQ ID NO: 530190 - DNA, 432 bp, Stenotrophomonas maltophilia
atgctgttggctgccgtcgcccgcgcattggtgccgaccgcgatcgaatcggcgccgctggccacggcctcggtaccggtcgagttcacccgcaggtacttggtaccgccgttgcggatatcggtgatctgcgtgttgaggttgaccagcgaaccatccaccgccgcgaaggcatcggtggcgttggtgtacaggccctgggcgatggcgccggtggtggagatcgtgctgatctcgaacagcggtgcggtgaagatgccgctggccgggtcaaaggctgcacgaccaccgaagaagctggcgatcgcgctgttcgtggccgccagctggccaccgttgacggcctcgaggctgcccgcggtgaccgcaccggcggcgagattgccgatggtggtggtgccggtgcctgcgccgagggtgacccgtcgatag

SEQ ID NO: 530191 - DNA, 1440 bp, Stenotrophomonas maltophilia
atgatcaggccggcattcgggtcggccggcgccggtgccttcgggctggtcggcgggatcgccgacggctgggtcaggccgagactgccgagcgtgccacccaccaggccacccacggcgctgcccaggttgccgacggtgccattgagattgccgttgagcaggttgcccaccgcgctgccgacgttgcccagcgtgcttcccagcacgccgcccaggcctgtgccggggctaccggtggtgccgttgagaatgccgcccactgcaccaccgaccgtgccgacggtattgctaagcgtgccgcccaccgcgctgccaacctggccgacggtgccgttcagagcgccacccaccgcactgccgacggtaccgacagtaccgttcaatgcgccaccgactgcgcccaccgtgttgttgagcgtaccgcccactgcaccgccgacctggccgacagtgccgttcagagcgccacccaccgcacctccgaccgtatcgacagtcccgttcagagcgccacccacggcgcctaccgtgttgttgagcgtgccgcccactgcaccgccgaccgtaccgacagtcccgttcagagcgccacccacggcgccgccgacctggccaaccgcgccgttgagcgcaccgcccactgcacttccaacagtgccgacagcaccgttcagagcaccgccaactgcaccaccgactgcgccgaccgtgttgttgagcgtgccacccactgcgccgccgacctggccaacggtgccgttcagagctccgcccaccgcaccgccgacggtaccgacggtgccgttcagtgcaccgccgactgcgccgccaactgtgccgaccgtgccgttcagagcaccgccaactgcaccaccgactgcgccgaccgtgttgttgagcgtaccgcccactgcgctgccgacctggccaacggtgccgttcagagctccgcccacagcaccaccgaccgcaccgaccgtgttgttgagcgcgccgctcacggcgccgccaactgtgcctgccgtgccgttcagtgcaccgccaactgcaccaccgaccacgccgactgtgttgttgagcgtgccgcccactgaaccgccgaccgcgccgactgtgccgttgagtgcaccgcccactgcgccaccgactgttccgacagtaccgttcagagcgccgcccactgcgccaccgaccgtgcctaccgtgccgttcagtgcaccgccaaccgcaccaccgactgcgcccaccgcgttgttgagcgtgccacccactgcaccgccgaccgcgccgactgtgccgttgagtgcaccgcccactgcgccaccgactgttccgacagtaccgttcagagcgccgcccactgcaccgccaaccgcgccaacggtgccgttcagcgcaccacccaccgtgctaccgaccgcacccgcggcaccgtga

SEQ ID NO: 530192 - DNA, 246 bp, Stenotrophomonas maltophilia
atgctcgacagtgccacctgcatccacgccaggctcttgtcgatctggtcttccggctgctggtccttgccggtcaccacgtgggtgatcaggcctttgacgtcctcgttgaggaatttctgcaggttgctgccgaacatcgccatgctgctggcaacgctcacaatcaacgccgcgcgcgccatgttggtcaccagcaccatcatggagtcgcggctgcggccggtgacgatccggaagccctga

SEQ ID NO: 530193 - DNA, 273 bp, Stenotrophomonas maltophilia; identical to SEQ ID NO: 498400

SEQ ID NO: 530194 - DNA, 267 bp, Stenotrophomonas maltophilia
gtgatcgactccccgttcccgcttgaacccaccgccgccgtcgctggccgcagtgccgaaccactgcgctggatcggcctgcagcaggcccagtgccagtccggcgccgagcagttcacccttcaggcgcgcctgctcggccggatcggtggcacgacgcgcatcggcggcgatgcgggccacttcggccagtgcctgcggggtgttcagatcgtcatccagggtcgcttcgaccgtggccgggatcgcaacgaccgcctcgactga

SEQ ID NO: 530195 - DNA, 786 bp, Stenotrophomonas maltophilia
atggaggaactgacctccaccgtgcgccagaacgccgagcacgcacgccaggccaaccagctcgccatcggcgcgcacggtgtcgcctcgcagggcggtgacgtggtcggccaggtggtcaccaccatgtcggccatcgaagcctcgtcgaagaagatcgccgagatcatctcggtgatcgacggcattgccttccagaccaacatcctggcgctgaacgccgcagtggaagccgcccgtgccggcgaacagggccgcggcttcgccgtggtcgccagcgaagtgcgcaccctcgcccagcgctcggccgcggccgccaaggagatcaagggcctgatcgacgactcggtcggcaaggtcaacgacggctcggcgctggtgcacaaggccggcgcgaccatgggcgagatcgtcgcctcggtgcagcgcgtgaccgacatcatggccgagatctccgccgcctcgcaggaacagagcgccggcatcgagcaggtcaaccagaccgtggtgcagatggacgaaaccacgcagcagaacgccgcgctggtggaagaagccaccgccgccgcacgtgcgatggaagaacaggccggccacctcagcgaggccgtgtcgatcttcgtggtggacgaagccgaggtcgtcgccgccccgcgcgtcaccgccccggcaccgcgcgccgctgcaccggccgccccggccccggctgccccgccggcccgccgcacggcgggtggtcgcccgatggccaccgaactggccgacggggactggcaggagttctga

SEQ ID NO: 530196 - DNA, 486 bp, Stenotrophomonas maltophilia
atgagagacattagtaaaagacccaaagctccgatcctgacggaaatcaaacgccgcctttccgtctgcctgccgcttgctctccttcgaatcttgaacgaagaacagacgcgagtcgaaattgctgtccaagacgcgcttagacaactcgacacaaatcctgggctgacatctgttcaactggatagctccgagcgctttgctatcaggcaagagccagtcgtcatcaccaaggaacgcgaaggcagctacttcgttcgcgatgcgtgctctgtctatgctgacaagacgcgcgtgtcttgcgtcgaagacatcgttctctacctgatgttttccaagctgagactctttgcgcccgacttagcggcggacattcagatgtttgagcggaaaagactgaccaaggaggagtgtatgttgctgtctgagcgtcaaagtcagctggaaacggagttgcgatacatccgccagcggctagcccagtaa

SEQ ID NO: 530197 - DNA, 750 bp, Stenotrophomonas maltophilia
atggcaaagacgtggatcagacgaagtttgagagagcaacaaagaggcttgtgcgcgtattgcgatgagccactaccatcccgagcaaaaacctctctactcatccctacccaagtcggtggggcgaaggatgcgggcattgttctcgcgtgtaatgagtgcctgggaagcaagagtcagtcagacctcgcggggtggcttgctatgcctttccaccgagtgctttccaagaatgtttctggcctgctggtgaagcgcttagaagcggctgagcaagcgcagaaccacgaattgccggtggcttactcagtaaaccggaaagcggtcagaaaggcgctggaagatcgttggaagagcccacgagtgagagtgagggtcgaagacagcaccttggtcttcgatagggaacaacacgggcgcggagccgccctggctgtcttgcgaagccagttcgcaggggtcgttgaggaacgggctggtgaagtgagggtgcgtgtgccggtgcaacacttggacagggcaaagagcgtgcttgcgagcctgaattgttgtgtagttggactacccacaagtagctccttggctgggttgaagcgcgctaagaagaagacgccaatccggggaattagcaagcggcaaaggcaagagatgctgatgctgagagatacagaccagctgacgacgctggggcgggcggatgtagagctggcgttgcttaaagacgcttatcgaagactggatgatgcttga

SEQ ID NO: 530198 - DNA, 372 bp, Stenotrophomonas maltophilia
atgagaccgctcttcgaagagatgccgattcagaggctgagttgctcgctccctagcgttcgtctgcatgcaagcctagacgccgatctgagagcactggcagcgcttcaacagaagccgctagtgcaggttatgcgcaacatcctttatcactacttgcagatcgaagaagaattgatgcgattggaaatcgaagatgctcccgttcgacgctcaacgaagagcgaacaggtcatgagccagaaggtgagcgttacagaggagatcaagggcgcttttgtcgaacgcgcccggagtctctatcttccgcaaaccactatgcttcggatgatctttgaagcgggggttgagcggtggaaaagaacgctatga

SEQ ID NO: 530199 - DNA, 720 bp, Stenotrophomonas maltophilia
gtgaccataccgacacattgcggcatgccgccgcttcatctaaacattgaaggacttcgcgcgcatgctctgctgatgaacatatttattccagaaccagaggtgtcagccgaaaaaaggaaatggcgttcctggctggtgcattgcctcgtgaaaatggcccgtcattacaacgaagcgcggtcgttgatacttgaccaggtaagtgagggccaaagaccctatgccgaaatggtaaagggccgatatttgcccatttttgactatgcgttcgcaatggaagactgcatcacgtcgcttgaaaagacgatagcctgcatccgggctttgtcaaaaaaaggcgaaatgacatccgcattcgtcctggcgttaaatagcgagcagcagtccctaaatgcttttcgcagacagcaggaacatatgcactctcaaattgtcgcaggacaaaccggcgatggtccaatcctcgtggcgctgtctgacaatggcgacggcatgaggcttcggggtcttacgatggggttcgacgctctctacaagttgatcgacgctgtataccgcgacatatcgagcctattcccaatgcacgatgttcagtcgtctccgctgcaaggaggggcaccccaactttcagtgtctatgacaactgaggtaattcaaggcgatgggacgcaatcagaggtttggcaaccaggggggccaaaccgcaatgcttcataa

SEQ ID NO: 530200 - DNA, 1602 bp, Stenotrophomonas maltophilia
atgaaaagacaagcagggtatacactgacagagctactcataggattaggcattgttagcgtcgttggcgctgtcgcattcgtgctctaccaacccgttaaggcgcgtgcgcagacgcgtgcagagagcgagcgtctcaacaatctgtctatggaaattaggcaggcgtttggagtagtcggaagctatgaaggcgtcagcagtgaacgcttgattgaagagcgcttcatcaagctagggcaattccagaatgggaagatacgaaacgaatggggcggcgtggttgatgcacagccgttcggcatccggcgctttggggatgcctttaccctggattacacgaacgtcagtgctgcgagctgctcagacttcgtttccgcgaacgcaggcaatgcattcgatgtcgtgatcgatggcaccagcatcgtcaagaacaacaacgatcggttggatgttgctgcgttggtgaaggcatgtgcgagcgctcgcgttgtgagctttgtctatcacaacgaaaatatcggtcagttcatcgcgtcccctttgaaccttccgcaagctgatcagacggaaaagaacccgcctcaaactcctggcgtcacgcccccaggaacggcgacgggtggacgggaagccacgccggtccacccatacgtcccacagtgcggctcaaagccagccctgccctcctgtccagggattagcaaccagacgtgggaagccaccgtctttccccagtgctggaacctgattggttcttgtgcccttcccgtctctccgagcccggctcccgttgtgccggcactccctgtgcccgtccctcttcccgccgttcctcccaccgccccggcgctttgtagcgcttcttctgagtctcagcctgcggcctgccttgcaggaagcttcggcactgcaacggctgcgcgtcagaagacgtgcccagaggcttggggtcagccggtgtggaccggatgggagaccgacagaggcagctgtcgcagctgcccaggcagcgctcaggaagagagctaccaaaccgtcaccagaagcggctcctgcccctcaggtatgaccggctcaatgacgtatcaaacgcggttgaaaggcacgcggaacgtctcttattcgtgccctgcgggccagaccagtctaccctccccctcctacaccgagtgggtctgggcggagacaggtgaggtgttctcgaaagatgagagtgcgtgcaaaacagagggccttacggttgcgagcggcaagctcttcatctcaaacacgaacacgactcgaaccatccaagaaggcctcgttctagctcagaacagcgactggacaacgcttgcgagtgtatcgagcgactggccgcagagctacggacccgttcgggcttgggcaaacgtgagcttcacttttaacggggtcacccagggcttctaccaagccgcaaacgggaataccccgagtccagggaactctatcaactcttcggaaatccgaaccctcaactttaacgggaggttggtggacatcgatttccgcacttttggaacctctgatggaacggtaattaatggaggaattcgcattctttaccgcgttcgttga

SEQ ID NO: 530201 - DNA, 2019 bp, Stenotrophomonas maltophilia
atgaaaaacaaactagcgttatccaatatcgcgcttgcgattcttttatccatgtctgcggcgaacgcggcagagcccatcgaaattggtgaagacgtgcgagcttgtcccgatggagtgtccattggcgtcaatgcgaagagcgacatcatctgcgcaaaaaatggcggagtgacaatcggtaaaaacgtcaagtcaaacagtggtgttgtgatcggcgaggattcgagccaaagctacggaactaatggcaacatcatcggaacccaatccactggcgcaggcgattacgtcaacattttcggcaatgaaaacaatgcaacgtccgcaaacatttttggaaatcgaaacagagatgtgagaggaaacattgttggaaacgacaataggacgatcatggtcaacagcatcatggatgacccgaacgtttacggaaatcgcaacgtcatcagaacggacgacaacgcagcagcaagcagcgtttcaagcgcagtgttcggcaacgacaacagcataaagggcagcaacaacgccattgtaggaaacagcaatcttttagacgccagcggcgtggtcattacagactctgtgttcgtcggaagcaacatctacgcgaacagcgctagcggaaaaatcacagatgctgctgcattcgggaaaaatgcaggagttcagggaagccgcactcttgcgctgggtgcaggcgcaagcgcactcgttgacgactgcacagccgtgggtgcaggagcaatgtgcgtggagtcgaagaccaccgcgtttagcaacactcgtttgacgaacatcgccaatggcgtgagagacaccgatgccgcagcaatgggtcagctcgcaggggtggcaaggatcatcggcggcggaacacggttcgaaaacggcaacctcgtgagccctacttggtatttcagagacaacagcacacacacaacgatcagcagtgcactggacaatctggacgaacgaatcgagagagcaggttacggtggtgctggacaagacggctactcagcgtatgagttggcgcaacagtatggttacgagggcacagagcgcgagtggcttgcgagcttaaagggtgacaaaggagacaagggcgatccaggcgttgcgggcgaggctggcgaaaacggtcaaccaggaaaggatggtcaagacggcctgagcggtggtgaaggcgcgaaggagaacccctacattgcgatctcggatgacacgaggaacggcaacaacacacccgccgtggcatctggcgacaacgcgatagcggtcggaaacggtgcagtcgcgacatccggagccaccggagcgactgcagttggaactggggcatccgcaaacggcgggcacgcgtcggcgctcggtgcagaggcgacagcggcaggaaagttcgcaacggcgaacgggggcggctcagtagcaaacggtgaagcgacaacagccgttggaggcaattctcgggcattgcaagagggagcaacagcggtcggaacgggtgcgagtgccagtgctaagggttcaacagcggttggtaatgtggcagaagcaacgcacgagaactcagttgcgttaggaaatcagaccagaacgacggaagacaatcaggttgcggttggtggacgcaaagtgtcgcaggttgctgatgcacgtatcgaacaaggctcgactgacgccgtgaacggcggacagatctacgagctcagaaacgaattgaacgacaagtgggaagccacgaatcgccgcttcgacggcattgaaaaaaggctcaatggcttgggcgctcaaacagcggcgatgtcgatgatggctgcttctggtgcaggcttgccagtcggaaaagtcgcgattcaggcaggtgtcggcttcaacggcggagcgtcagcaatggctgtgggctaccgagttcgcactagcgaaaaggtgagcttctcagccgggctgagctttggcggcaacggcaccaaacccatgggcggcatcggcatgagcatcattcttgactaa

SEQ ID NO: 530202 - DNA, 132 bp, Stenotrophomonas maltophilia
atgttgtccagtaatttcgccgatgctgacagctattgtgtcgagggcttggaaggctcggtctttgaacgcaagttttggatgatagagaacgaagagaagggttgcgcagcacgcggttgcgcgaattaa

SEQ ID NO: 530203 - DNA, 1200 bp, Stenotrophomonas maltophilia
atgagtaaaagtataaacgacttctttaacgatgaagagaattcagcatcagcgaaagaacgcgcagtagccttgggcaacttaaagctgaactcttctaacggggaaacaagccttgatgacaagcttaaaagcctggacgttttggaaagacaactgcgacagcagcacttggattctggaaaccctcttcctttcgaacgttcagcttactcccccgaaatggacgatttacgcaacagtgtcattgaacaagaaatcaaagcagtctcagctgacaaagactttcttactcacatgatcgccgtcagatttatggacccgaatgggaagaacggggaatatttgcgtgaccccgcagtcaattctgacgccagaagaatcttgatcgacttgggagctgatgaagagagagcaaacgctcttgaccagaattacctgacacatcaactcaacagtcacgttcaggaagtcaatgatctgagagagaacggcaaaccggctcactacaatgtgaagcttatcgattcactgatcaataagggagctgacgtgaatggaaagtatcatttagaccgcgactacatccatgactacgacaatctttatgacattaattacagattgctggaaaaagagcgcagatatccgattgcatgccaaatccaagatcgcgatgtctttgaacacttgatcgaaaaccatgtgactgatttgaattttgaaggagaggaatctccattggttcatgctgtcgctcacaatgatctttcgaaagctcaatacttgatcgatcaaggaagcagcattgattcaagccctcaatttcatgggcgcggaatggacttttggtgcaatagcgtcgaaatgacagagctactaggcgaacatgggttcgacttcaaccacacaacaggggaattcagcgctccgccgctgacggtagcactcgaaagagttgagcgcgacttaaaatcagatgatcaggaaaaagcaaccaaaaacattgcaatcgcggagaagatgatgcagtttggcgctgatatcaacgcaaccaatcgtcatcatagcgtgtcacccgctcaaatgatcgaaaacctgggactcaatgaacacttcaaagatcacatcaaagcgcctgttcgtgaaaccccgagccctcaaagaaagcaagaatacagacgcggctttggtctataa

SEQ ID NO: 530204 - DNA, 405 bp, Stenotrophomonas maltophilia
atgcccgccctgtcgccgcgccgcccgctgctgtacacgcttgccctgcccaccctgctggcctcggccatcgcccaggcccaggacggcccggcggcacgcaccctggacaaggtgaccgtggtggccgagcgggccagcaccgcgaccaagaccgacaccgccctgaccgagacgccgcaggcgatcagcgtggtcacccagcagctgttcaccgatcgcggcgcgcacaacctgcaggaagtgctgcgctacagcgccggcgtcaccgccgatgcctggggcctggatacccgcaacgacgcgacctcggtgcgcgggctggaccccgtgcagtaccaggatggcctgcgccgcagctacggtttcagccctctcgcccgcccggaaatctatggcctgtag

SEQ ID NO: 530205 - DNA, 732 bp, Stenotrophomonas maltophilia
atgaccaccgacaacaagaccctggcggacgcgcagcccggtgggagggtgaggccgggggatgggctggcgacgctaccggcaagctggcgcgcgtgtgcggacaagcacgacgagaatgcgcgtgaagccgacagcatcggagatatgacggctaccgtccaatacctcgaaacgaagtccgaggtattacgtcaggttgcagcagaactggaagccgccctctccgcccagccctccccgggtggtcagggggatgcgtgggccatcaagctggcgcgcgagtcggcattcgcccacagcagcgagcacgcctacctgccgcagacccgtgaagaggccaacaactggcagccgcacgagtgggttgttgccgcgatccagaccgctgcccatggcgctcccaagccggagggacaggagccgatcacggtggaggccgtggccgagatcttcaaccatccagagtacggcctgagcatcaactggcttctggaaaacggcatcggcgaactgcaggtcggtgacgtgctgatggtgtcagaccgggcgatcactgatgaagacggctcgggcgaggtctacgccgccccgcccgcgcaggccgtggacctgggtgcggtgcgtgacgtgttccgacgctggcacgcgaacgagttgaacagtaccgatgcgatgctggcgctggtcgaagcgctggcagtcatcgacagccaggcggtgggcaaatga

SEQ ID NO: 530206 - DNA, 216 bp, Stenotrophomonas maltophilia
atgtacgagatccagtcgaagcgcgccgtcgagcggaaaatgcgagaacgaagagaagtgatgcagcagttggcggacatcgaggaagcgttcgcggacgttcccctgtcccccgaacttctggaaaagctgcggcactttgcgacgaccagtgcacctgcagatgcgaggaacctgctcgcgtcagtgcagcgcgtgcttgcccctctgcagtag

SEQ ID NO: 530207 - DNA, 645 bp, Stenotrophomonas maltophilia
gtgacccgtcagatctcagttccgttggagctcggctatatcggccatcaatttggagatggcttggtgataaacatcgaaagcagctgcctgtgcgtcactgggcagtgctccgatcttgaccagcggccttacccccgccgcatgctcaaggatgcccatgcagtgaaactgagcttccactttgtgctgcagaagaacagcggatggcacatcggcagctggataggaatccagcgttctcagttgaatctcaagatcgcggaacagcccttcaaagatgctcttgtggatattcctggtggcaatccggttggagagagccgcggctggagtcagcacatttccaagaagggtaaaaagtacttcagatctgcggttcttctccgactccgcgatgttcttgggaaccatgactgccgcatagccaaccacagcggcaacaacgacctgtgcccaagcagaccagttgacctcgccaaaccattcgcggactggcttgtcactgatgattccgccggtcacaacaacgcccgccataaatgtcaggacggccaccaccgcccaatctctatcagtccgtcctggcttcataggtttcccctgtcgatgcgccgaattctaccgcttggggtggccgcgtga

SEQ ID NO: 530208 - DNA, 498 bp, Stenotrophomonas maltophilia
atgtcacagcttccgctgccgatgacaccagcgcaatgcctggaacacgtggttgttccggccctcgcgctgctgggcaccgcccgctacgactcgcccgaggcgcgcgtgctgctgctggccattgccgggcaggagtcaggcttggcccaccgccgccaggtgaagggcccagcccggggcctgtggcagttcgaagagggcggtggcgttcgcggggtgctgaaccacccgtcgacccgcgccgctgccgccgcgctgtgcaaggcacggcgcgtcaccgcaacgccggccacggtgtatgcccagctggagcaggacgacatcctggccgcgggcttcgcccggctgctgctgttcacgttgccgcagcgcctccccgagctgggcaacgtgtcgatgggatggaagcagtacctggacgcctggcgccctggccggccccacattgaccgctggcccaggtgttacgccgcggccatgcaggcggcagcctga

SEQ ID NO: 530209 - DNA, 204 bp, Stenotrophomonas maltophilia
atggaccacaattgcaacaacaagcagcacagaggctcggagcacggctggcaacaggcaatggacgctcttccgatcttgatcatcgaacggaacgaagcttccgtcatgagcaccgatgcgttgatcgcggcggcccaatcgggcttgagggacgcctgcgagaactaccttacggccctggtcgcacgacgagaagtatag

SEQ ID NO: 530210 - DNA, 921 bp, Stenotrophomonas maltophilia
atgacggagcaggcacttcaggcacttcaacagtttgatttagaagcatcggctgttcacttgtgggtgttcaaggccagcaccaaggccgagcggttttccgcgcacttcgttcgcactgaccggtcgctcgatgaggctttgcgcaatttcgcgagttctgagcgggagcggatgacagagtgggtgccctacggtcatctggctcagccgaccgagaacggctgtctctctgtggctgtgcaagacaccgattttggtttgctcaagggactggtggatcgcccggaggtcgaacatgcggttgacgaactttcaaagctgaagaatgccgctggctacctcgtcaagttcgtagatgatggaaagacgctgtatgccctgcgtcgttctcccacgacttggaagccaacctataaaaagaagggggtggtcaacaccatcttcagaaacggtgagctgacagccgtggagggcgtggacttcaccattgagccagggtttgatctgtttgctttggatgacgcgcttcttgtcgccaacaagcgtggatttgagtcgatgatgaagtaccgttccggctacgtgcaagcctttggtgaattgcagggccagccagagtttgtggcgctcttcacggatgtgggaccgttggtagagcacgtaggtgaaaatggaacccaccttcggcgcatggctgtcattcaagataaagcgctctacatcgatcccaactatctgccggcgttgcgcgcagtgtgtggaaggcatggttgggggatacagtttgatgctgggggtctgatcatcccgaccaaggaaacggctccggtcatcatgaaattgctactggatcagcgattggtcagtgagatcacgcagatcatgtacgacgttcctgatggggtcagagtcaactag

SEQ ID NO: 530211 - DNA, 585 bp, Stenotrophomonas maltophilia
atgcagtttagaatttggtcggctattgtgcttttcctgggctcatatctgcccttggcggtcattctgctcgtccaggacatttctagtgagcactggggcgcgccagtgtgccggatcagtagctgggcctcctgtaacttgcagatcttcgatcatccatggctttcgataggaagcgtggtagtcacattcgcgtccttggtcctcgcaatcgtgactctgaaggccgttcggttgaagcaccgggtgcatgtccaagaggtgaaatcgattccaaatgatctcatcaactacgtctttccttacgtggtgtctttcatgggcttgagttacggagagccgcagaagctagccgggttcctggtcttctgggtcgggctattcgtgatcaccttccggtccggtcagatactcatgaaccccctattgatggtcttgggctggaagctctacgaagtaaagatggccctggggcaagagggtgcgatccgtatggttagggtcttgaaaaaagggcggttggcacccagcatccaatatgccgaagaaattcaggacgtctatctaatgggggatccatga

SEQ ID NO: 530212 - DNA, 462 bp, Stenotrophomonas maltophilia
atgaccaaccgttcttacgcgcacgtcggttgcgcgacggtcctactgggaggcgtcggcctactattcgttgctggcggccttgaggccctgcagcaggcggccactctgggctggctcgccatcgcgggcggcttggcaacgtgggccgtgttggggtttctctactggatcaacgcccgggcttacaggcgccaggaggaggcccaaggccaatcgtacgccccctccgcacaccagcgcggcgggttctggaaagggttcttcgtgacctgggccatcgtggcggctgcccatctggcctcttttctgggcatgggcttcgctgacctgctgccacatcctgagcaagcccgggcgatcttcagcctgctggtcttggcattggtgccggcgcacctggtggcgcctgtcttgggcggggccgtctacggcctggtccggtcaacggcattgaggtag

SEQ ID NO: 530213 - DNA, 354 bp, Stenotrophomonas maltophilia
atggcagcgagcaacggattggtatggaagattgcacttggcgtgttcctaggcctgagcgcatgcgggctggtcacgtgcacagtgctgggaacgatgggctacgccatcgagcagcagcgcgaggaacaagccaatcaggccgtggccgagttcatcaaatcggcgaacgatcccgatccattcggcctggcggcaaaggttgagcagcagcgccggatagacgctgagcgccagcgacagtacgaagccgcgaaccagccagcgccactcaagcctgatgagcgctgtgtcggcaaaacacgcctgcaacgcgtggacaacggatgggtgcaatccggctcttgcccgtaa

SEQ ID NO: 530214 - DNA, 135 bp, Stenotrophomonas maltophilia
atggccgctgatcaggtctgcgagtttttccgcgatccctttgttgtcgccctcatcggcggcgtgctgcttaccggcctgtattggtcgctggtattcgtgctgcgtggaaagggggcaggcaatggccgttga

SEQ ID NO: 530215 - DNA, 285 bp, Stenotrophomonas maltophilia
atgaccgaacccctactcgcatttgtcctactggcggctgttgcggccgtctccatcggtgccgcccgcatcgtgtcgtggcttctggaccggcgtgaccatgtcgccgtccagcgggccaaggaagcggccatcgtcgcccaggcgcgcgccgaactggccgccaccggctggaccgctgaggacgaagctgcgttccaagctgtgagatcgcagcagggcaagcatctgcgcgtacttcgcccggagttccggcgactgcttgaggactcccgccatgcgtaa

SEQ ID NO: 530216 - DNA, 678 bp, Stenotrophomonas maltophilia
atggatcgaaaccctcgattagctcaactgcttcctgatgctctcagctcgttcagcgagcttttccgcagattcagtcagccagcccagggtttcaatcatccatttgtactcactgcatttccgaacatcgaagttgacgtcctgatcctttgttctttccaggaacccctgcatcaaggcattcagcgcgagagcgttgtactcaacatcgaaaaccgctttctcgagctcttcatccgcagtgactggaagcatgtcgaatttcactgcagcacaacgagagatcatcgcgcctacagcggttctgaattgaaccagtttggacgcattgctcttatcgagatcctcaagattcccagagaactgcaacaggctgtgggcttggagggccatacgcctcaagtgcttcctctggtcggccagccggtcttttcgctccgccgttcctgcctgataggtgagggcgcaggctgctgcaccaatcacccaagttccagctgctgcaacccagtctgctcgactgccaggctcagcccccatcagggtccaggcacataccgccccagcagcaaaaatgctcgcagcgccgagggcgacccccttaccactcttccagtattccgttcccaccgctgctccttggagaatccgccgttgggggagattctggcatga

SEQ ID NO: 530217 - DNA, 1140 bp, Stenotrophomonas maltophilia
gtgaccaatcagattaagcgcgcacttgtaatccagcgccgaatgactcactaccgtgtcccgttcttcgaagaactccggcggagcctatcggagaggaacatcgagcttacgctggcttacgggaatggcaccgcagcggagatggccaagaaggattccgcgcgattgccgtgggcttatgagcttgatacccgatactttgcaaatggtaaagcttgctggcaacccttcggcgcgctagctcaaaatagcgacatcatcgtaattacacacgagaataagcttctctacaatctcgtagctcagtatgcatcgccacgctcaaaaagagttgttctgtgggggcacggcgcaaacctgcagggtaattcgcgaagcactgctgaacgagtcaagaagcttaccgccaaaaaggctgactggtggctggcctacaccgcccacagcaaaccgttgattgagcgatctggttttccaggagagcgaatcactgtgctcaacaatacaatcgacacgaccttgctgtcccaggacatcgccaacattgatgaagggctgatttccgagttcaggaacactcactcgattgctgatggtccaatcggactctacttgggatctctctattccgaaaagcggattccattcttaattgaatctgcagtcaggataaggagcagaattcccaacttctcgcttgtgattgcgggcgctggcccggaagatgacatcgcgattttggctgcgagaacacatccctggattcacttcatcgggccagtgaagggcaggcagaaagccgcggcattggcggctgcccgagtactactaaatcccggactggtagggctcgggattcttgattcatttgtaagcggaattccaatgataactacggactgcggaatccacagccccgaaattgcctatcttgaaagcggcgtcaatgggataatgactgcaagtgacgcggatgagtttgtactggcagcatgtcagatgattgataatgacctcctacatcagtccatttcgatcaatgcaaagaagagctcagaagaactgaccatcgtcaaaatggcagagaacttctctgcgggactgagctcgtgccttgcccaacctgcatttagatag

SEQ ID NO: 530218 - DNA, 1152 bp, Stenotrophomonas maltophilia
atgatcgaactgcttctactttcaagattcttcgtggactatgcgtggagcatcaaggctgccaatgtggttcacaccgcattggtcatcgcgcttgcgctattcttcttttatcgaaacatagcacgccacccaaaagtaaaaacggtggatcttctggtgctgctattcgccatttacataggattcgcatactacatcaacaggtcggacagagccatcttcgatctcgccaaactgtccccgtgtgtcgcgtactatgtaattggcagattctattccagagagcctgactttacgttcacttcccggacgtccatcctcgcgatcgctggaatttcaatggctgcggcgcttggagttggatatatcgactggggcggaatcagcacattcacggcaggctactacttcaagacagacgtcgccctggggaccatcatcttcgcgtccttcgcaatgctcgcgacccgtcggacgttcgtccatgcgatcatcttgctcgcaagtgcttatattgttttcaaagcaaattcgcgaatagcgatccctctgctcgcggtactcccttgccttctgtttcttagcaagagggagctgttcgcaaaaagcaccagagcaataatggttactgccgcgtttgccacgatttctctgtcggtattctcgctcatcgactttgatagtatgcacctcctaggggtggatttttcaaatccgttctctgataagaacacacaggggcgaaacctcatttggtcagccatcctcagttactataattctttcggactcctccagaagatgacaggggcgggactggcagccgacattgtcgcggcttcaagcttctatgagagcgattcattcgttgagtccagagcccacaacagttttctctggcttctggtgtgcttcgggtggattggcagcgcaatctacctatcaatgttcggggcattcctcaaacaagcgcactcactggcatcagtcaaccccagatccaaggtcctctttatatttgcctgcctaatggttatttttctatttttctccgtctccaatgaggcagtagtcaaaccacaaatcaccttccccctgtttttgttcgcgggactctgctgtaatccggcctcaaaactgagggattga

SEQ ID NO: 530219 - DNA, 1068 bp, Stenotrophomonas maltophilia
atgactgtgcttagcccacgcaagccggagaaattgagagcaagctactacaagcgaatcttctggctctgtctactgttgtgcccagtaccaatgctctcggtgtcggtccccggtgtgtttatctggggccatcccgcgccggcgaatgccctactgattgcatctggctttacacttttatccacatcatcagtcttgagagactgcctactccgaatatatttttgcaccggacaagaaggacgtgccgtcgcgctttctctgacgattgccattacaaccgctgtcattttctacctgcagtacatctccaatcagaagattacatctgtaagcgcagtacttatgacaagtgcaggtcagatttctggagtgatcctcggctatttgcgtctgccagcgtcaaaaaaacaccgaagacctgccagcgcccttagaagggacaccttggagttgtggaccggcggcaagtgggccggcttgacggcccttgtctcatggcttcatggtcagtcatatgtgtatgcaagcgcgctgatgattggcccccaagcagtcgcctacgcgaacgctgctcgaatatttgtctccccattccaagcttttctggcatctgtttcccgggtgatgcttccaaagcttacgaaactcagggaaccctccgaaataatcaagactgccgtgacttactcgcgcaatctactattcctattagcggcatactcagcttgctgcttcttggcttacgcagtgaagcctgagattgctggctcctattcaggacgcacgttcgagattgcactcgcctgctggatactaattttggccgcccaggcattgaaggagcctccgtcgattgcaagccagtcgatgggcaaattccgctcggtattcgcctcatactcccttgccgcatcgatatccatcactctatcgtttgtgctagccccggggctgggactattcggcccactaattgctgtagccgctggcgaatttgccctttgcatcacactatgggccagactctggtctaagagtcgcaaagcagccccggcccaataa

SEQ ID NO: 530220 - DNA, 1119 bp, Stenotrophomonas maltophilia
atgaccaaacgcgcattgatcacaggcatcaccggccaggatggctcctacctggcggaattgcttcttgaaaaaggctacgaagtgcacggcatcaagcgccgggcctccctgttcaacacacagcgtgttgatcacatttatgaagatccgcataagccggacccgcgcttccatctgcactacggcgacctgaccgacaccagcaatctcactcgcatcttgtcggaagttcagcccgatgaggtctacaatcttggcgcgcaaagtcacgtcgccgtgagtttcgaggcgcctgagtacacggccgatgtggacggcattggcactctgcgtcttctggaagcgatccgcttcctgaagctcaaggataagactcggttctatcaagcctcgacatcggagttgtacggcttggtccaagaggtcccgcaacgggaaaccactcctttctatcctcgaagcccttacggggttgcgaagctgtatgcatactggatcacggtaaactaccgtgagagctacggaatgtacgcctgcaacggcatcttgttcaatcacgagagcccgcgccgcggcgaaacgttcgttacgcggaagatcacccgcggactggcaaacatctctcaaggtcttgagggctgcctctacatgggcaatctggatgcgctccgcgattggggccacgccaaggattacgtccggatgcagtggatgatgcttcaacaggacgagccaagagatttcgtcatcgcgactggagttcagtacagcgtccgccagttcatcacgatggctgccctcgagcttggaatcgagctttctttcgaaggaagcggagtgaacgagaaggcagttgttcagcgcgtgaacggagacatttcgccaggcgtaaaggtcggcgacatcattgtgtcgatcgaccctcgctactaccgaccagccgaggtagagactcttcttggcgaccccgctttggcgaaggctgagctcggttggacgccacagattacgctgcaggacatggtctcggagatggttcaggctgacctgggcttggcgaagcagatctcgctacttcgcaaggctggtcataaccccctggtcgctcgcgaatag

SEQ ID NO: 530221 - DNA, 1167 bp, Stenotrophomonas maltophilia
atgaagatcgctgttgtaggagctgggtacgtcggcctttcgaatgcggtacttctggcgcagaagcacgaggtaattgcgacagacatcaacaaagatcgcgtggcggagctcaattcccggcggtctccgatagaagacgccgaaatttcggagtatctggccaccaaggagttgagtatcagggccaccctcgactggaacgaggcatacaaggacgccgatctcgtaataatcgcaacgccaaccgactatgatcctagcaccaattttttcgacatcagctcgattgaatcggtaattacggatgtgttgtcggcaaatgaatcggcattgatggttattaagtcgacacttccagtcgggtgcaccaattcccttcgcgcacgctttggcagcaacaatataattttctcgccggaatttttgcgtgagggaagagcactttatgacaatctccatccaagtcgcatcatcgtgggcgagcgctctgaaagggcaagcgcatttgccgaactgatgaaggacggcgcgctcagtagagatataccggtcctccttacggactcgaccgaagctgaagccatcaaactgttcgccaatacattcctggcaatgcgcgttgcgtatttcaatgagctagatacctacgcagcaagccacggactggacacccgccagatcattcagggggttagccttgatccgaggatcggcagtcactacaacaacccctcctttggctatggcggctactgtctccccaaggacaccaagcagctccttgccaattatagcgatgtcccccagaacctgattcacgccatcgttgaagcaaatcgtactcgcaaggatttcattgcagatgagatcatcgcgaggaatcctcgtgtggtcggcgtataccgactggtaatgaaatcggggtctgacaatttccggacctctgccatacaaggagtgatgaagcgaataaaggccagaggaattgaggttatcgtttacgagccagtgctctccgagcccgagttctacaactctgaagtgataaacgacctggaagaattcaaggcgagggccgatgtcatcgtagcgaatcgattcccctcttcacttcaggatgtcgccgaaaaggtttacacacgcgacctctttggcgccgactga

SEQ ID NO: 530222 - DNA, 468 bp, Stenotrophomonas maltophilia
atgaagaaccagaagggcttcaccctgatcgaactgatgatcgttgttgcgatcatcgccatcctggctgccattgcgctgccggcatactcgaactacaccaagaaggccaaggtctcggaagtgatccttgcggcttcttcgctgcgtaccgacgtgtcggagtacgcggctagcaacaacaagctgccgggcaacgactggaagccggatttccagccgacgaagtacgttgaaaagttggaatggaaggatggcaagattgtcgctactgctcgcgctattggcgacactctgatcgacggtcagacgatcacgctgactccggaagggaacggcagcaacggcgtgattccgagctggacctgcgagggctccatcaataccaagttccgtccgggttcctgccagggcgctgcctcgaccagcggcggcggcaccagcggtggcggcacgagtggcacctaa

SEQ ID NO: 530223 - DNA, 1191 bp, Stenotrophomonas maltophilia
atgagcatgcgtcccgagtctgcagtgcgggcgcgcgtcggaagctggggagctttgggtgcgttgttgggatttgtacttggcagatcacttgaatgcagtagctatacgttgtggttgctactggttctgggtgcagcgattcctatgtggctgctcgaatggagacggttgccgcatgcgctactgatgcatgatcgaagaagtgcgctgtgggggatattcacgatttcgattttgcaggttgcaattttgcttctgcagttcctttttgggggagatagtggagctgctgttgtactggctctgcccttcttgctcgtcgccggtagcatcttgcttctattgggattactccgcccaagcttgttgggctcgacgattcctgacgcaggaaatgctgtccgagcgtggtttgatggaggtaggccgaacaattctcagcgaaatgctctcttggggtggtgtgtaaagtgctttttcttgcccttgatgcttgcgtggtcatggacatggctagcgagtcttgagtacgcacttccgtccacaggatcacttcgctggtatgccctgggaatgattgccctttatgccatcgatactgcattcggagtaatcggatatgtttcaacctctaagcatcttgggggagagattcgatcggttgactcgacgatgcttggatggttgtcggcactggcatgctatccgccgttgagtgcgctggttctggatacttggttgattgcgcggaacgcaaatgattggaagaattggctctccgaggggagtccgcttgcggttatttgggcgatttccattcttctgctgacatctgtctacacatggtccactgttgtgtttgggactcgcttctccaatttgacccaccgcggaatcatcacgcatgggccttatcgttggaccaagcatccagcctatatgtgtaagaatctgtcctggtggcttgtttcagtgcctttcatctcaaatggaggggcagctggggttctgttgtcttgtctggctatgctggcggtcaatgcaatttactgggtccgtgctcgtacagaagaacgccacttgttgatggatgccgactacaggcgctatgcagagtggattgatgacaacgggatcgtgtcaattctgcgacgatgtggcttgaaaatgattcgatctcagtcctga

SEQ ID NO: 530224 - DNA, 456 bp, Stenotrophomonas maltophilia
gtgcagggcccgttcgacagcttcctggccctgcgtggcctgaagaccctgccgctgcgcatgaaggcgcactgcgccaacgcgctggccctggcccagtggctggaaaagcatccggcggtggaaaaggtgatctacccgggcctgccgtcgcacccgcagcatgagctggcgacccgccagatgggcggctacggcggcatcgtctcgatcgtcctcaagggcggtttcgaggcggccaagcgcttctgcgagaagaccgagctgttcaccctggccgagtcgctgggtggcgtggaaagcctggtcaaccacccggcggtgatgacgcacgcttcgattcccgtggcacgccgcgaacagctgggcatcagtgatgcgctggtaaggctgagcgtgggcgtggaggatctgggggatctgcaggtggatctggaacgggcgctgggcggctga

SEQ ID NO: 530225 - DNA, 606 bp, Stenotrophomonas maltophilia
gtggccggaacctgggaggcagttgccttcctcgacctgcatgaagcggtcaacggcccagtgcttgcgacctactcattcaagttcgacttcaccatcaccgaccacaacgcggtctccatctacttcccgctcttcgaccaagtcacaccgcatgtcggcctgaacctgcagtacgacccgatcgcacagaccgtcagcggcagcaccaaggtggacatgtgcctgtacgacgggctggggtcacagagccagtacctgggcatcaccgtgcgcgacagtggcgcaagactgccgggaccgtccggttactcggtctggcacaccgacggtggcagtgatgccacccagcgcgtggactacacggtcaccctggaccacagcggcaccgccatccccctgcgtaatggcgtggagcagctgctgcacggcatcgataccgcaaagctgcgcctggtgatgttgccaggcatgacgcaaccggtgttctgcgtgcccacgccgatcacgctggataccccccgcgtgtcggtcagcaccaagcgccctggccactacagcggcgatctcaaggtggaactgcgcgttcccactgccacgccctga

SEQ ID NO: 530226 - DNA, 699 bp, Stenotrophomonas maltophilia
atgaagtgcttcgttcgctatctgcttccgctgtccttgctgttggcggcgcaagcccacgccaatctcaccgtgcaccccatgcgcacctcggtggacgcgaagaagggtgcgcagatccgcatctactctcaatccacccagccccagtacgtgcaggtatcgatcaagcgcatcgttgatcccgccggggaaaacgagcaggaagtggaggaggagccgggcgatgccgccattgcggtaacgccaggcaagttcgcactggccggtggtggcaatcgcctgatccgggtgattccgctgcagccggtcgaaaaggaaaccgcctaccgcgtgtacttcgagggcgtccgcggccccgatagcacggaacgtggcggcgagggcgaccgtgcccaggccaacgtcggcgtcagcctcgtgtggggtgcactggtcaatgtgctgccggccgaggccacgatgcgggtgcaggtggacgggaaccgcctgcgcaacaccggcaccgtgcgcgtcggcatcaccagcatcgccgactgcgatgggccgcggtgcaccgctcatgacgtctcgcgcagcctgtatccgggcagcgcgctggaactgcccttcgccataacgcccggccacacgctgcagctgcgctaccgactgacccgcgatggctatcgcgagcatgtgcagacgctagcgccctga

SEQ ID NO: 530227 - DNA, 3882 bp, Stenotrophomonas maltophilia
atgaacaggatttaccgtcgtctttggtccactgcccggcagtgctgggtggtcaccagtgagctcgcgtccacaaagcgtaagccaggggcttccacacgcccccttcgtcgcagtacggcagcggcgctggtcatgttgttcggtgcggccggcaccgcccacgcggaacgcaatcttctctcgtgctacaccgccagccaaggatgcgtgccgacctgggcatgggtgcatgactaccagtggatcactgggaatgggcgtttcgtgctgctgaccggcaatgccatcacgttcgagggcgactatgcgactgcgtttggtaacaatatcacctcctatggtgaccgcaactccgccttcggctatggcgccggtgtagcgggcggatatgccaccgccgtaggtgcttttgccaacgccacgggaatcggtgcaacggcgattggcaatgatgcgaacgcctatggcggcaacgcggtcgcgctgggcagcaaggcgacggtcataaccggggcgggcgtttccggtatcgccatcggtgccgactcgcgtgcaggcacgcagggctggacgggggccgttgcactcggtggcgaagcgtctgcgtcccacgacagcattgccctggggtaccaggcgcgttcaagcgcggccaactctgtggcactcgggcgcgggtcgcaggccaccgaggcctacaccgtatcggtgggcaacggttctacgaaacggcggatcgtcaatgttgccgacggcaccatcagcagcagcagtactgatgcggtgaatggccgccagttgcaggtggcaaagaatgacatcaatgccgccaaagccaccgcggcaacagccaagaccacggccgaccaggcactggccaattcacgggtggtgacccaggcatcggccagtggcaccgtgcgcgtgggcggtgacaacaccggtaccacggtcagctttgccaacaagaacaacgccacccgctacctcaacggcattcgcaacggcgcgctgagcaccaccagtaccgatgcggtgacgggccagcagctgtttgccaccaacgccaacgtgaccaaggcgcagagcgtgggcgatgcggcccagagcgcggccaacagcgtcaagaccaccgccgacagcgcgctgtccagggccaatggcctggccggcctggtcagccaggcctcggctactggcaatgtacgcctggggggcgagaacaccggcaccgtgctggatgtgcgcaacaaggccaatgccaaccgccgcatcagcggcctggccgatgcaacgttgaacaccaccagcaccgaggcagtcaccggcaagcagctcacggccaccaacgccaatgtcaccacggcgcagaacaccgccaccgccgcgcagacagcggcgaccggtgccaggaccaccgccgacagcgcgctgggcaaggcgacggcgctgggtgggctgctgagtcaggcctcggccagtggtaccgttcgcgtgggcggtgacaacaccggaagcgcggtcagcgttgccaacaagaacaacgccacccgctacatcaatggcattcgcaacggcgcgctgagtgccaccagcaccgatgcggtgacaggccagcagttgtttgccaccaatgccaacgtgaccaaggcgcagacggcggcggattcggcccagagttcggccaacagcgccaagaccaccgccgacaccgcgctgggcaaggccactgtgctgggcggcctggtcagccaggcctcggccacgggcaatgtgcgcctgggcggtgacaacaccgggaccgtgctggatgtgcgcaacaagagcgatgccggccgtaagatcaccggcttgagtgacggcaccctgagcagcaccagcaccgatgccgtcaccggcaagcagctctccgccaccaatgcgaatgtgacgacggcgcagaacacagctactgccgcgcagacggccgcgaccggcgccaagacaactgccgacaccgcgctgggcaaggccaacgcgcttggcgggctggtaagccaagcctccgccacgggcaatgtgcgtttgggtgccgagaacacgggcacggtggtggatgtggccaacaagaacggcgccaagcgccgggtgaacaacgttgccaacggcgtggtgagcagcaccagcaccgatgtggtgaccgggcagcagcttcatgccaccaatcaggccgtttccacccagggccagtcgctggtgctgcacggccagcaactggcgacgcacacccagtccctggcagcgcaggaccagcgcgtgtcgaccaaccggactgatatcgaccagctgcgctcggacgtggacaacttcgatccggatctggatggcgtggtgaagttcagtgccgatcgcctcctggtggacatggaaggtgcacgcgtatcgggtatggctgccggggatatcagttctgtcaccagtacagacgcggtgaatggcggacagttattctcgaccaatgttcgagttagtgagctcgagcgcagagggcgattcctgagcgttggttctgacgatgagagcattgatgcagatgccggtctgctcggggttgcgttgggcgattcggcaaaagcctctttgggttctgagggcggagtagcaattggaagctttgcggtcgccggtgcgttcaactcagtcgcggtaggaagaggtgcggttgtcgcagagggcgcagaaagaggctttgcgttgggagtcggttccaacgtgtatgcaaaggaaggcgtcggttttggcgcgttgagccgtgtcgtagcgggcgctgatggagcggtggcactgggttcttattcaatcgcaaccgaagcaaataccgtttcggtggggaacggttctgtaaagcggcgcctggtaaaccttgatcgtggcatttccgaccacgatgcgacgaccattgcgcagctcaacgaagctcttgccggactcggtggcggtgcgggcttggatgcgttcgggaacgttgttgggcctgcctatagcgtgcaaggtggcaagcagaacaatgtcggagacgccttggctgcactcgatggggcggtggtaagggctgaccgtcgcgcagatggcctcgaaggtcagctgcgtgcgaccttccaacaatcaccctcgacccgggcggatggagttggtcagctgaatctggcaggtgcacaaggtatggttctgtcgaatcttgccgatgggcgtattgccgccggcagccgcgaggcggtcaacggtggccagctgcatgcggtgcagcagcagctcaacggccgcatggatgggctggagcagcgtgttgacggtcagccgcgggcccgtgcgatggcgactgcatcggccaatgcgggcacgccaacgcccaccccgaccagcagtgaatcggccgcggccactccgccggtggccaacgagggtgacaaggccgtggccgacagcggcagtgcgccgtcgtcgtcgcccacgccgcagcccaagtccaagaaggatgatgcgcccgcaccgaccccgcaggtggacaccgccgagctcgagaagatgctcgcccgcgccaatgagtacaccgatggtgccatcaagggcgtggagcagcgcctggacaagatggacaagcgcttcaaccgcatggcagcgatgagcagtgcgcagacggccatggccatgaacacggccggcctggccacgtacaaccgcctcggcgcgggcgtgggctatgccgagggtgagtccgccatggcggtgggctaccagcgcgtgctcaacgaaaagggctcagccaccttcagcctcaatggtgcgttcaccaacagcggtgaacgcagcatgggcgtgggtgtgggcatcggctggtaa

SEQ ID NO: 530228 - DNA, 963 bp, Stenotrophomonas maltophilia
atgtatttgatggctaaaaactggctgggccgaacacggaaagtaagtgtttggatgtgggcgcttgtatgccttgtgttgctcaccgtattccaagtacgtactcatcaccttgatgatcgtctgtacttttggatcaagacccactggcacacagacgattggcaggagcgctctgtgtggctgcctggctatcgggttgagctggatgctaaggcggttcccggtgtggacaacaacctttcgggcctgaccttcgatcctgacctaaatctgctgtgggcggttaccaatggcccgaacgagctgctggccctcagtcgtgacggtgacgtggagcgacgttacagcctggatggcttccacgacgtggaagcggtgtcctatgccggcaacggtcaactggtcattgccgaagagcggcggcagagcctggttatcgtggatatccccatcgacgaatacggtaagctttctcctgatcgaccattgagcctagaccagtattcagcgctaaccttggcgcttggcaaggaggacaacaaaggccttgaagggctcgcctacgacctaaaaggtgatcgtttgtttgtgaccaaggagcgtgacccccggcaattactggaagtgagcggccttcgtgccagcctggaaggaggcgtttccctgcacgtccgcgacatgtccaacctagtaaaagacaaggtgtttgccactgacttgtcttcggttgtattcgatcaacagagcggccatctgatcctgctcagcgacgagtcgaaactgctgattgaaatgaccgacgagggcaaggtggtgagtttccgctccttggcgagggggtttgctggtttgctgaaaggtataccccaagccgaaggcgtaaccatcgacgatgaagggtatttgtacgtggtcagcgagccgaacttgttctatcgctttacccgcgagacagattga

SEQ ID NO: 530229 - DNA, 360 bp, Stenotrophomonas maltophilia; identical to SEQ ID NO: 328157

SEQ ID NO: 530230 - DNA, 606 bp, Stenotrophomonas maltophilia
atgcttgcagccgcgaaagaacgggccgtgaatgatggtgtgcgcgcaccggagtccaagcagcgacatggcgatttactggagagcttgcaagagctgcaaagtgaaacgcgcttgctggttatcggtcgccagggcgagtctagtggcggtctgagtcagcatgtcggaagccagctggaaagcgttattcgtatcatgcaccggccaatcctggtcaccccggccaacttccaaaagcccaagagcgcgatgctggcattcgatggcggcgctacaacccgcaagggtgtggagatgctggcagccagcccgctgctgaaggggctgccgatccatctggtcatggttgggcccgtgaacgacgaagcgtccgcgcagctggactgggcgcagaaagtgctgatcaacgccggatttaccgttcgcgctgagactcggagcggtgaaatagaacgtaccctgcacgcctatcagaaagagcatggcatcgatctgctagtgatgggggcttatggacactcacgtatccggcagttcctggtcggcagcaccactaccagcatgctccgtaccaccaccagtccgctgttactgctgcgctaa

SEQ ID NO: 530231 - DNA, 375 bp, Stenotrophomonas maltophilia
gtgccgcgcctcgccacatcccggcggcaagccgcgggatgcgcgccactgccgtccgcccacaccggttcgcggtacgcgcgccacgcgcccgagcgcacgctgctgtacgcgttggtagaggcgcactacccggacttcattgcacggatcgaagcggagggccgctcgctgcccgggtatgtccgcgaggcgttcgatgcctacctgcgttgcggcgtactcgagcacggcttcctgcgggtggtgtgcgagcactgccgtgcagagaggctggtggccttctcctgcaagaagcgcgggttctggccgagagtgcgcggcacctggtcgaggaggtgttcggcccgcggcctgtgcggcaatgggtgctga

SEQ ID NO: 530232 - DNA, 1140 bp, Stenotrophomonas maltophilia
gtgctgagctttccgtaccccttgcgtttcctgttcgccagcaagccagaagccattggcccggtgctgggcatcgtgcagcgcgtgatcgccggctggttggccgatcaagccggcatcgaccgcgccagcgcccagtgcggcgcggtgacgctgatccagcgtttcggcagcgcgctgaacctgaacatccacttccacatgctgtggctcgacggcgtgtacgtggaagccaccgagctgccgcggcgcgaactgcgcctgcaccgcgcccgtgcgcccaccaccgcgcagttgacccagctggcagctaccatcgcgcaccgggtgtgtcggcacctgacgcgcaaaggctggctcgaaggggagggcgaatcggccttcctggcagacagcgctgcaggcgacgacagcatggatgggctgcggatgagttcgatcacctaccgcatcgccaccggccgcgacgctggctgcaaggtcgtcacgctgcaaacgctgcccggtgacgccggttcgctggagggcgaagccggcaaggtcggcggcttctcactgcatgccggcgtggcggccgaagcacacgaaagccacaagctggaaaagctgtgccgctacatcacgcgcccggcgatcagcgagaagcggctgtcgatagcgctccagggcagggtgcgttaccagctcaagaccccgtggcgcaatggcaccacgcatgtggaatgggatccggtggatttcatcgccaagctggcggcgctggtcccgccacctcgcgcgcatctcacccgcttccacggcgtattcgccccgaatgcaaacctgcgtgcgcagctgacgccctcggggcgcggcaagcggcctgcgggcgatgcggcgccagtggacgtcagcgcccacgacgcgccgcgcagccccgaggagaagcgccgtgcgatgagctgggcgcaacggctcaagcgggtcttttccatcgacgtcaccgcctgcgtccactgcggtggcaccgtgcggatcgtcgccagcatcgaggaacccaccgccatccgcgccatcctcgcccacttcgagaagcacggcgcgcgggaagaagcgcactacaggcccgcagcgcgcgcgccgccagtgcaagccgcgtga

SEQ ID NO: 530233 - DNA, 294 bp, Stenotrophomonas maltophilia; identical to SEQ ID NO: 340123

SEQ ID NO: 530234 - DNA, 1128 bp, Stenotrophomonas maltophilia
atgggtctcggcctcatcatgcccgtccttccgacgcttctgcgtgagcttgtgccagcagagcaggtcgctggacactatggtgccttgctgtcgctctatgcattgatgcaggtcgtcttcgcgcccatgcttggacagctttcggattcttacggtcggcgtccggtacttctggcttctcttgcaggagccgcagtcgattacacgattatggcatcagcgccggtcttatgggtgctctatatcggccgactcgtgtccggcgtcacgggcgcaaccggagctgtagcagcctcaaccattgccgattcgacgggggaaggttctcgcgcacgctggttcggctacatgggggcctgttatggggcgggcatgattgccgggccagcacttggtggcatgctcggtggtatctctgctcatgccccgtttatcgccgccgcccttctcaacgggttcgcgttcctgcttgcctgcattttcctcaaggagactcatcacagccatggcgggaccggaaagccggttcgcatcaaaccattcgttctgttacggctggatgatgcattgcgcgggctaggtgcgcttttcgcagttttcttcattattcaactgatcggccaagtgcctgcagccctatgggtcatatatggcgaggaccgttttcagtggaacaccgcgaccgttggtttgtcgctcgcggcgtttggggcaacacatgcgatcttccaagcgtttgttaccggcccgctttcaagccggcttggagagcggcgcacgctgctgtttggcatggctgcggatgcgactggcttcgttcttctggcttttgccacgcagggatggatggtgttcccgattctgttgctgcttgccgccgggggtgttggcatgccggccttgcaggcaatgctctcaaacaatgtcagcagtaacaagcaaggggctttgcaaggaacgctaacgagcctcaccaatctaagctctatcgcaggaccgcttggcttcacagcactctattctgccaccgccggggcatggaacggttgggtttggattgtcggcgcgatcctctatttaatatgtctgccaatactacgcagaccattcgcaacttcattgtga

SEQ ID NO: 530235 - DNA, 627 bp, Stenotrophomonas maltophilia; identical to SEQ ID NO: 149106

SEQ ID NO: 530236 - DNA, 861 bp, Stenotrophomonas maltophilia
atgctggtggccaccttcgcgaccgtgcgcgacgtatatgccaatcgtcccgaaggtgccgtcatctacggccttttcagttcgatgctggcgttcgtgcctgcgctcggccctatagccggtgcgctgatcggcgagttttggggatggcaggcgatcttcatcacactggctgcactggcttcgctcgcactcttaaacgccagtttcaggtggcatgaaacccgaccgttggatcaggccagaacgcaacgatctgttttgccgatcttcgcgagtccggccttttgggtttacacggtcggatttagtgccggcatgggcacattcttcgttttcttctcgacagccccccgtgttctcataggccaagccggctattccgagatcggatttagcttggccttcgcgactgtcgcgctggtcatggtcacgacaacccgcttcgcaaagtccttcgttgccaaatggggtatcgcgggatgcgtagcgcgcgggatggcgttgctcgtttccggcgcgatcctgttggggatcggccaacttttcggatcgccgtcatttttcagcttcatcctgccgatgtgggttgtcgcggtcggcattgtcttcacggtgtccgttaccgccaacggcgcacttgcgcagttcgacgacatcgctggatcagcggttgcgttctacttctgcatccaaagcctgatagtcagtatcgtcgggacattggcggtgacgctgttaaacggcgatacagcgtggcccgtgatttgttacgccacggcaatggcagtgctggtgtcgttggggctggcgctccttcgatcccgtgatgctgccaccgagaagtcgccagtcgtctag

SEQ ID NO: 530237 - DNA, 1014 bp, Stenotrophomonas maltophilia; identical to SEQ ID NO: 49376

SEQ ID NO: 530238 - DNA, 315 bp, Stenotrophomonas maltophilia
gtgactaaatggctttatctagtcatcgcaagtggcctcgaagtcgcgtgggcaattggactcaaatgcgcaagcagcctggcggagtgggttgtcaccctggtgtgtatcgttggtagcttcctcttcctggtaatggcaaccaagcgtctgggggcctcaacctcctacgtgttcttcgtgacgttcggcaccatcggaacctacattctggataccgtgtggttcggaaagcccttcagcgcggtagctgcggtggctatcgccgttgtcctgttctgcattgtccagatcaagcgcgaggtcaaagaatga

SEQ ID NO: 530239 - DNA, 318 bp, Stenotrophomonas maltophilia
atgattggctggatctatcttctgctcgcaggcttgctggaagtcggggtcgttgtcggcatacgggaagtgtcggcaggtcgatacctcaggggaatcccgctgcatgcactgggcatgtccagctcgctctatctgctgtacctggcaatgaatacaatcgacatatccatcgcctacgctgcgtacacaggcatcggcgtcctgggtacagtcgtcgtagggatggccttctggggcgagaaagcctcattgagaaagattggctacctcgccctgatggtgagcgcgttgactgtcatgaagctcgcaggctga

SEQ ID NO: 530240 - DNA, 1329 bp, Stenotrophomonas maltophilia
atgagtctgcggcttcgggcagtcatgattactggggtttcgctgatccttctttgggtatctgccgccggctggatgatgcgcgacatccactccaagctcgaccggacccttgacggccgcctcgccatgtcagcgcgcatggtgtcgggacttcttgagcgagcggcactggcgccgagtccaggaaactcaagcttcgccgatgtggtgcgcttcagtggcgaggaaggcatcgcatgcgagatcaggtccatgcgcggacagctgctggctcgaaccacgacaggcccccattcggatctcgaatcattgccccttggctttagcacccgagaggtgcttgagcagaagtggagaatctacgttcttcacgccaatggctatcagatcatgacagccgatcgcgttgatcgacgggacgcgctgaccaacgagttgctgggggctgctggagtgccgtttctgattgcctttctcggcggactggccgcgctatggatgggcattggacgggggctggtcccgctgaaagtactgtcccagcaattgcgtgacaagcatgcggacgatacgtctccaattgccgtgagagattccccctcggagctgcgtccggtactggacgcaatgaatggcctgctgaagcgcttggcacaggcactgtccagccagcgggcatttaccgatgccgccgcgcacgagctgcggacaccactcactgtgatagatacgcatctgcaggtggctcgactcagcgagggtgaggacgtgatgctctcgcttgccagtgcacaggaaggagtgaagcgcctggaacggacgctgcatcaaatgatgatgcttgcgcgcgcagaggcctcgatcatcgaaggggacgagtgcctctcgattgttgaggtcgtcaacagtgtcgccctgcagaacagcgacatctcccgagatcgcatcacgttgatcatggaagggggggatgcaggcagcaccgttcctagatcgatgcttgaaatcgcggttcgaaacctggtggacaatgctctgcgctactcgctaccaggcagcgcggtcgaaatccgagtgagcttcaacagttctgggcgatattgctccgtgtgcgttgccgaccgtggccctggcctgacttcagagcaaaccaagcaaatcggacaacgattctggcgtggagaccaggggcgacaacgcggtgatggcgcgggcctgggcatctcaattgtccgcatcatcgttgagcgcttcggggggcgactggatatgaggccaagagagaatggcggattggtcgcggagctcattgttccattgccatag

SEQ ID NO: 530241 - DNA, 669 bp, Stenotrophomonas maltophilia
atgcgagtgctgctggttgaggatgacgagctgattggcaaaggcattgtggctggcttgcgtgtgcatggcattgctgtgcatcacgttgggacggcaaaagacgctgaagtcattcaacaggaagaaatttttgatgccttgatactcgacctcggtcttcccgatcgagatggcatggacctgctcagcagcatgcggtcttttgagtcaaatctcccggtactgatcctcaccgcacgtgacgcaatcgagcataggcttaagggcctgcatggaggcgcggacgactatttggtcaaaccattcgatctgcgtgaacttgcggccaggctgtacgcgctggtcaggcgcacgcagggccgagcagctcaggtgatcgtggcgggccccttgcgtctggagccggagagcggattggcttggctgcgcggcgaacctgtcgccttgtctcggcgggaaattgatcttttgacgcacctggccagtcttgaggggcgctgggtcccccccgatcttctgaatgagcgcttctacgggctcaatgaagatgtcagcagcaatgcactcaatgtgcatatccacaacatccggcgcaagcttggtaccgacgcgatcgagacggcaagggggttgggctaccgactgggatggaggcccacatcatga

SEQ ID NO: 530242 - DNA, 1932 bp, Stenotrophomonas maltophilia
ttggctttctatcgtcgtttagctgcggccgttctactgttctgcttcgcgattggcagcacgtgggcgaacggtctcttttcatcatggggtagtaacgagcagactttcctggacgctgcagaagtcttccgactgcagcctgtgcaacaggacggccgcttgtactcggtacaagggcatgtcgcagatgactactatgtgtatcgccactcgatcaagttggttgacgcaagaggtcaagagataggcttgaaccttcctgccgggcagccgaaacatgatgaattcttcggcgacacagaaatctatacgggtgacgcctttcgcttgaagtggccggcgttggagtccggcgtattgacgttgcactggcaaggctgtgcagaagccggtgtctgctacccaccgcaaaccatgcaagtaacgcttccggagctcaaggaagtaccttcggcgcccgcaagcaaagcacacacagcgcccgcgtcagagatttccagccgacgagccacattgtccgccagcaatggcccggctgccacgttgccgccagcaggtgcagctgggagagaaaaagagaggtcatcttcgggggcaatcgacgccagtgccgctacggaattggctgaagatcagtctgctgctcagaagctcgcgacactcgggccagtggccggaatagtgctgttctttggcttcggattgctactggcgttcacgccctgcacgctgccgatgattcctatcgtatccaccatggtcgttgggagccaggcgaacacacggcgtgcgctgttgctctctctctcatatgtcctggcgatggccggcacctatgcggcggtgggggttgcggcgggactggctggcgccaacatccaggcgacactgcaatccccttggctccttggggctttcgctctattgtttcttgtcttggcaagctcgctgttcggcctgttcgagctgcgcctaccttctgcactggccaatcgtctcaatgcagcagggcagggacgggccggcgggagtatcacgagcgctgttgcactgggcttcctctcggcgctacttgttggcccctgcatgaccgcgcctctggctggcgcgctgctatacataggccagaccggcagcgcgttctatggcgggcttgtgctgttcgcccttggcatcggcatggggctgccactcctggccattgcggtgttcggcgccagagtcctgcccaagcctggagcatggatggacagggtgcgcgttgcgttcggctacgtgatggtcggcatggcgatcatgatgctgacccgattcctgcctgatgccgcaagcttggtcctctggggcgcatgggcactttcggttgctatcggtctgctcgcctgggggcgtgcagtaccggaaaggccgcgattggcatggacgcttcgcaccggtgcggcccttggggggctctggtctgtcctcatgctcttgggaggtgcatccggtggcgagtcggcatggcagccgttggcgcatttgcgtacacacgcttcagtcgctgcagcaacgacccagaaaattgactacgttcaggctaaaacggtggacgatgtagatgcacgcttaacggatgcggtcgaacgtggtcagtggaccctgatcgatttctacgccgactggtgcatcagttgccatgtgatcgagcgcaaggtgtttgggaatccggatgtggctgcgcggttggcacgcatgcagatcattcgtccagatgtgactcgcaacgatgccgaagatcagtcactactcaagcattggcaggtccaagggccgcccacgctgatcctgatcgatcctgatggcaaggagcgcagggcgcagcgcgtggtaggcgaaatagatgctggcagcttcctggaccggcttgatgcggcgggggcaccatga

SEQ ID NO: 530243 - DNA, 819 bp, Stenotrophomonas maltophilia
atgatcagcatcggtccgttctccgttgacatagtgatcgtcgccatctctgtgctggttgcctggctggcggcgcgcatactggcctccaggtcgcccggctcaccccgcaagattgcgggaagcctgctgttcgatgccgttctcgtaggactgttggctgctcggcttggatacattgcgttttggtggaaggagtacgtccagtctccatggtcgatgatcgcgatcggcgatggcggctactcgctgtgggtaggcgtactggctgccctgctttttgtcgtttggcgcacacgatcggcacgcccgctgcgactgccagtagcggctggcgtgatggccggagtcgttgcctggttcaccgcgggcggagtgatcgcgctgctgcagagttctgcgcctcctctgccagacattcagctgacgacgcttgatgaacgtcaagttgccttgagctcgtatgcgggccgacctgtcgtagtgaatctatgggcaacctggtgccctccctgtcgtcgggagatgccgatgttggaacgggcgcaagcggacttcccggaggtcgccttcgtcatggtcaatcaaggcgagcacgcgccagaaattcgagccttccttgagcgagagggcctctcgtttgaccatgtcttgcgtgacccaacatccaccgcgatgcacgtgatgggggcgagagcactgcctacgacgctcttcttcgatagcgatgggcgcttggtggattcacacctcggtgagctgacgatggcgagcctgaagaacacgataatgcgccgctttgcgcaagactcgcagtag

SEQ ID NO: 530244 - DNA, 774 bp, Stenotrophomonas maltophilia
atgtctcagaaccaaaatgagtatcgccttcccttggcaatctgtttcttgctggttagtggttgcagtcaggcacagaattcggagaacccgcctgccgtgagggcattggagcagcaaggtctcaccatcatgaaagagttcgatgcaggaggggggatgcgcgcctttgctgcggccgcaggcgacgagccgattgcggcatacctcatgaatgacgggaatgtgatcgtcggcacgcgtctggatgcaaatggcaataggatcgacagtgcaaaactacagcaactggtggccaaaccgacagcggatcgcgtttgggctgaattggaatcatccacctgggttctagacgggaaggcgagtgcgccgcgcgtcatttacgcgtttgccgacgccaactgcccctactgccacctcttctggaaagctgctcgcccttgggtggatgccggcaaggttcaactgcggcacgtgctggttggggtcatcagagaggacagtccgaacaaggccgcggcgattctaggtgctcccgatcgatccgcagcattccgggagaacgaaaacaagttcgatcgcggcgggatcacgccggccaagagcattccggccgatgtaaggaaggccctagatgagaaccagatgctgatgactgcgctgggcttccgtggaacccccggcatcgtcgttcgcgatgaggatggcgcgctcaagaagtacaacggaatgccacgcccagaaaaattgcctgaagtacttggttcgcgttag

SEQ ID NO: 530245 - DNA, 369 bp, Stenotrophomonas maltophilia
atgaccatcgatatttgcggcctttcggccaaggaacttcgctccctgattgctcaagcggagaagcagcagttgaaagtgttgacacgccctaaggccactgcaatgcgagccaagatcaacaagtacgtcaaggatcatggctacacgatagaagagctctacggcacttcagtgatcgcgccctccgaagctgccaggaagcgagccaatcggaggcccgccagatcgacagtgcccaagaccgctcccaaatatcgtaatcccgccgtgcgcggccagacgtggtccggtcgcgggaggcaaccgcgatggatagccgagctggtagcgaatggaagatcactgagtgatcttctgatcaagtag

SEQ ID NO: 530246 - DNA, 1098 bp, Stenotrophomonas maltophilia
gtgagatcaattcccttcattatcgctgccacgctggcgggaactacgctggctgcagatgcttctgaggatggcctccatacagatccatactttgatccaggaggcgccgtcaggttcaactatggctggctcgactacgggccgaccagccgcttgcagctcgaattgttgcgcgcagacctcgacgctggagccgggccgctctcattctccgcccagtaccgttggtacgatggcttcgacgccgtgcatcacgtctacgtaggctggcagttctccgacgccacccagctgaaggcaggtatccagcaggttcccttcgggctgcttcccaccgtttcgcagagcttctggtttggctccggctactacttgggcattgaggatgattacgatccgggccttgtagtgattcaccgcagcggcagcacgacctggcatctcggctggttctccggagacgaatacgggtcgggggctcgctacgatcgctactcctttgatgtagcgcagaccgaagcgttgccgtatcgcgagcggcaacggatgcatgcacgcttggagaatgcacgcggctgggccggcggcgaactgttgctgggcgtatcggcgttcgctggcaaggtgcagaacactcagacacggcgccaccacggtcatcagggcgcggcccttcatgcacagtggaagcgcgatggttggaccgcgcagttgcagtgggcgcggtaccggtatgacgtgcccggcgatcgcatcgcgatgtcggcgttccaatcccccttcgaaattgccgcacaggcggatgtgccaagcgccaacgtggcctattcgttcggccagaagggctggctggatgatgtcacctgctacaacaacctcagcatgacccgcccggtcgggcaccgtgcaggcctacgtgactcgtggcagaacgtgaccggctgcagcctgcagaagggaatcatgctcacctatgtcgactggatcgctggccgcaacatgtggtttgccggtggtgatggtatcggcatcgacgaaacaggcccttcccgctggcattcacggctgaatttaaacatcggcttctacttctga

SEQ ID NO: 530247 - DNA, 747 bp, Stenotrophomonas maltophilia
atgcacagatacagcttgccctgctgggtcttgatctcggtgacccggctgcttccgtcgcaggtcttcgggcagtacaagtctgccgaagtccacacgatcaaggcgcgcattccattcaaggtgatgctgctgccggtgctggttgttgttgcccttgttttcgcctacttggcctatagatcgctcacttcacccggccttacagggggcgagggggaagaggggacgcaatcggcgtcagccgatgcggccccttctccgttccatccagcgggagcgaaggaagaggcgccgcgctggccgactgccgctgcatacgccaaggaccatctgcctcgcatcagcaccatgccctggactgcgccggtcttcgatgaacgtcaggcgcgctccgatccgcagctggtgtgcatgtcgtctttggagggcttggatgcgcaaggcgtgcatcaggaggccagctgccggtgcttgacagagcagggcacaacttacgagctgagtcagccggaatgccgcacgctggctcgcaatggtcctgtctacaacccgtatcgggagcgcttagaagaacgtagcacccagcgtgttgaggatctcgatcgatctcggccgggtgcagcaacgggacgtgtcgggggtgttgcccagcacgttgaacgctccatgggcacgtttccagagtcgccgtcctatcgatctgattcctacatgaccacggcgccggggccgaataagctgtga

SEQ ID NO: 530248 - DNA, 627 bp, Stenotrophomonas maltophilia
gtgaccagtagcgcgcgcgaactgttcaagtggctggccgtgatccttatgactggggatcacgtcgccaaggtgatctacggcgggtacgtgcctggactcagcgaagcggggcgggtggccttccccttgttcgcgctggtgatggcctacaacctcgcccagcccggcgccgatgtgatcaagtccgttcgcaggctcgcgctgtggggcgtcatcgctcagcccgtgcacgctttgacgttcggctactggttgccgctgaacatcctgctgaccttcgccctgtgtgctgctgtggtctacgcggccggcaagcggaactggatcgtcctggctttagccgcggctatgttgccgctgttcgtggactaccagtgggccggggtagggttcgtccttctggcatggctgggattccgcacagggcggccgctgttgaccttggcggcattcgcgcctctgtgtgtcttcaacggcaacccgtggtcgctggtagccattccggtggccgggggactatcccacacggcgtggccgctcccgcgcgggcggtgggcgttctacggctactacgtcgcgcaccttgcgtgcatagggctgctggcgcctatactgcggccatga

SEQ ID NO: 530249 - DNA, 324 bp, Stenotrophomonas maltophilia
atgggcgtcggcgccgccctgttgatcgcgattgcgatgggccttatcgaatggaacgcccgccgacaggccgccgcaatgacgcgcgaactaacgcgcccgatgaccgccaaggaagaggcgcaattcaatgcagacatgcagaagtttgatcaagagttcagggcggccatgcagaaagcagcaccgcaaccacgcgtgatcaccctgcccgtcgcagatcccgcgccgcaaccgcttagacctggggaacgctgcattcaggggcgcagattccagcgcattgagggtggatggcgagatcgtcccaacgacccgtgttga

SEQ ID NO: 530250 - DNA, 345 bp, Stenotrophomonas maltophilia
gtgcgtgatcgcaaactgaccggcccttgggccggtttttcgtttaagggtggccgactggtcacacccgaaggccgagagctggaaccgcaggatctggcctggctgtcgctcaccgctgcgcaggcacaggaatggcgccggatgatgggcgagctacgcggcaatgctcggactaaggctaccggaaagagcttccccgcagtcccggctgaagtgatcgaggtggccaccttgatggcgcgccgacaagagcggttgtccagggtattggctggccccgacgccgagccgcctgcagcaatcctacccgtgccggggccgaaacgccgccagcgcgtgtga

SEQ ID NO: 530251 - DNA, 615 bp, Stenotrophomonas maltophilia
atgctgaagtggctggccgtgatccttatgactggggatcacgtcgccaaggtgatctacggcggctacgtgccaggtctcagcgaggcgggcagggtggcattccccctgtttgcgcttgtgatggcctacaacctcgcccagcccggcgccgatgtggggaagtccgttcgtaggctggcgctgtggggtgtcatcgcgcagccgttccacgcgctggcgtttggctactggttgccgctcaatatcctgctgacgttcgccctgtgtgccgcggcggtgcacgcggtcaatcagcggggatgggtggcgctcgctgcctttgggttcgctgcattggtgctgccggcatttgtggactaccagtggttcggcgtgtggttcgtgctgctggcctacttcgccttccgggaaaagtcgccgggcgcgctcattgctgcattcgtcccgctgtgtgtgttcaacggcaacctgtgggcgcttgtggcgatcccagtggcggtgagcctgtctcgggtgtcgtggccggtgccgcgtggccgttgggccttctacggctattacgtggcgcaccttgcgtgcatcgggctgctggcgcctatactgcggccatga

SEQ ID NO: 530252 - DNA, 1428 bp, Stenotrophomonas maltophilia
atgcgctcggcactggttcggatcgttagtgcactgaccttcgtcgcgatctgcgcggttacctacgtcggtgccggtgtcgcaattccggaagcgcgggccgctcagttctgcgcatttcctaacggcagttggcaactgtgcgatgagggcagggcgttcgccgaatgcaacgccggcctttctcgcgcgcgtgctgaagtagcgaggataggcggcactgcggcggttgttgaggcctgcatccttgtaaggaacgtcaatacgaaccagtttcggtgtagctacaaaggatattcggcgggcgccagcggcccctgtccgggccatgagtcgataggctctggctatccccccgctaagacctgtgagactcgaagcgattacaacggtgctttcccgggtagtcagtacaagccccgcagcggctcaatttcctgtgacctgggctgctcgacgtactggactcacaacgttgacggcaccgttaacggagcacccgatggctccacttgcacgtcggaaaaatacgactcggatgaggattgtcagcgcaatggcgcgggctactactacaaccgccagattggtgtttgcgagcctcccgagtcgaagtgtgagaatgggaaaagcgcaaattcgctgggtaagtgcgagccagagccctgcccggagggcatggttcagaaccccgatggcacgtgcaagaagaaggacaacgagtgtcccgccggtaacgtgcgatcaccagatggcaaatgcctccccggcgacggccagtgtgcgaagggagaggttcgtggtccggatgggacgtgcaagaaagatgcggatgacgatggcaacccggatgagccgggcgataaagacaccttctctggtggtgatgattgcagcacaccaccttcctgtagcggctctccgatcatgtgcggtcaggcacgaattcagtggcgtatcgactgcaacacgcgcaagaaccggaacattgccggaggtgcctgcaacacgatgccggtctgtacgggtgagaagtgcgacgcaatggagtattcggggctgctgatgcaatggcggtcagcgtgcgctctggaaaagatggctaactcaaccggcaatggcggcgagaacggggatttgaaggcgattcgtgacgcgttgaccggcaccggcgggactgtcacgttgccgcctgaccgacctgcgtccgatgcatgggcgccaggtggcggcaaggttaccaatccggacaccagtggatacggctggggcgggacctgccctcagccgccaagcattgaagtcttcggcaattcaattcagatcaacacagcgccactctgcaattggttgttcctcgggggctacttcgtgatggggctggccgcgctcgcctctctccgcatcgttgcatctaaggacgcctga

SEQ ID NO: 530253 - DNA, 225 bp, Stenotrophomonas maltophilia
atgatcgatccgttcattgccttcgtgctgctggcggccatcgtggccgtttcgattggcagcgccaaattcgtttcgtggtgcctcgaccggcgcggggagtctgcccgtcgcagtgcacgcgaagccgccatcgtcgcccaggcacgggccgaacttgccgccacggactggaccgctcaggacgaagagtcctaccagcgccacagggggcgtgcggcatga

SEQ ID NO: 530254 - DNA, 3423 bp, Stenotrophomonas maltophilia
atgtcaactgccaagacaattctccagagccatcacatcctggagcaggcgctgttcaccagcagtccattgctgaaaaaactggatcaattcaacctgctgggcaaggatacatcggccaatcgactgtatttgccggtgataggtgatctcgccgatgatttggatacttcaccccacaggggccgtacgcgtagctcctacacggatggagtgatggactacctcgaaagcctgagcgagactcgagacggccgcgctgccctggtgaacgacgttgaggcacttcaaagagtatcggcgagggttgagcgctttcgagacacgctgaaagtggcgctgataaacggcgacgcgtttgcaacaacgccgaacggaatgaccgatgcggaagcaaacgctgtcaataggaagctgtactcccacttcgcccaatacgatgtagatcatgcaggtcagatcaatgcgttgaaacatatgggcggtgtcgagtccgagtgggcggcggtcacccgttctgattcgagggtttcgcgagttattgatgaaatctacggggcgccgggtaacttggtgcgcggatcaagcaaggtggatatgtcagctcgtgaagtcgcgggcagaatggaaatgcgcctggccatatctgacgcggtgagggctggtcgcttgacaatgtctgagtcaacggctgctcaggtacgtagggcgctgctggatgatctgcccgagatcgatggcgcggctcggggcttctacgatctgacatcgggaccgctcgggaactacaagcccgtctcgcagcgcggctttgtctctatggaggcgctcctcggcgaagcctccaccagccaactgatccgctccggcggcctgctcgcatccggcgccgacgctgtcgttaccgcccgtcgcacctcgcagctgctggaagagggcaacggcaccgccgcccagtccgagctcacccatgccttggcgcgcaacggcggtggctgggtcggtggcatggccacggcatcggtgatcggcacgtccagcttcgtccctgcggccatcgtcgcaggcgatgcgctgctgatgagcaaggcgttcgacaagggcgccgatctgctcgacaaccgcgccgtctaccggcagaccgacaaggccgatgtcacatggcagttcgatggccgcaactggcagcgccaggcggtcatggacagtgcgggcgatggccttggcaatccggctgagcgcagtgtgggcgccagttacgagaaggcccgcgagctgggcgcatacgcccatgtaaaagcggtagagctggcgctgggcaaggtaccgccgccgcaggatcctttcagcatcccggcgaaggacggcgaggggcgtctggacaatcccaactggcaccgcgatgcgcagaccgaacagtggacgcggcaggtcaagattggcgtgtccggtgccaacgaccggggtgtgtatgagacgcagaccgccagccccgaacgcgccaacgagttgaatcgtgaggcggtgcagcgcatcgagaacaacatcgccaacggcaaagccgcgattgccgccagctacctggagacctacgccgctacccgcgccagcgacttcctgccgctggtgccggaagcggtggagcaggcgcgtgccaggcccgacgccatccagggctcggacaaccagctctaccagcgcgacgaacaagggcaatggaaccacgctggccagatcgcgcagggcaacatggcgttggagttggagctgacccgcaccatccagcagccgtcgctcgatcagttcaaccagaccattgccgcattggacgcgcgaccgttgccatctgcggcggaagtgaaccagaacgagctgcgccacagctactacgctgcgggcgtcgcgctgtcaccggcgtgggagcaggccattgccctggccacggcacgcacgcgcgagcagcacggcatcacgggtcccacgctgcaggaactggggcctgtagccgagggcaacgcgggcgcgtcccggcccatcacccattaccaagtgggccaggatggcgtggcgcgcgccgtcgcgaccaccagtacgcaggagctgcaggccgcatggaatgaggtgcgggcgcgtgccaatgagcaggcgccggtgccggactcacccgagctgcgcattgccgcgctgtcggcgggtgagcaggaggcgtaccggcaggcactgcaggaggccaatcgacagggtgctgcgcaggtggatgcagggcaggctgcacgagcagccgcgcaagtggcacatggcgacaagccatccgagcaggatgggaacgtggaagtacggcctgaagagccggccactgcgcagcccatcgcgcctgcaccggttgcggcggcgccgccagcggaagcggtcacgccaccgcctacgcccgcggcacaggacaagcccgcgcctcagcggcacgccgagcagcgcgatccgccgcgacgtgaggcggagctccaacctcagccccatccaaacaacgaggcgctcaccgaaagccgtaccgcctcacagacgccggagcccgctgggccgatgcaggcacacccggccgcacctgagcgcgcgacgccacatgccgccccgcctctggatgcggcaacgcagatgatgcccacgcagcgcacagagcaggcagcggaaccggagaagatggccccgatgcctgcggttgctcccactccaaagcagtacatggcagtgcaggaggtcgagccagtgccgttcaaggagccgctgcctgctgagcccgagcgcgatccatggcctgtggagcaggaagcggcacaacacgtgccagagcccgaaccggctccgttgggtgaccacgagccagtcactgcggctgtcactgttcctgccgagcctacgacggcgccaagccatgaaccggccgcgttcgcaccggaaccggatgaggcatcgggcccgaaccgggcgctgcaggaccccacgcagcccggccaccccgatcacgcgctgtatcagcagatccgtgagggcgtggaagcgctggacgccaagcacggccgcagcttcgatgaagtcagcgaacgcatgacagccagccttctggtactggccaaggacaacgacctggaacgggtggaccatgtgctggtgagcaacgctacgagtgaacatccggctgggcacacgctgttcgtggtgcagggcgaaccgagcaatccggcgcatcagcgcgctgcgatgccgaccgagctggcggcgcagacatcggtggaggaatcactgcagcagttcgactctgtcagccgcgaagcgcatcagcgtgcgcttgccaatcagatggatcagcagctggaagatcagcgggtgcagcacgacatccagattcgtgcggccagcgggggatga

SEQ ID NO: 530255 - DNA, 303 bp, Stenotrophomonas maltophilia; identical to SEQ ID NO: 365131

SEQ ID NO: 530256 - DNA, 261 bp, Stenotrophomonas maltophilia; identical to SEQ ID NO: 344057

SEQ ID NO: 530257 - DNA, 945 bp, Stenotrophomonas maltophilia
atggagattcgacacttacgctgctttctcgctgtcgccgaagaactacatttcgcccgcgcggcggagaggctgcacatcgagcagtcaccgctgtcgcgcactatcaaggagctggaggagagcctgggcgaacagttgttcattcgtaccagccgcagcacgcggctgacacgggcgggcaagctgtttctggagcatgtgccgcgcatcttcaccgccttgcagcaggcgcgcgatagcgtgaatgcagccaccaacggcttccacggtcagttgcgtatcgcactgtccgacggcatcacgccctcgcgcctgccgtccttgctggcgctgtgtcggcaggaagaacccgaagtcgagattcgcctgttcgaggtacccttgtcgcagcagatcaagggactgcatgacgacctttacgacgtgggctttgcccagtccgatgaagttggagaaggcatcactgccgaagccgtttggagcgatgcgctgatggtggcggttcctgcacgtcatccgcttttgaagcacaagcgcatcccgctggaagaagtgctgcgctatccgctggtgttgtgcgatccgcacgtatgcgaaggccatgctcgccaagtcgagcgcgtactgcgccggatagatatggagccgctgattgccgaacgtgtggcttcgtgcgatttgatgatggcgttagtgtcggcgggctttgcgctgggcctagccggagcgccgcatatcgcaggcagccgtgagcctgggattgtggctcggccgctggcgggtcgctcacccatgctgaccacttatgtgctgcaccgggaaggtggatcctcggacgtgctgtcacgctttatcgagcgtgtgcaggccatcgaatcgccggacggcatcagagccacgcccccccttgaacccgattcccaagaggaagtcgagtcatga

SEQ ID NO: 530258 - DNA, 1602 bp, Stenotrophomonas maltophilia
atgtctgactccacaaggactgattccgtcatgcttcaaacgccatcccgcatccgaccatgcctacgtcggatgccacatctggtactgctccctttggtggcgttgacgctggcagcttgcgcagtagggccgaattacaaggcacctgccgcgccccaggcagtgacgtatgcccgccaagaccccgttgccgtgtcccagcttgtaccggaggccgatgcgcaattctggcgggaactggatgacccggtgctgcactctttggtggagaatgctcttcacgccaatcacgacatccgcatagcactgtcgcgctacgagcaagccagcgcactgtcgcgcgaacgtcgccaagactactatccgacgctgggcgcgtccggtgaaatcagtacccagcgcgccagtgctgcacaagcaccggatgcgtcccgctccgaccgggataacgatctgcattcggctggcctatccgtgatctgggaattggacttctttggccgagtgcggcgcagcgtggaatcgcagcgcgccgagaccgaggccagcgcagccgacctggcgggcgtacaagtggctatggtggccgagttgaccgacgcctatttccgcttgcgcggcttgcaagtgcaattacaggtcgcgcgggacaacgaaatcaaccaagccgatacgctgcggctgatcgaggtcttgttcgagaacggccggggcacgtcgttcgatgccgaccgcgcccgcacgcaattggcgctgacacgctcgcgcattccgccgcttgaagctgaggctgctgtggccgcccaccgcattgccgtgctcactggccgcacgcctgcggcgatggccgaagtgctggatcaccccgcagccttgcctgagctgcccgcccagatcaacgccggtgcaccgggcgatctactgcgtcgccgtcccgatgtggctgcggcagaacgtaggctggctgcggccactgcgcgtatcggcgtagccatggcagacctgttccctcgctttacgttgggagggctgatcggcacgcaggcgttgggctttggttcgttgttcgagcgtgatagtgaaacgcgaatgatctcgctcggtgtgggtggttccttcctagacgtgggccgggtgcggtcgcgcatcgcggcggccaattcagccactgccgaaaacttggcggtatacgagcgcacggtgctgcgcgccatggaagaaaccgagaacgcgctggtacgcctatcgcgcgcgcagaccgagtacgccatgctggtacaggcgaccgaggccagccgccgggcagccaagacggctcgcctgcaatttgagggcggcgccatccatgttttggatgtgctggaggccgaacgttcacgcttggagtccgaagacttgctggcacaaagcgccacccgcagggcgacggcgttggtggcggtctacaagacgctggccggcggctggtcacacgccttgcccggaccgcagggcgaggcagtcgcgcagcgccacaaaagcggcgacaggcctgaactggatgaactcggtgagatgagcggctacaacgctgcgactctcaaacggcctttgtactga

SEQ ID NO: 530259 - DNA, 3168 bp, Stenotrophomonas maltophilia
atgaactttgcccgctttttcgtggacaggccgatttttgcggccgtgctgtccatcatcattttcgtggttgggttgatcgcgatcccgctcttgcccgtcagcgagtacccggaagtcgtgccacccagcgtacaggttcgcgccacgtatcctggcgcaaatccgcgcgaaatcgccgacacggtagccgcaccactggaggcatccatcaccggcgtggaaaacatgctctacatgaagtccgtggccggtagtgatggcgtgttggtgctgaccgtcaccttccgtcctggcaccgatcccgacgacgcccaggtcaaggtacagaaccgtgtcgcccaggcagagccgcgtcttcccgaagcggtgcgccagcaaggtgtggtgaccgtcaaacagtcccacaacgaaacgctggtcgtgcagttgcgctcgccgggcgatcgctatgacgcgctgtacctgcgcaactatgccgtgctccatgtacgcgacgagttggcacgcatccagggggtgggcgatgccaagatctacggctctggcgactacgccatgcgcttatggctggaccccgacaaaattgcggcgctgggtatgaccgccggcgatgtggtcgaagccgtgcgcgaacagaacgtccaggtctcggccggtcaactaggtgcgccgcccaacccctcgggaagcgacttcctcctgtccatcaatgcgcagggccggctggtgacggaagaagagttcggcgacgtcatcgtcaagaccggatcgcagggtcaggtcacccggctgcgagatgtggcgcgcgtggaaatggacgcatccagctactcgctgatgtcgttgctcaacaacaagcctgctgtcgcgatctctgtccttgaagccccgggcgccaatgccatcgaaatctcggatcaagtccgcgcgaagatggacgagttggccaagcgctttcccgagggagtggaatggtcggtggagtatgactcaactgtcttcgtgcgtcagtcgatcaaggcggtcgtcaacactctgctggaagccatcggactggtggtgctggtggtgatcttgttccttcagacttggcgtgcctccatcatcccactgctagccgtgccggtgtcggtggtaggcaccttcgccgtgctgctgatgctgggcttttccatcaatacgctcacgctttttggactcgtgcttgccatcgggatcgtggtggacgacgcgatcgtggtggtggaaaacgtcgagcgcaacatcgccgaagggctggcgccgctggctgcggcccatcaggccatgcgcgaagtcagtggccccatcgtcgccatctcgctggtgctgtgctcggtattcgtgcctatggcattcctgtccggcgtgacagggcagttctacaaacagttcgccgtcaccattgcgatctccacggtaatttcggccatcaactcgctgacgctgtcgcctgcgctggccgcgcgcctgcttcgcccgcatggtgccgcgccagacctgcccacgcgggtgctggatcgcagtctgggctggatattccggccgttcaaccgtttcttcctgcgcagcgcggatggctatggaaacagcgtgtcgcgcatcctcgggcggcgtggtgcggtgtttctcgtctacatcgcgctactggtggcgacgggagctgtgttcaaggccgtccctggcggattcatccccatgcaggacaagctgtatctcatcggtgtcatccagctacccgagggtgcatccctggagcgcacggaagcgctggtccgccgtgtgagcgacatcgcgctcaagaccgatggcgtctacaacgccgtgcagttcccgggcatgaacggcttgcagtcgaccaacacgtccaatagcggcctagtgtatttcgtactcaagcccatcaatgagcgcaagcacactgcaaccgagattgcggaacagttgaacgagcgcttcgctcaggagcaggacggtctggcctttgccatcatgccgccccctgtcatggggctgggcgcgggttccgggttctctctttacgtgcaggatcgcaaccgtgagggctatgccgcattgcagacggcgaccaccgagctggcgacggccatctcgcaagaaccgggattccaatatccgatcagttcctatcaggccaatgtgccgcagcttgacgccgtagtggaccgcaccaaggcgaaggcacagggcgtggccgtgaccgatcttttcgatacgctgcaagtgtacctgggttcggcgtatgtcaacgacttcacgcgctttggccgcaccttccgggtgatggctcaggcggacgcaccgttccgcagttctgtcgaggacgtggtcaaactgcgcacccgcaacgccaatggcgacatggtgcccatcggcagcatggtggacgtgcgcaagacattcggccccgatcccgtcatccgcttcaacggctatccatctgccgacctgattggtgagtcagatccgcgtctggtgtcgtcatcgcaggcattgcagcaagtgcaatccattgcagacaaggtgctgccgccaggcatgcaactggagtggaccgacctcagctaccagcaggtcacgcaaagcaataccgcgctggtggtgttcccgctggcggtactgttggtcttcctggtgctggcggcactgtacgaaagctggacgttgccgctggccgtcatcctgatcgtgcccatgagcctgttgtcggccatgacgggcgtgtggctcgcgggtggtgacagcaacattttcgtgcagattggcttgatagtgctgattggtctggcctccaagaatgccattctgatcgtggagttcgcccgtgaacttgagcgcaaggggcacagcatcctcgatgccgcgctggaggcatcacgccttcgtctgcgcccgatcatcatgacttccatcgccttcatcgctggcgtggtgccgctgatggtcggttccggcgcaggcgcggagattcgccaggttatgggagtgactgtgttcgccggcatgctcggcgtgaccttgttcggtttattcctgactcctgttttctacgtcgcgttacgcaggctcgcgacgcgcaagccacgtcgccaggcaaatgtcgccatggaggccacccatgtctga

SEQ ID NO: 530260 - DNA, 1203 bp, Stenotrophomonas maltophilia
atgagcacattgccttaccttgcggtcctgccttcctggcgccgcgccttgccgttagctgcggcgagcttgctggcgctgtccctagctggctgcaatagcgacgccgccgacgcggtcgccgcccctccacccacggtcagcgtggcacctgtgtcggtgcgcaagatcgtcctatgggatgagttcaatggccgcgtcgaggcggtggaaagcgttgcgctgcggccacgtgtgagtggctacatcgacagggtcaattacgaagagggccagatcgtcaaacgtggcgacgtgctgttcgagattgacgctcgcagttaccgtgctgctctggctcgcgcggaagcagacttggcccgcgcccgcacgcaggccgcactggcacgtagcgaagcggcccgtgctcaaaagctggcttcgttgcaagcagcctccaccgaggagttggagcagcgccacgccgccgccgatcaggcccaagccaacgtgcagttcgcccaagccgcagtcgagaccgccaagttggatctgtcgttcacccaggtacgttcgcccatcacaggccgcgccggacgtgcactggtcacggcaggcaacttggtgagtgctgacggccaggccagcatcctgaccaccgtagtctcgctgaacccggtgcacgtgcattttgatagcgacgagcgtacctatctgcgctacgcccacatggctcgcaacggagagcgccccgaccagcgcagcgaaagtatcccggtgcaggtgggcctggtcggcgagaacggctatccacacgccggaaacgtggacttcgtggacaaccgtgtcgatgcggccaccggcaccatccgcgcacgcgccaccctggtcaatcccgacggcctgcttacgccgggcctctatgcccgagtgcgcctgccgggtagcggcagtttcgaggccatgctgatcgacgacaaggccatcctgaccgaccagagccgcaagtacgtgtatgtgatcgatgagaacaacaccgcccagcgccgcgacatcacgctgggacgcaaggccgaaggcctgcgcatcgtcgaggaaggtctaaatcccggcgaccgcgtgatcgtcaacggcatccagaaggtttctgtcggcatgccagtgacggcccaggacattgaaatggcgcctgcaggccgacaaatcgcccaggcgagcgaatga

SEQ ID NO: 530261 - DNA, 606 bp, Stenotrophomonas maltophilia
atggcacaaaagcgtgcagagatgattgaggaaacgcgggccaagctcatcagtgccgcccgcgctgcgttcgcaaccgtgggatatgcggacagttcaatggatgagctgacggcccaagccggactgacgcgcggagcgctctatcaccacttcggtggaaagaaagggctgctggaggcggtcatcgcccagattgatgcagagatatctggccgactggccgtcatcgtcgaggaggcggagtccacctgggacggcttcgttcaggagtgcattggctacatcaagatggccgtcgagcccgaagtccagcggatcgtcctgctggacgggccagcggttctgggcgatccctcccagtggctctgccagaacgtgtgcatcgtgaacacgcgccgcagcctccagaagttgatcgaggaggcagtcatacgccccgtcgatcccctggcgacggcccgcctgataaacggggcgctgctgggcgcatcgctgtggatcgccagcgcagacgacccacgcgccgcttccgaaaaagccgtgcagggatttcttgtactggtggcgggcttgcggcgggacacctctcccgcgcagccgtaa

SEQ ID NO: 530262 - DNA, 1035 bp, Stenotrophomonas maltophilia
atgtcatctcaactccaagacgctctaggcatgttcgcctttctcgctatcgagctatcggttttattcattggcattagcttgctggtcggagttcttcaacgtcacatcccaccatccaaggtggaagcgttactgacttccagtgggaagcgaggctattttcttgctgctggtttaggagctataacgcccttctgtagttgctcgactatccccatgttgaaagggttgattcgggcacgggccggttttgggccgatgatggtgtttcttttctcatctccgttgctgaatcctatcgtcgtcggcctgctggttgccacgtttggatggacacttactgctatctatgtgctcgccgctttggtggtcgcggtaggtgccggatggctgcttcacacgcttggcttcgagcgttatgtgcgccggacggcgacacaagagagcagtggatgtagttcatcagcaagcccgtgcagtgctacatcgaccgcatcgagttgcggcaccaacagctgcgacaccactccgaagacggcttcttgcggggctgataggaagacaacagtctctacgtctagcgaatgctgtgacagtcaacccactgtcacggttaagaaagaagggaagtacagtggtgtgtggcgggaagcttggtcggactttatcgatgtgttgccttacctgctcatcggtattgcgattggcagcgtgatctatggtttcatgcccactgacttattggagcagtatgcaggcccagataatccctttgccattccagttgccgctgtcatcggcgtgccgttgtatattcgcgctgaagccgtcatacctctggcagcggctctgatggccaaaggcgtgggtgccgggacggtgctagcgtttatcatcggcagtgccggagccagcctgactgagctcattctgttgcgctctttgttcacgctgaagcttttagcggcgtttttagcagtcatttttgctatggcgatgattgccggttacgccacctacctgtttttctga

SEQ ID NO: 530263 - DNA, 1164 bp, Stenotrophomonas maltophilia
gtgcagggtgagttcgtgcggttcggcaagcgtgacgttccctatcgtgatctgcccatccacggcaagcgggtcactctctgggtggtccgccgccgatacacctgccgggcctgcaagacaacattcaggccccagctaccggagatggtggacggattccgtatgacactgcggctgcatgagtacgtggagaaggaatccttcaaccacccctacacctttgtggcggcacagaccggcctggacgagaagacggtgcgcgacatcttcaacgcccgcgccgagttcctggggcgctggcaccgcttcgagacgccccgcatcctgggcattgacgagctatacctgaacaagcgctaccgctgcattctgaccaacattgaggagcgaaccctgctcgacctgctggccacccgccgccaggacgtggtgaccaactacctgatgaagctgaaagaccggcagaaggtcgagatcgtcagcatggacatgtggaacccctaccgggcagcggtcaaggctgtgctgccccaggcccgtatcgtggtcgataagttccatgtggtgcgcatggccaacgatgccctagagagagtgcgcaagggcctcagaaaggagccgaaaccgtcccagagccggactctcaagggagaccggaaaatcctgctgaaacgcgctcacgaagtctcagaccgggagcgcctcatcatggagacctggacaggcgcgttcccgcaactgctggccgcctacgagcacaaggagcgcttctacggcatctgggacgccaccacacggctccaggcagaagccgccctggacgagtggatagccaccatcccgaagggccaaaaggaagtctggagcgatctggtcagggcagtgggaaactggcgcgaagagaccatgacctacttcgagacggacatgcccgtcaccaacgcttacacggagtccatcaaccgactggccaaggacaagaaccgtgaagggcgcggttactccttcgaggtgatgcgggcacgaatgctctacaccacgaagcacaagaagaaggcaccgactgcgaaggtctctcctttctacaagaaaaccatcggttacggactgccggacttcgcagaggaactcaactacggagtcgatctatcaaccatctga

SEQ ID NO: 530264 - DNA, 741 bp, Stenotrophomonas maltophilia; identical to SEQ ID NO: 344062

SEQ ID NO: 530265 - DNA, 888 bp, Stenotrophomonas maltophilia; identical to SEQ ID NO: 344063

SEQ ID NO: 530266 - DNA, 246 bp, Stenotrophomonas maltophilia; identical to SEQ ID NO: 344064

SEQ ID NO: 530267 - DNA, 372 bp, Stenotrophomonas maltophilia; identical to SEQ ID NO: 356401

SEQ ID NO: 530268 - DNA, 444 bp, Stenotrophomonas maltophilia; identical to SEQ ID NO: 356073

SEQ ID NO: 530269 - DNA, 678 bp, Stenotrophomonas maltophilia; identical to SEQ ID NO: 356072

SEQ ID NO: 530270 - DNA, 1044 bp, Stenotrophomonas maltophilia
atggccaatggaatagtcgtcggtatcgatatctcgaagaacacacttgatgtagccatcgggagggatggcgcagccaccgttttcagtaacgaccaagagggccaccaggccctggtggcagtgctgaggagacaaccaatttcactcgtcgtcatggaggccactggccgctaccaatttgcctgtgcctgtgcctgcgccccgcaagccgcaggattccaggtggcggtagtcaatcccagacaggcgcgagatttcgcgaaggcgatgggcaggctggcaaagacggatcgcgtcgacgtgctgatgctggcagagctggccgaagtgatcgacaaacgcccagaccgggatcgcctcaccaggccgatggcagatgagacgcagcagcgcctgcatgcgttggtgacccgtcggaggcagcttgtccgcttgcaagtcagtgaacgtcagcgcaagtacgcctctcactcggatgtgcagcctgggatcatcgaactgatgaacatcctgaagcgccaggttcaggacatcgacgcgagcatcgcagcgcatctcgccaaatatcaagtcagtctgacgaagctctttcagagcgtcaaaggcgttgggccggcgactacggctgcgctgatctccgagcttccagaattggggcagctcaaggccaagcagatctcctcactggtcggcgtcgcgccaatgaatcgggactcgggccagtcacgcggcaagcgaatgatctgcggtggtcgggcaacggtgcgcagcgccctctacatggcggcaatcgtagccatgcggcacaaccctctgatccgagcctgctatgagcggctggtggcggcaggcaagcccaaagaggtcgccatcgtggcttgcatgcgcaagctgctgatcattctgaatgccatggtgagaaccggcaggccttggaaagaaacggcggcaactgcccaggacgatgcggaggctcacatcgtgccacaacgcggccggggggctcagtcgttcatcgcctgtacgcgacccagcccttga

SEQ ID NO: 530271 - DNA, 2649 bp, Stenotrophomonas maltophilia; identical to SEQ ID NO: 356070

SEQ ID NO: 530272 - DNA, 963 bp, Stenotrophomonas maltophilia
atggcatctatccaacgacgcggttccgcatggcgcgcagagctctacaaggacggcaagcgggagtccaatagcttcccaaccaaggcccaggctgtgaagtgggccatgatgcgggaggccgagttgactggcgcccgccttccagagaatacagtacgggatgcgctccgaaagtacggtgaagaggtggcgcccaagcacagaggggccaagtgggaaaaggcccgtctcgggctgatggagcgcgatccactcgctgatgtgcgcctcccctcccttcgacatacccatttggcagagtggcgtgagcgccgccttgggcaggtttcggctggttcggtccggagggagatgaaccttctgcagtctgtattcaaatcctgtcgcaaggattggggctggctggacagcgacccaatcaaggatgttgaccggcctcgagctcccgccagtcggaaacgacgggtgtctcaggaggagctggaccgtctaacgttggctctcggctacaatggcggagtgccgaccaaagctgggcatcgtgtggctctgagctttatgtttgcgctcgaaaccgccatgcgggctggggagatccttggcctgacgtgggagcatgtgggcgccaagtcggtgacattgccgatcaccaagaatggtgacttgcgccgggttcccttgaccatgagggctcgagagatcatcgagcttctccccaagggggcagataccgtcttcaatcttgatcccggaacgcgcgatgttctgtttcgtaaggccagggacgcagccaagatcgagaaccttcacttccacgacagccgcgcagaggctatctggcgactgtcgaagaagttggatgtgatggagctcgcccgaatcatcgggcatagggacctcaaaagccttctcatctactaccagaccgacgccgacgacctcgcagaccggctcggttag

SEQ ID NO: 530273 - DNA, 300 bp, Stenotrophomonas maltophilia
atgagcgatatagcactttggccggttagatcatcaaaccccgccatccattctctgcagccggtcctgtgctattgggagccaagcgaagacgacccattcgaaatgtggatggtctgtgtctttgacaggggccgctggtatcagtaccagccggaatgggaaggaggccggggctatggagtcgatgcaccggactacttctcgatcaacctacggatgatatctcgcaaggtttccgagcaaaccatcccccttaaggtagacggttgcggaggagaagacgatgagcgccgctga

SEQ ID NO: 530274 - DNA, 366 bp, Stenotrophomonas maltophilia
gtgacaaatgatacctacttcaaagttcttgaggactggcagaaggagatggatgacgcgcagccaggcctcaagccgtgcccgttctgtggccgcgaggccaacatcttccccaccggtaaccgcgaatacttcgctgggtgcggagatcggctcatgggatgccatgtggaatcatcgacttggcccgctccagacatagctacggcagtaagtatgtggaatgagcgccccgatgatgaccgtatcgccaacctggaagcgcagcgagatggactgttcaacgagaacaaggctctgtatcgcgaaatcctgaggatgcagcgagcccttcaaagagaagcctcgaaaggaaaggtgaactga

SEQ ID NO: 530275 - DNA, 330 bp, Stenotrophomonas maltophilia
atggacgttgaacagagggcgagggagctgctggctgcggagtatgagaatctgggattccccaacactgcgcgcggagtcagaaatggtgagctttctacccatccgtatatgcgcgccatcatcgccgccctcacgccgcccgagggctatgcagagaatgttcgggatgctgcgcgctaccggtatatccgatcaattgctgccggagagccccatgacttcggatggattgaagaggccgcattcgtggctagcaatggcgatccagaccagttcgacttcaacattgatgagcagatgatcgcgcgccacgaggtgaatccgtga

SEQ ID NO: 530276 - DNA, 444 bp, Stenotrophomonas maltophilia
atgagcgacaacgtgatccagctgggcgagctgatcatccggcagcgcgagaagcgccggggattccgagacgaaaggtgccgccacaccaatacgacctgggacgccaacggcgacatcatcacctgcgacgactgcaagatgcagatctcaccggtgtggatgctccacatgctggtcgagcactacagcgaggcgatgcgcaaggtcgcggcacgtgagcgctccatagctgaggacaaagcacataacctccacctgatcgcggcgaagaaggtcgaggcggtatggcgcagccggaacatggctccgtgctgcccgcactgcggccggggcatcctgcccgaagacaagctgggagacgctcaaacgcgccgcgatttcgagctgcggcgccgccaagcacggcccgacgaagggaaaagggggatgttccgtggctga

SEQ ID NO: 530277 - DNA, 147 bp, Stenotrophomonas maltophilia
atgaagggaaagcgaacaatccatgtcggctacttctacgacaagaacgaggcccacgctgcctattgtcaagcagctgccgaaatccatggcccgttccgtaacaccgagtcacggaaggcagacagccaggcggtgggcaaatga

SEQ ID NO: 530278 - DNA, 579 bp, Stenotrophomonas maltophilia
atgaccaccgacaacaagaccctggcggacgcgcagcccggtgggagggtgaggcttggggatcaggccgagcgggcgcggtttgaggcgtgggccgaagagcgggaattggacaccgcaaaatgttcagctgacggcatgaagggtgactatgccgacctcagtactgactggtgctgggcagcttggcaagccgcgctctccgcccagccctccccgggtggtcagggggatgcgattaccccggccatggtcgatgctgcatgcggcgttctctatgcgaacttttcgagcagcaggaaggactaccgggacagctgccgcgccgatgctagcgacgcactgaaagccgccctcgccgcccgccagccggcacatggatcgggaacactagttgatagcggtgcgttgcagatggcactgaatgtccttcgccgcgctggcaaggacgaggttgcagacgccctggaatcgacagccgcccgccagccgtccaagcaaccggatagcgttgctctgggcgaagcaacggaattctgcatcgagaagggcggccgccagccggtgggggagccatga

SEQ ID NO: 530279 - DNA, 435 bp, Stenotrophomonas maltophilia
atgggcgagatcaaacgttatgacgtagaaaccgggaactacgaagaggggccttgtggcgatttcgtgcagtttgctgactacgaaatcacggttgagcaactgcaggacgagatcgcccgcctgcgcgctgaggtggaggagaacgagaaggccataaacgtgtggcgcgggcggactcatcgtgctgaagctgaggtggaggttggcgaaaagaaccttgctgccgcgatgaaccagctggctgagtctgatgcagagaacgccaagcttgaggaggtcgctaatgccgcccgtcaggtagccgcatggttcaccagcggaaacaacattcccgtcagcggcatccaccagatgaccgtcagcaacaactcaatcatggccgacgtgcacgtgctgaacgaagcattggccgcaatgggagcatccgcatga

SEQ ID NO: 530280 - DNA, 339 bp, Stenotrophomonas maltophilia
atgagcgacgtgaaattcatcggcggccttacgttcaaggccaagcacccgaacgcgccggaatacgtgatctgcaagggatcgatcaagcgcgccgacctgattgcgtggctcagcagcgagcagggcgactggatcaacttcgacgtgaaggaatccaagggcggcaagctctacgccgcagtggacgagtggaagccgaaccagggcggcggcaccagctcccgccgaggcggtcaggagcaacgcgagcggccgcagcgggctacggaaaatgcgccgcgcgatgagttcgccgacgacgatattccattcgtccgcatgcaggggggctggtga

SEQ ID NO: 530281 - DNA, 975 bp, Stenotrophomonas maltophilia
atgaacgcagtagtcgtccaacaggaagaacgccaggtcgtgccgtatcaggccgcgatccagaaggcgaaggaccgcttcgccaaggtggcagcgtccacggtgaactacgaccgcgagtcggtgttcgccatgcaggccatcatgaagactgacttcgccatgcagacggcgaacaagaatccgcagtcggtccacatggcgatgatcaatgtggcttccactggcctgacgctgaacccggccaacggctacgcctaccttgtgccgcgtgaccgggccatccacctggacatcagctacaagggcctgatcaagatcgcgacagacactggctcgattgagtgggcgcgggcggacgtggtctacgagaaggacagcttcgcctatcacggccctgcagcgctgccggagcacaccgccaacccgttcaaaacggatcgcggagaaatcatcggcgtctactgcatcgccaagacccacgcgggcgacattctgaccgaggtcatggaccgctccgagatcgacaagattcgctccaagtcgatggcgaaatccggcccgtgggtcgattggttcgtccagatgtgcaagaaggccgtcatcaagcgcgccagcaagacgtggccgtacaccgagcagtcaggccgcatcgatcaggcgattgagatcgccaacacgtccgaaggcggctacgacctggaatccgaggaagagacgctgcataagcgccgccagcagcatgacgccgcgctgggccgtcacttccgcagcgtcgaggccatcaaggaagcgctggcagctgaggagcccgacatgcactcagtcgccgagatgtggggtgagatcccgcaggaggaccagatggccctatggctggctccgagcaagggcggctgcttcatgactgccgaacgcaatgcaatcaagaacggcgtgccgaaggtcgccatcgaatccgaggaacagaaatga

SEQ ID NO: 530282 - DNA, 216 bp, Stenotrophomonas maltophilia
atgaagcctgactggaacaaggtgcccccgcagtacaactggatctggatggggtctggaggcggatggctaggaggattcaagaagccttcatgggacttcttttccggttcgtggggtatccctaagaactgcaaatggggatggatctgcgacacggaactcaatgagtggactcggtccatgttgaaacagtcgctggaacgccgcccatga

SEQ ID NO: 530283 - DNA, 210 bp, Stenotrophomonas maltophilia
atggtcatccagttcccggtacagaccgacttccagctgcacatgctcgatagcctgcgcgctcactgcgaaacctacggcctcgaccgccgcaagaccgagcgcgaattcatgcgcgccggatgcactaagcacgcgcagaacctgatttgggaagcgacgcgccgccagcgcatgaaccagggccacgggccgaaggagcgcgcatga

SEQ ID NO: 530284 - DNA, 264 bp, Stenotrophomonas maltophilia
atgactacgagttttgatgtgttggccttcttcgatgacctcactcactacctgagcggtcaggacaacttggccggttacgagattgaacaaacagaggcagcccgcgccgcagtcgccgagctgatcgaggcggcagctcaagtcagcgaagcagctgtaaagcactacggaaactgcatggggctccaccttgcactgaccggcatcggtggcctgaacgagcgacttgcctccgccctcgcccgcgtcaaaggagcctga

SEQ ID NO: 530285 - DNA, 309 bp, Stenotrophomonas maltophilia
atgaccctgcaccccgccaacgacatcgcccgcaacgctcagcgcatccatgacgcgcagctgccggatgacaacgaatcggcctaccaggatgcagtcaacgaggtcgccacgcatcacgaaacggccgagctggtcgcggtgattgcgggttctgaatcagcgctggactacctgatttcgcgagtcgaagtgccgagctacctgctccacgacctgcgcgccctgctcaacaagcagcgggacataaagcgccagatcgaggccgagatgaagtctcccacctatcacgatgcgaggttcgcatga

SEQ ID NO: 530286 - DNA, 204 bp, Stenotrophomonas maltophilia
gtggacaagacctttgaagttgagctggctcaggtgtcggaaagcaacgcataccgctgtgttgcacgcattgaacgtcaggaagacgttgtagcgctcgcgatcatcactggatcggcctactacgtctggcgcctcctcccctccgaggccgtgaccattggcgagcagctgatcgctgctggtaaggcgggtgaggcatga

SEQ ID NO: 530287 - DNA, 480 bp, Stenotrophomonas maltophilia
atgatttcaggcggaagacgcttgaacgatctcggagagatgcaagttgatatctatgacacccttgaccggagagagcccggccaggactcgataggtagcttcttgtaccagtgcgatgagtacacgaaggatggtggagaattttctgcgtccctcgtggttgatcgggcaatgttcgaccatctctctgcccagctaaggatcagcccaaagaactggatctatctgaatgaactggctgaattcggggttgatcacgaaccctggacccccggctcccggcgccatatccagaacctaatccataccgaggatgtccttgaggagccctctgaagagttgtggtctgagccggggagcgaccttcaagtgccgcaaaccagaccccctgccgacccaacaatcaacctaaccccggtgttgattgccctgtggtccatctttggtgtactcctgggcaaagcgatagtttcctga

SEQ ID NO: 530288 - DNA, 399 bp, Stenotrophomonas maltophilia
atgcatatcgaatactgcccgcgcaagagggggcatagccttttttctcctcctgagtcgcagcctatgagccagttcattgccaatctcaacgcccggcgagaatcgctgggaatggaagtcaaggaagtccacgcagagttgaaccgtcgcggcatcgatgtggcctaccaaaccgtggctgcatggttcaatggcaaccggggggagagatggaaggtgaatgagctaaaggcgctactcgatgtcttgcagactgacctcaaggcgatggctggcgatgaggcagagctggtcgatgagccggttcaggctcagatcgtcaaggaagtgcgagggctgagcccagctcagcagcaggcggtgttggctatggtcaaggcgatgacagggagctga

SEQ ID NO: 530289 - DNA, 282 bp, Stenotrophomonas maltophilia
atgacccctcgccagtactggaactcctacgttaagaagctcggccgccccgcacgggtagccgagcatctgggcatcccgttcccgacgatcgctgctgtctgcaacgggcgacggggtatcggccgatctctcgctactcgcatggctgcggcagacccatcgttggatgaaagcgtcctcgtgtgggttgaggcaattccggatgccatcggagttcttccgtcgaagtccgccaagaaggtcgcaaagaaaaccgccaagaagcggaaggtggcctga

SEQ ID NO: 530290 - DNA, 489 bp, Stenotrophomonas maltophilia
atgttcgatttgggatcaatcaccacagccgttggctccgtgggaactgccattggaatggcgaagacggcactggaagtccgcgatttcaacgcatcggcggccgccatctccgacgcatcgcagaaagtcatcaacctgcagactcagctgctctcgactcttggaaccctcttcgagctgcaacaagagaaggtggccttggctcagcgagttcgagaactggaagaacatcgcgcggatcgcgaacgctactcgctgttcgaaatcacacccggtggattcgtgtatcgattcaacgtccgcccagaggcggcaggggccagcaacccaggcggagtgcaacccccccactatttgtgccagccgtgcctcgacgttcgcgggcacaaggtggttctcaatgagcgcgcagtcatttggcattgccctgagtgccgggctgctgtcgacaacggcaaaaccgtcgacgtgcactttgacatctga

SEQ ID NO: 530291 - DNA, 234 bp, Stenotrophomonas maltophilia
atggaactggaagaacgtgtggtcaaactggaagcgttgacgcgtatgcagtcggagctgattcgggcgcttgtggagatgcttccgccgccaagtcacgccgacaaaccgttgcaggacgctatctatcggacgaatcagttcgcgaacggacagccggagcctctgtgcagcgagcttcggaaggctgtggtggagttgaatccgatgaacatgccgcgccgcaggacctga

SEQ ID NO: 530292 - DNA, 189 bp, Stenotrophomonas maltophilia
atggaaatacagctgtcgcgcgatgagcgccgaaggcttgaggaatacgcggaggcccaagggcttccactgcatgaagcactgatccacgccgcccgcgctgaacttgataggcgctatcggctcccagcccagcagggctccgttgttccttttcaggccctgaaacgtgacgacccagacacctaa

SEQ ID NO: 530293 - DNA, 840 bp, Stenotrophomonas maltophilia
atgagccgttctcgcaacataaagccgggcttcttccagaacgaagacctcgccgaactgccctttgagtaccggatcctgttccagggtctgtggtgcgaggcagacagggaaggtcgtcttgaggatcgcccgaagcggctcaaggccgcgatcttcccgtacgacaacgttgatgttgatgcaggcctagcttctctggcggcgtctggcttcatcgtgcgctatgaggctgagggcaagcgctacatccagactctcaatttcgtaaagcatcagaacccccacaagaaggaagcggcgtctgtaatcccggctattccgggggctgaacagggctctccgatgcaagaacaggaatctccggaagaagacccggaaattcccgtacaagcaccggaaattccggaacgagccgggctgattcctgattccctcttactgattcctgattcttccgtagctaacgctacggcgtcgaacgacgctgcaggcgtgactccgccagctgatccgatctggggaaccggcttggcgttcctgcagcgcaagggcatcccggagaagcaggccaggagcctgctggggaagctccgacaacgatgcggcgacgtgaccacgggatccctgttggccgccgccgagtccgaagacatcaccgacccagccccttggctgatggcatccgccagcaatgcgaagaacggagcaacccatggaacacgtagcagctctgctgccgaccgcgtcgcgcagaacatccagcgagccaacgccgaggaatcagccggagccggttggttcaagggcgatgcaacagttgtggcttcgtatggctga

SEQ ID NO: 530294 - DNA, 489 bp, Stenotrophomonas maltophilia
atggctgagatctacggcgtccgctggaccagtagctacggcgacgacccgagcaagggcgcggctcagacctgggcgaagggccttgcgggcctcagcggcgaccaactggcacgagggctgtcttcctgcatcgcatcggctgagccgtggcctccgaccctccctgagttccggatgcactgcgtggggatcccgccactggcagcggtccgcgccgatatcggcaaacaggacgggtttacccggctggtctggcagcaccttgatgggcatcgctaccgacacgccagctccgatcaggccgacaagctgctacgcgaggcctacgagcaggccaaggaattcgtgatgcgtggtggcgatctgcctccgcctcctgctggtgagattgagcaggaacagaagctcaatgtgcccgcgaccaaagagcaggttgcccggcacttcgatgacatcgcagcaatcttgggagggtcaggtaaatga

SEQ ID NO: 530295 - DNA, 288 bp, Stenotrophomonas maltophilia
atggttcaggaaggaacccatgcgcagtgcctaactccgggatgctgcgtagggcccgtgagcggggtggatagctggaacgcccgcgcgccgcagtggcagccgattgagtcggcgccgaaggatgggacggaaatcctggcgtgggatgggcacggtcaagcgacgatccattggagcaatggccggtggtcgctcgtatatgcaggttggcgggctgaggatggcgattttgatggcgccatcagctggcagccgctgcccgctgcgccggaggtggagggatga

SEQ ID NO: 530296 - DNA, 405 bp, Stenotrophomonas maltophilia
atgaacgccacttctccgaacgactggaagctggacggcccaggtggaatgacagacaagcagcgaaagatgctcaacgcggtatgcggcgatctggcggctcagctgtcatggcacggcaaccgactcagcaaagacgactggaggcacatggtcgccgggacgatcttgggctggcgaatgatgcctgccatcgaccgaggcgacggtgctcagggcttcatcatgctgggtggatccagccttaaactctcgcgctcgcaggcagcggaggcaatcacagccctcctgcaaatcggcgaccaccccgacgaacaaggactctcggccaagcgcgtgcattggtccgacgtggtcctgcttggactcggcttcaaccccaacgactttgcggaggcagcatga

SEQ ID NO: 530297 - DNA, 252 bp, Stenotrophomonas maltophilia
atgaacctcgaacagatcgacaccagcactacggcggggaaggccgaggtgggcgaatatcgcgtggccgtcggcgactcagtcaaggatctccacgcggaagtcgcgattcttctgcagctcgggtatgtcccgcagggcggcgtttccatcgctggccgaaagtactactccggcggctaccaggttgaggaccatctgttcacgcaggccatgtggaagcgcgccgacctcgccggggagaagggctga

SEQ ID NO: 530298 - DNA, 192 bp, Stenotrophomonas maltophilia
atgaacctctccagctacacggaacgcagccgcctgtctgaggcgagcaatgcaggctattcggcacgcttggctcgcaagccggtcacctcgtgcccctatgccgatggcacggacaaggctacggcgttccagcacgcctggggacaggcggatcaggacgagcatcggcggcaggggagggcggcgtga

SEQ ID NO: 530299 - DNA, 366 bp, Stenotrophomonas maltophilia
atgaacgagctgatcctgccgtggccgagcaaagacctgtctccgaacgcccgaaagcactggcgcgctaggcagagagagtcgaagaagggtagagcgatggcctatctcgtcgcggtcgaggcgggcctgaagtcggcgcagatcccagctggccggctgcatctccacatcacattccacccaccgaccaagctgcttcccgacgacgacaacatgctggcccggttcaagccgtaccgggacggcatcgccgacgcgctgggcatagacgacaagcggttcatcagccacccgctggtcagcaccgaggtccggaagggcgggcaggttgtggttcggatcaccggagggccggaggcatga

SEQ ID NO: 530300 - DNA, 225 bp, Stenotrophomonas maltophilia
atgagccgcgcccaacagatccggcaatggctggcagagaacccggggtggcatttcatgggggatgtctgccaaggcatggcgggcattgagtccaagcgggtagcccatgatgtggatcagatggccaggcgcgggcagatccagagccttgggcggcacggaaccaagcgctacagcttcggtagcaccatcaatcaacaggaggctccacatgcaagctga

SEQ ID NO: 530301 - DNA, 513 bp, Stenotrophomonas maltophilia
atggccgagatcagcgaaaccaaagctggcggccggaacatggctgctttcctggatatgttggcgtggtccgaggggaccagcaccagcccggcaacaaaggatcgcggttacgacgtgatcgtgactggtgtggataggaagctggagaccttctccgactactcagttcacccgttctacaaggggcggaagccgaagctgatcaccagaaatgggctggcctctagtgcgtctgggcgctaccagttcatgcggaaggactatgtccactacaggaatctgctgaagcttcctgacttcggcccgctgtctcaggacctttgggccattcagttgatccgtgagcgccgcgctattcagcttatccaagcgggtcggattcaggaggcgatagagcgagtccggaacatttgggcaagcctgccaggtgctggctacggccagcctgagcatgcacttgagaagctcatgactgcctaccgaaattctggtggagcggtatccgcatga

SEQ ID NO: 530302 - DNA, 324 bp, Stenotrophomonas maltophilia
atgagtggcgacgatttggcccgcgagctgcggaccggccttgagcgactggatacggcattgacccggatccatggcgcatcggccaacgggaacgtggtccgccttgagggcgccggttctgtgtggaacggaatcgcaatcggcattgccctggctggcgtgattctcggcgcggtctggatcgcccatgtggcgagcaacgtggatgtggctgcgaggcaggctgaggcctatcagaaagccgtttacatgctggcgccccggttcgccgaggaagtcgacaaagagctggatcgccaaaacaagagggatcaaaagtga

SEQ ID NO: 530303 - DNA, 279 bp, Stenotrophomonas maltophilia
atgagcagccccaccccgatcattaccaagccgccgaaggctgctaaggctagcctcctgccgcagggcatcgtgcccttgaaggagacgctcaagcactggacgacctggctgtggggcgtcctgctcgccagcccggacggcctgtatgccggtgcagctgcgctggggatgctggccgatgaatccatgccgagcgccatcaccaccttcatccgtgtcttcgctggcatcggtctgattgccaaggtcatcagccagcggaagccgcaggcctga

SEQ ID NO: 530304 - DNA, 240 bp, Stenotrophomonas maltophilia
atgagcgccactctccatgccctgccggttcctgggctgcacaacatcccggagatgctgcgcagagtcgcggattctattgagtctggcgattactgccacaacggcgaggctgtgcttctcctgccaaacccggatggcggcatggagatttttggttggggcacggctgacgccacctcgacctactacatgctcgggcgcgcccagagaaagatggagcgggttgaactcctatga

SEQ ID NO: 530305 - DNA, 297 bp, Stenotrophomonas maltophilia
gtgatcgtcgcccagacatcctatcaggccatccgtggtgctgatgtggcatgccaatgctggtttagggatgaggctggccgggtagatacggctgggctgagtctggaggttgaagctgtggcctatgggcgcaagcacgtccaggcaacgtggcccgctactggaaacaaccagggccgagttcaattcacagtccccaatgggcacaagctcaacggcggcctgtatcagctgaggatccgagtcgagccgtctggcgagctggtgagccttggcctgttggagattgtgtga

SEQ ID NO: 530306 - DNA, 2379 bp, Stenotrophomonas maltophilia
atgcgcgcccagcccgtagacctgatcggcggcttctacaccagcgacagcctgccgtggtcgtgccaggacacggtgaactggctgccggtgatggcggaggtggctgggacgcgcacggtatcgatgttctcgactccgcctgggctcaagccatatcagcgcattggcggtggcccgattcgcggcatgcacgactgcgaagggctgcggctgatcgtctcggggcgctacctgtaccggatcagcaatgccggtgttggcgttccgcttggcacgatccctggcgttggccgcgtccagatgacgcacaaccagttcagcactgggtatcaggtgctggtcgagaacgggcagggcggcggcgggtacgtctacaacacggtagacgacacctttgcgaagatcacggacgagggctacccgggttcgatctcgtcggattacctcgattcgtacctgctgggcgtggagccgctgggccgcttctggttccactcaaatctggccgacgctactgactacaacacccttgatcgatacgaggctgaggcatcgcccgacaagatcgtggggctggctgtcagccagtttgaggtcgttgtcttcgggcagcgcaccattgagttcttcttcaacgctggcggtcagactggcacgttccagaatcgccgtcagtcgatcacccgtggttgcgcctcgcgccataccatccagaagctggacaacaccctgttctggcttggcgatgacggcgttgtctatcgcatggagggctatgcagctcgccctgtttcgacgcgagcgctagagaaggccatttccggctacaactgggctgaggctattgccttcacctgggaggatcgcggtcacaaggtctactacctgaccttcccagacgggcagacgtttgggtacgacgtggtcagcggtctgtggcaccgccgcgagtccttcgggatcaaccgctggcgcctgagccatacccagaagtgggggcgcgactggttcggcggcgacttccagaatggccgaatctggcagctcgattgggactacttccttgagggcgaccagccgatcatcagcgagcgcgcttcgggcgtcttcgccgacaaccagagtgcgttgcttctgcccaatgccgagctgatatttgatacagggcatgggcctgctaccacgcctggattcttcccgcctcagccgtcaatgccgtcaatctctggggacgcgcctgacgctgctgcgggtgtctcctattccccctatcagtacgttatcagcggtggtacggctccctactcagtcgctgtgattagtggctcattgccttcgggcatgacgttgactagcgcagggttgctaagtggcactgcaacaaccattggcagctactcatacaccttgcgggttaccgattcaaaggaactttggggggagctgcaggatgtgatcggtgtgtcagcgctttcactattggcaggcacggccacagttggaggcggccgctcgcaaacaagcaatgacggcgtcaactggacaaatctatcgtctaccggtcagttccctggctctgctacaagcgccattggcctgctgaacggtagatttgcgataggtggggcggggaacaactaccgctacacagacaactcagggcaaacgtggacccagatttcgggcatacagatgtcgagcggcgacgcctgggatggaaggttcctaatcgcttacggggcaaacgctggggtagggcgctggggtgttagtaacgacaacggcaccaccttcaccatggcaaacacctcccttggctatgacctgaattacatagcaatcggaagggaaaaccccagcatcgttcttgcttcaaggcaaacaggattcaatgttgctgtaagtgcagatggcggcaacacgttcccaatttcccggccattccctgcggactttacttccttctgcgttaaagctgacgaaggactcttctatttcggcggcatgatagctagcaggcctggcgttatcgccacatcagatggatcgacgtttggactaagcagaacactagacgctgcgttggtgaatggccggattatcaagatcgtagttggcatggttggcggccagaagacattcctttgcattgctcagtctggcgaggtctacatgaccaaggacaacttcgccacatccgtaaagctgcccttctcaatgtctggatccttccaggacgccacgcacaacggcagacgcttcatattggtttctacgggcggcttgtatacggcagttgacccagcaaacgggttcactcagtcaccgacagcgttctctagcatcgcaaccgttacgagtgcacctcatggctga

SEQ ID NO: 530307 - DNA, 813 bp, Stenotrophomonas maltophilia
atgcagtccgatgcggctggccgtgctggcgatgcggcgtcgaacgcctctcaggacgccatccgggcgcaactggcgatgtacaaccagagccgtgcggacacgctgccgtatcagactgtcggcactggcgcgctgaacctgctggctcagatgtacggcctgccgacctactcgggcggcatcaatacgggcggcatccagatcagcgagccccaggctgcgcagaagaagaagcgcagcttcttcgacaaggtgaccgacccggccaacctcgccggtcagttcggaggcacgagctacgacccgatggggttcttcagcagcggcagctcgggcggtggaggtggtctgcagttctcgactggcggcggcactggcaacgcgctggctggcggcgggatggtcaatccgggcactggcacgcctgatttcagcatgttctacaagacgccggactatctcgtcgcgatggaggaaggcatcaatgcccttgaccgtggcgcggcggcccgtggcggcctgtattcggggggcgctgatgcagatcgaattgcctatggcgcaaatcaggcgtcaaagggctttggcaacttccaaaacacactcttccgcctctccggcctaggcagccaagccaacagcgagctcaacaacctcggccagaacacaggcgcccaggtcggcaaccagctcgccaacgcaggcaacgcccgcgcctcggcctatctcaaccaggggcaggcatggaacaacgcgctagccggtgtcggcggtgcaatcggtgattactgggccactcggaggacctga

SEQ ID NO: 530308 - DNA, 1869 bp, Stenotrophomonas maltophilia
atgccgcaggcaccggctggaaggattgatccggcaacggtggtatgggatgacgcgccaattaccgacctgcctcaggtgaacgcgctgccgcccgatcctaccgacggtatgagcggattcgaccggttccgcgcgggcgtcggaaagtcgctggtggacacctacgagggcttgaagcaggccgctggtgatgcaggatcgggcccgctgcttgccctgcagcaaggcaccatcggcgcgctgcgcggtgacggcctgctggaaagcggccttgttgcgctgtcgcagcttggcgccgaacgtaagcgcttgcgggacgaacaggcggaccggcggcagacagacaaggcgctgcttgatactggcgctggaatgagcgggaatatcctcggaaccctggcacagatccttggtcctggcgtggctgctcgtggtactgctgcggccaatgctctattgccaagcacggtacgtgggaacgccctgcagggcctgaccattggcgcacttcagccggtagcctcggagaatgagcggatagggaacgcgctgttgggcggagtgggcggcggtgctggcgccatcgcggctaagggcgctggcgcggctctgaacaccggccggaacctgttggcacgcaccggcctcaatgccaccgaccggcaggcaggaaacgtgctggcacgcgaggcgaccaacccgaacaacctcgcgatcacacagtcggcagttcctggcgtacagcgaacccttggcgaggccagtggtgattctggcttgatggcgcttgaaaacaccatgcgggcgcagagccgtggcactttcgagcctatcgatatccgcaacaacgccgctcgcgtacagcagctgcagaacatcgctggtacggacgcagacatggcggcggcagaagcggcgcgttccgcagcgtcagagggactgcgagagcgggcgtttgcagaaggcgctgagacgcttgctagaaaccagcaggcggatgctctgatgcttccggcttcaacaggtattgctcagcttcgccaaggaatccaggcaatcgcgcgctcgggtgctggcaaccccaatgtgcagaacgcgacaaatgcagtgtctcgtgcactgaatcagactggcgactctgttggaggcctctacaacgtccggaagtacatcggagaccttctgaacggacgcgctgctggcgacgatgcatcggcccgagcggcaagccgagagctgattcagattcgggatctgcttgatgaaaacctagcggcgcgtgcccctagcttccctgagtatcttgacgcctatcgttctgcatccaagccgatcaaccggatggaagtgggtcgagaggttctttccaaggcagctggtcagtctccagcgttcgatgcgctaggaaatccaatcctgaccccggctggcatttctcgtgcaaccaacgaccttgatgccattgcggcaaaggccaccgacttcaagaaggccagggcctcagacattctgacgcaacaggacctagcctcccttcgtgcgattcaggaagacatgcaacgtatcgcacagcgaacccgttctgctgcggcaggaagtccaacgatggagcgagggagcattgctgaccgtacagccttgcagggcatagcaggaaagctcccttgggttgggaggctgtttggacacttcgagcagcaggccaatcagcgcctgtcggagcgactggcttatctgatggcaaacccgtctgaggcccaacgagtcctggcggcgcttcctaaggaagacgctggcgtagtccggaagtcgctaaaccagcttgcgttggcggctggccgttcggctcagcctgcagccgactag

SEQ ID NO: 530309 - DNA, 396 bp, Stenotrophomonas maltophilia
atgctgcgccgctggaggcttgagccgttgatcttggatcaacttccttcggaagggcagaccatcatcgagaaattggaaaagtacacggcagaggtaaattttgctgtggtgctggccacgcctgatgacgagggctaccgtgctggtcacgaagacgaaaaggcgttccgtgcgcgccaaaacgttgtgatggaattgggcatgatgctcacgctgctcggccgcaagaacgttgccattctcatgaagcaacaagacaatatggagcgcccatccgacatccaagggttgctctatatcccgttcaaggacaatctgcaaaaagatgcagggccgcttctggcaaaggaaatggcggcccagggttatcccatttcattggcgaatctgtag

SEQ ID NO: 530310 - DNA, 1095 bp, Stenotrophomonas maltophilia; identical to SEQ ID NO: 364799

SEQ ID NO: 530311 - DNA, 576 bp, Stenotrophomonas maltophilia
atgaccacgatgatggcaacgcggcctcgctcacgcctgcgcgctcgcctcgtgctggcgggcctgtccgcctgcggcctcgctgcgctggcctgggcgtcctttgtgcatccgttgccgcgtctgacctacaacccgtccgacagcgtggcggtcggctggtatcgcgtcgatccgcttgacctgcgcaccggcgcgctgccacgtccattggccgtgggcagcatcgtcctgaccacgctgccgcctgacgctgccgcgctggccgcgcagcgcggctacctgccgacgcgcgttccactgctcaagcgcgtgggcgcgatagcaccgcaggaggtgtgcattactggcggcagcgttcgcatcgacggtgtgccttcggccgctgtgttgtccgccgaccgctggggccggccgctgccatcctggcagcagtgccgccgcctgcggcccggcgagctgttcctgctcagcgtcaccaacccggcgtcattcgacagccggtatttcgggcccgtgcgcgcgtccgccgtgatcggcgttgcgcgtccggtctggctggaggcccgcccatga

SEQ ID NO: 530312 - DNA, 471 bp, Stenotrophomonas maltophilia
atgccagtgagctctgccaatgtcgacgtcgtgctgcgcgaatggcgcaaccgccgaagcatgagccagctggatcttgcgctcgacgcggaaatatccgcacgacacctgagcttcgtggagggtggacgctcgtcgccaagccgcgagctgctactcaaactggcggaaagcttggccatgccgcttcgcgcccagaaccgtctgttgcttgccgcaggctatgcaccggttcatgctgaagcggcctttgatgcaccggagttggcgcagatccggcagacagtggaggcgatcctcgccgggcatttaccctttcccgccatcgccgtcgacagccgttggacgctgctgcaggccaacgacgccgcgatggagctgttcgagggcatcgatccatccatgctggcaccgccgctcaacgtgctgcggcttagcctccatccccggggacttgcccccgaatcttaa

SEQ ID NO: 530313 - DNA, 129 bp, Stenotrophomonas maltophilia; identical to SEQ ID NO: 33085

SEQ ID NO: 530314 - DNA, 1191 bp, Stenotrophomonas maltophilia
atgaaatctaacaatgcgctcatcgtcatcctcggcaccgtcaccctggatgctgtaggcataggcttggttatgccggtcctgccgggcctcttgcgggatatcgtccattccgacagcatcgccagtcactatggcgtgctgctagcgctatatgcgttgatgcaatttctatgtgcacccgttctcggagcactgtccgaccgctttggccgccgcccagtcctgctcgcttcgctacttggagccactatcgactacgcgatcatggcgaccacacccgtcctgtggatcctctacgccggacgcatcgtggccggcatcaccggcgccacaggtgcggttgctggcgcctatatcgccgacatcaccgatggggaagatcgggctcgccacttcgggctcatgagcgcttgtttcggcgtgggtatggtggcaggccccgtggccgggggactgttgggcgccatctccttgcatgcaccattccttgcggcggcggtgctcaacggcctcaacctactactgggctgcttcctaatgcaggagtcgcataagggagagcgtcgaccgatgcccttgagagccttcaacccagtcagctccttccggtgggcgcggggcatgactatcgtcgccgcacttatgactgtcttctttatcatgcaactcgtaggacaggtgccggcagcgctctgggtcattttcggcgaggaccgctttcgctggagcgcgacgatgatcggcctgtcgcttgcggtattcggaatcttgcacgccctcgctcaagccttcgtcactggtcccgccaccaaacgtttcggcgagaagcaggccattatcgccggcatggcggccgacgcgctgggctacgtcttgctggcgttcgcgacgcgaggctggatggccttccccattatgattcttctcgcttccggcggcatcgggatgcccgcgttgcaggccatgctgtccaggcaggtagatgacgaccatcagggacagcttcaaggatcgctcgcggctcttaccagcctaacttcgatcattggaccgctgatcgtcacggcgatttatgccgcctcggcgagcacatggaacgggttggcatggattgtaggcgccgccctataccttatctgcctccccgcgttgcgtcgcggtgcatggagccgggccacctcgacctga

SEQ ID NO: 530315 - DNA, 660 bp, Stenotrophomonas maltophilia
atgaacaagctccaacgcgaggccgtgatccgaaccgcgctcgaactgcttaacgacgtgggcatggaaggtctaacgacgcgccgactggctgagcgcctcggggtgcaacagccagcgctctactggcatttcaagaacaagcgtgcattgctcgacgcacttgccgaagccatgctgacgataaatcacacgcattcgacgccaagggatgacgacgactggcgttcgttcctgaagggcaatgcatgcagttttcgacgggcgttgctcgcttatcgcgatggcgcgcgtattcatgccgggacgcggccagccgcgccgcagatggaaaaagccgacgcgcagcttcgcttcctttgcgatgctggcttttcggcaggtgacgcgacctatgcgttgatggcaatcagctacttcaccgtcggcgctgttcttgagcagcaagctagcgaggcagacgccgaggagcgcggcgaagaacagttgaccacctcagcgtctacgatgccggcgcgcctacagagcgcgatgaaaatcgtcgacgaaggcggtccggacgcggcattcgagcgaggcctggctctcatcatcggcggtcttgaaaaaatgaggctcactacgaacgacattgaggtgctgaagaatcttgacgaatga

SEQ ID NO: 530316 - DNA, 903 bp, Stenotrophomonas maltophilia
atgacaacgcgtacgtccgatttgttgttcacagcgattgcgcccgccatatggggcagtacctatatcgccactacccagttactgccgaacttcacgccgatgacggttgccgtgctgcgagctttgcccgcagggctattgttgctgctgatcgttcgacaacttcccaagggaatctggtggctccgcatcctgatccttggggcactcaatttttcgatcttcttgagcatgctgttcgttgcggtttaccgcctacccggtggtgtcgcggcaacggtgggtgctgtccagccattgatcgtcatatttgtcgcagcagctctgctcggtagtgctataagacctatgtcggtcatggcgaccgtggtcgggattgctggggttgcgttgttggtactggcacccaacgctgcactagaccttgttggtgttgcagcgggcctaaccggggccgtttctatggcattcggaaccgtcttgacccgcaagtggcaacctccggtgtctctgctcacttttacagcttggcaactgactgctggcggtcttcttctcgttccgatagctttattgttcgagccgaccatgccgatgcccacgggagccaacgtacttggccttgtgtggctcagtgtgattggcgcggcggtggcctatatcctctggttccgaggaatcgcgcggattgatcccgcgatggtttctttactgggctttttgactccaggaactgccgtgctgctgggatggctgatcttggatcaaacgctgactgctcttcaaatgttcggcttcctgctggcggtggctagcatctggcttggccaacgcgccagtcgtcgccccgagtcttcatccgaaagaggaaattctgtaacgatgcccacccggcattga

SEQ ID NO: 530317 - DNA, 195 bp, Stenotrophomonas maltophilia
gtgattcccaacgacaagggcgacaccgagagcgcccccgatttccgccttcaggcggccggccacgacaacggcagggcgtggaagaagaccagcgaagcgggacggccctacgtgtccgtatccctcgacgattcttcgttcccggcgacggtctatgagcgcattctcggtttcgtggggaatccgacatga

SEQ ID NO: 530318 - DNA, 858 bp, Stenotrophomonas maltophilia
gtggcgccgggttccttcatggatttcgagcatgcaagccgtgcatcccgggcttgtggttcaggctggcatctgagcaccaatgccgagcgtgccgcgctgatgctttggtgtcagcaacaagggttcattgcgcaaggcaataccgacagcggccgttccattcttgtgcttggtgagcatggcgttcgtgcggaccatggtaaccccggtgatccgcaaggtgatcccgctacgctcaccggcagcggtccgacgagttggcggcatgatcatacaatctgcggcatcgctgacctgtgcggcaatccttgggagtggcaagcaggcctgcgcctggtggacggagaaattcagatcatcccggacaacaacgctgttcacgccgacctgtccctgacctccgctgcctgggtcgcgttgagcttgttcgacggcacagcactggctccggggcattccgccagcgccagatttgatgcaaggcgcgactgcatcgacggcaatgcgggagcgccgatcttgagcacccagatccgccatcgcaacggaccgcgcgccgacaacgccaatcggcccgggctgatggacgcgctcttcagccagatcgcacccgataccgacgtggatgctctaccacttctgaaggccctcgggctggtgcccagcttcccgacgaccagcggcactcaagtctatttaaggaactactgtgagcgaatctttatggctggcggagcgtggtactccggccacgatgcaggcttggaggctctttgcctgagtcatcctcgcacgcatttcagcagtacggttggcgcgcgcccggctttcattgtctcgcagcgaggcacttaa

SEQ ID NO: 530319 - DNA, 666 bp, Stenotrophomonas maltophilia
atgagacacaagacgaccaagttagatacccgggcggccaaggcccctcgaaccaagcccgccgaagtgcgtctggacgagttgatgtctgctgcggagaagctgttcctcgccaagggcgtcgaagccacgacgatcaacgagatcgtcgagcaagcccaggtcgccaagggcacgttctaccactacttttcgtccaagaacgacatgctcgaagcattgggcagccgctacacctctcagttcctggagcgtttacaggacgccgtagatgcctgtccaaccgacgactggcaagcgcgattgaggacatggattcatgtcaacgtcgagacatatgtccagacctaccggacgcatgacatcgtttacaccaatcaccatcatcaggaccgctccaatcaggccaagaacgctattcttgaccagctactggaaatcatcgaaagcggaagatcggccggtgcctgggtaacggatcaaccaaggattgtggctctgctgatttattccggcgtgcatggtgccactgacgacatcattgcggttcagccagccgaatgcacggcctttgcgcaggccgtggctgaaagttgtctccgcatgcttggcatcactgaagtaagcaacccaaaggcgatcaagtcgctgggcaagtcgcgctga

SEQ ID NO: 530320 - DNA, 1503 bp, Stenotrophomonas maltophilia
atgcaaccctctcgccgacttgcggcagcctgcgccgcctatctgggaaccttcctcgctacgctcgatatcagcatcgtgaatgtggcgttgcccaccatccaaacggggctgcgcacagacatcgcgggtcttcaatgggtggtcaacgcttatgcgatctgcctgtccgcactcatgctgtcggccgggccagtggcggaccgacacgggcacaagcggtcgtggctcggcggggtgatcctgttcaccgtgggatcagcgctgtgcggcttcgctccctctttacccgtgctgcttgtgggacgggccgttcagggcgtagctgcagcattcttgatttccggcgctatgccgatcctcatccatctgtttgccgagcccaagcaacgcgcccacgtcatcggtgggtggtcggctttcaccgcattggcactgatactggggccgctgctgggtggattgctgttgcaaagcctgggctggcaaagcattttcctcatcaatctgcccttgggccttattgcagtcggattagggctgtggggaattccggaacgaagatatccagatcacgcggcgctggacccggtaggccaagccatgagcattctttccctaggtgccctggcctacggaatgatcgaagccggcgatcatggcttctcgggcacgatgccgcttattgccctagcgctggcgctggcgggttttactttgttcgcagccgtggagaagcgtgtgcgacggccactgctgccggtggcgctgtttcgcaatcgaccattcgtcattgcaaacttcgcttcgttcatcctgggcttctcgtattacagcagcctgttcttcttctcgatctttcttcaacaaatccagggctggtcgcccgccgaggccggctggcgcatgatgccgcagttcgtgaccacgggctgcatatccctgttgttcgggcggctgagcgtgattgtcccgacccgatggttgatgattgcaggttatggcctgacggctttgtccatgttggggatggccctctgcaccgcagacaccgcctactggatcgttgcgctgctcttcggcttgctgggggcgggcgccggcttcgccgtgcccgcgacaggcatcgtcgtgatgagcatggctcctcctgagctttccggatcggtctctgcgaccatgaatgcgctgcgccaagcgggaatgactatcggcattgcgctgcttgggacactcatgagcaatcaagcgattcgcgtgcttgcacatgctgtcagcgatcacggcatcgccgatgccacagcgatcgcacgccaggcggtcacgcaccatgtcttccccggtacgctccctgcgtttccccggctctatacctctgctatggaaagcggttttcatgtcgcgatgctttgtgcgggcctgatttgcatcatcgcgttggctctccttgcaggtccttatttgacgaccgatcacgctttgaaaaaggcggggaccaattaa

SEQ ID NO: 530321 - DNA, 945 bp, Stenotrophomonas maltophilia
atggaacttcgacaccttcgatgctttctggccgtagccgaagagcttcacttcgcccgcgcagcggagaagctgcacatcgagcaatcgccactgtcgcgcaccatcaaggaattggaagaagacctgggcgagcagttgttcgtgcgcacgtctcgcagcacacggctgacgcgggcgggcaagctgttccttgagcatgtgccgcgcatcttcaccgccttgcagcaggcccgcgacagcgtgaaggcggcgtccaacggctttcatagtcagttgcgcgttgcgctgtccgatggcatcacgccctcgcgcctgccagctttgttggccctgtgccggcaagaggagcccgaggttgaaatccgtctgttcgaggtgccgttatcgcagcagatcaaggggctgcatgacgacctgtacgacgtgggggtcgcgcagtccgatgaggtgggcgaaggcctcatcgccgaagccgtttggagcgatgcgctgatggtggcggtgccagcgcggcatccgctgctcaggcacaaacgcatcccactcgaagaaatgctgcgctatcccctggtgctgtgcgacccgcaagtatgcgaagggcacgcacgccaggtcgagcgtgtgctgcgccgattggacatggagccgctgatcgccgaacgtgtcacctcgttcgacctgatgatggcgctggtgtcggccggcttcgcgctggggctggccggagcgccgcatatcgcggccagccgcgagccgggggtggtcgcccggccgctggcgggccgctcgcccttgttgacgacctacttgctgcggcccgaaggcgaggcttccgagacgctgttgcgcttcatcgagcgcgtacaggccattgaggcgcccgacggcagcctacccccgccgccgcttgaacccgatacccaggaggaagtcgagtcatga

SEQ ID NO: 530322 - DNA, 126 bp, Stenotrophomonas maltophilia
atgaccatgaagccgatcaccccgttcctactgatcgctgcgctgaccgcctgcgagcaatccgaaaccccgcagccggcgcggtgccaacggtggaaaaactggctgcaaatctcgaacgcttga

SEQ ID NO: 530323 - DNA, 378 bp, Stenotrophomonas maltophilia
atgctcgactgcagatgtgccaaccaaggttggcacctaccagagcggggggagtggttggcacgtaccagagcggggggagtggttggcacctaccagagcgggggagtggttggcacctaccagagcgggggagtggttggcacctaccagagcgggggagtggttggcacctaccagagcgggggagtggttggcacctaccagagcgggggagtggttggcacctaccagagcgggggagtggatggcgcctgccagagcgagggaggaacattcgagcttggctcgactctacaaaaggcggcggcgttacagggcctgacggtcgggcgcggtagaatccccggccatcccagaaccaccggatcccgatga

SEQ ID NO: 530324 - DNA, 1488 bp, Stenotrophomonas maltophilia
atgtctgaggaaatcctggtcaatgtgaccccgcgcgaaacccgggtcgcggtgatcgagaacggcatgctgcaggaactgcacatcgagcgcggttggcgccggggtgtggtcggcaacatctacaagggcaaggtgcagcgggtgatgcccggcatgcaggcggccttcgtcgaagtcgggttggagcgtgccgcgttcctgcatgccaacgacgtggtgcggccggcgccggtggccagtgccgataccgagaacaccacgctgccgccgccatccagcgtgccgatcgtcgagctgctgcgcgacggccaggacatcgtggtgcaggtggtgaaggacccgatcgggaccaagggcgcacgcctgaccacccagatcagcattccctcgcgctacatggtgctgctgccgcaatccaaggtggtgggcgtttccgcacgcatcgaggatgaaaccgagcgcgcccgcctgaaggcgctggtgaccgaactgtcggcgcagcacgggggctacggctacatcgtgcgtaccaatgccgagggccagccggcagaggccatcgccgaggacatcgcctacctgtcgcgcgtttggaacgtggtcgagcgtcgtggccgcgaagcggcctcgtgcagcaacatctatgaagacctgagcctgccgctgcgatcggtacgcgacctgatccgcaaggacgttgacaaggtgaaggtggactccaaggagaccttcgcgcagttgcaggcctttgttgccaagtacatgccggtgctggccgagaagatcgagctgtacagcggtgatcgcccgatcttcgacatgttcggggtggaggacgagatcggccgcgcgctggacaagcaggtgccgctgaaatccggtggctacctggtgatcgaccagaccgaggcgatgaccaccatcgacgtcaacaccggttcgttcctcggccagcgcaacctggaagagacggtgttccgcaccaacctggaagcggcacaggcggtggcacggcagctgcggctgcgcaacctgggcggcatcatcatcatcgatttcatcgacatggacgatgccgagcatcgccgccaggtgctgcgcaccctggaaaaggcgctggcccgcgaccatgccaagaccacggtgtacgacttctcgccgctgggcctggtggagatgacccgcaagcgcacggtggaaagcctggagcgccagctgtcggagacctgcccgcagtgcagcggccgcggcagcatcaagaccaccgagacggtgacctacgagatcttccgcgagatcacccgtgccgtgcgccagttcgatgctgcgcgtctgctggtgatcgcgtcgaccaaggtggtcgcgcgcatcaccgacgaggaatccgcggcggtggccgagctggaggaattcctcggcaagagcatccgcttccaggcggacgagcagtacctgcaggagcaattcgatgtcgttctgctctga

SEQ ID NO: 530325 - DNA, 171 bp, Stenotrophomonas maltophilia
atgttagcaactgcttccacgaagcagtccgtgcagccgagtcagacaggcccgcttctggccgaaagcggacatcgggcccaggccgaccggagggaaggatggcaatgtcggctgccgacccatatcggctactggttcggcagccgagcctaccgctcgatccggtaa

SEQ ID NO: 530326 - DNA, 1692 bp, Stenotrophomonas maltophilia
atgcctttcctcccggcgtttcgccgagtcgccgtgctgacgctcgtggcgttgccagtctgtccgtttgctacgttgtcagcggccgagccggcttctgagaccagcgcctttacccatcccatcaacattgcaaaagacgccccattggtagaactgggcagcaacggtctgctgcgctatgccttgtactccgaacgcggtagcgatcacgcgcgcaacatcgtcccggatttctcccgcgccggctatcagggaggcggcgtcagtctgcccacccgctctagcattcctgttatcgagatccttgaaccaaacgcggagggtgacgactatccccgtatccaggcagccatcgacgcggtcgccgtgcgtgttctggacagccgaggcctgcgcggcgcagtcctgctgcggcgcggccgctacaggttgagcaagacactgactgtccgggccagcggcgtggttctgcgcggtgaaggccgaggtgcagatggcacggtgatccgctccgaggtgagcgacccgcagggcaggatccttgaagtgggaaatagcgaatcagcggtgccccgcgccgctctggacccgcgccggaccgccatcaaaatggactacgttccggtgggggcgatacgtatcacggtgaattccgcagccggctatcgcgtgggagatacggtgtcgatcgcgagggagcccaatgcccgctgggtcggccccgagggcatcaataccgcgcgataccgatggacgcccagcgactacgccgtatacaacgagcgcgtcgtcatcgccgttgaccacgacacgatcacacttgatgccccaatcatggacgccatcgaggcgcgcttcggtggcggcagcatctatcgtacggatcccactcgtatctccgaggtcggcatcgaggaccttcgccttgaaggtaaccccgagaccggcacggtcaacggcaccaccgattccggcccctttaccgcactccgcctgggtgcaatttacaactcatgggttcgcgacgtgaccgtgcgttatgtgtcgcatggattcgtgacccgcaacggcgcgcacttcaacactctgcaggacattgcctacctcgacccgaggtatggcgaaacccaaggcgcccgccgctatgtgttcctttacgagggcaacgccgccttcaatctggtccagcgctgctacaaccaaggcggcaggcatacctttgtcatcggcgcccgggtacccggccccaacgtgtttctcgactgtctggccgtaggtgacagcaatgacagtggtccacatcatcgctggtccaccggcactctttacgacaacaccaagggatatatgctgcgggcacagaaccgccggtacagcggaacagggcacgggtgggcgggcgcgcagcagatgttctggaacaccgagcacgacatctacgtcgtccaggcgccgcccttcgcgatgaactggagcgtgggacaggttggcgctattgcacctgggaaattcccgcctgaggagcctgcagggatcgtgcaatcgatgggtcatgtagtgacacctcgcagcctgtacatgcagcagttgcgtgatcgtctgggcgagcgggcggtaatcaacgtcaccactgaagcgcaacgtgagggacgcatctgggaccgcttgtcaggtcgtgcaggggagtga

SEQ ID NO: 530327 - DNA, 504 bp, Stenotrophomonas maltophilia
atgaagaaccacggccttgccgctgcggcggtgtgcgcctcgatcatggcggcggtgtggatggggtggcccgagcctgcgggcgatcaggtgtgggcctaccagaagctgcagccggccgattaccgcctgctgcacagtgatgcgcacggcttcgtgaccgcgaaggcattcgagggctttgaactgcacgcgcgccatgccggggcaacgtccttcgagatccggtgcaagggcgtgctggtgatggacgtggagaacgcgccctcgcgcgtgctgatccgcatgcctgccgatgcacgttggcgggcgccggatatcgaacagctgcgtatcagtttcgaacattggttggatctgtatcaaagcgcggggcggttgttggtggagagtgcggggccatcgtgggttgaggcgcggtttgggcgcttcagtggggcggtgcctgatgggcagcggtgcttgctgggagttttgggccgccgtcggccggaagccctatag

SEQ ID NO: 530328 - DNA, 279 bp, Stenotrophomonas maltophilia
atggacggtcaggtcatgcttcgaaatcaggtgctatcgggcaacttctacgcgctatacgcgatatcggagtcataccgtgaatcgaaggtgccaaacgtggtagatggtgcagcgtatctccgtttggcctacatcatgggcgaccacaaagcggcgatcgagattgcgaagatgcgcctcagttcggctgagctggcggttgccgacagcagggcgtctctgctttacaaggggttcgcaggagaccaggtgcctgatccgcgcccacaagggtag

SEQ ID NO: 530329 - DNA, 657 bp, Stenotrophomonas maltophilia
atgccaagcggttcaaggggttggatccgactcaactggatcccccctctccgccagataactgaaaaggctgcccccaggggcggcctttttcagttatctggcgcgggacgcgaagtgcgctgcgcgcacttcgccccaaacgttgctgcgcaacctttgggcccctccctttgccggcctctccccgcccctgtcgtggcagcccctcaacagaggggcttgttcctccagatgcgcgacatgcacggacagatcaccgcaggcgggtcccgaggcgcaacgcgcatcgggatcgggtgcatggatgcacacgacaatccccctctctccgcaagattacgcaatcctctgtttacgcaggggtttttgcttttctggggtaaccttcggcgggacacgaatcgggacacatctgacgatgcacatcccacaccatcttgttcgcgcgccctctgggctctggtcgttccggcaacgggtcccgccgatctccaggccatcgcgtcttcaaacgccgactgcgcaagaccgagctggccgtggcccagctgcgccctgcaactgacggcgcgctatgctcgggctttcgaggcgctgagagagcaacgcatgggaatcaaggaagaggacatcggcgcgcttccaagcacctga

SEQ ID NO: 530330 - DNA, 1035 bp, Stenotrophomonas maltophilia
atgccgtcggctgttgaaatccatccgggctgcctattcacaccgctgccgttgatcaaggaagcggccgatccccgcatatgggaagaccatggagtcgttgtctccagtccccagccactgtcagggcactcattttcctcagtgacgcacactgactggcggatggacatgaaagcggctcgggcactgctgctgattacagcccgattcaatcgtgtccacagagtccacgtggctgagagctattcactttcacccagtgccaaggacggaatcattcaaagcatccgaccgctggcaactagcgatgttcaggattggaggagttttctggagcagatggctcagtgctccggaattgcaccgttccaacttcgctcagatcgctcctgggtcggggcagcatcgcccttagaggcaagtcttgtttgccccgcaatggcaagagtgccgcaacagatggcggatctagtgtcattcctcgcagatcatctcgacaaccccaatgaggagattgacgaagccgcggcatttcagttcttgacgatccatccgttgcatgacggcaacggcagagtggcccgaaccctattgatcaaaatggcctccaggaaacgtagcttgtatccgctttacattgcgtggcggctcatgttcgacaagattggcctaactagatcatggcgggagcgatccctggacggtggaaccttattcgatgtgaaccactacatccaatggcgtcataccagctctaacatcgggaaggcctatctcgatgcagcagcggcagggtgcgatacccgcgttctggattgtctagcagccttcggacagatttccccagccggcatctgtgcactcaacagtacggtcaaccaagggctttccgcaagaatggtctccaaacacgaggactgccgccacaccaatttctatagcgaaacgcttcgcacccttctccagaagatctgcaaggacagtacttcgggcgaagatttaccccttcaaacgatgaaagcacaaggatga

SEQ ID NO: 530331 - DNA, 489 bp, Stenotrophomonas maltophilia
atgcgaatggcccattcgttcgtcaacggcaaggcctactgggaggggatgccgatccagatggactctggagccatttggttccttcgggcagcattgcaggaccaagtcaatgctttcgcctcaggcgccagccttgtggataccaatgctcgcctgcgcatgcatcttggtttgacatgtgacatgcagatcaatgcttcatatcagtatcgcgtagggggagcgctgaccaaaccggagcaatactgtctcgagatgatgaaggccttcgatgcagaggccaacgataatcagaatttcgtgaattggttcatcgagcatcagcgcgcgattggcatgcccctcgaaaactacgttccgtatgggatcgtcgagctcattgacacgcgaaactctatcggtgagaaatggcgcgcggtgacggaagacgcatcctgctcaaaatggtggacacaggtccagaaaaatatgtgtggggtaaagtaa

SEQ ID NO: 530332 - DNA, 660 bp, Stenotrophomonas maltophilia
gtgtggagcgggcaggcattggacggatttgcggagttcatggtggagcgacagggcgatctgaggcgcattgcgcggcatacgcggggtgagtacagcgaagatgatgtgatcagtgaagcctggttgttggtagccacatgggagcagtccgacaggcgaccgctgaatctcaaggagcgcgaggatcaaagccagctgatcagccatctctatcagaggcttgtgcgctataccgagctgaacgtccggcacgccgtgcgcctggatcatgcgccgggggacgacgcagggagccatcccttgctggaacggttgagcgccgatggagatgacccgctgagcgtaatggaggcccgggaagcgaatccgattcctccgcccgagggggagttgcactactcggtcgccagcatctatctggtgatgctggcgcaccatgatttccgtatgtccgcgttggctcgctttctacgcttgtccatttcccacacctaccgtcgctgtgcatacgcgagccaagtgtctgcatggcagcatgcgcttgttctagcgccaccgataagcatggaaggcttgaggccatggcgtcgattccgtgcctgccgcgcgcccaggcagctcgagttcgatttcgatgagaggcttgagttgcgctag

SEQ ID NO: 530333 - DNA, 198 bp, Stenotrophomonas maltophilia
atgcgcacgatcaaatcaagtgaaatggaattcatcagcggcgctgcacaggcaccaaattgcgtggtagttaccgccaacattaccggctccaacggcgtctccagccagcaggtcgctgtcgtctgctcctgcccggagggcacgacgatgtcaaccacgacctcgggcggcaccactaccgccacatgtaattga

SEQ ID NO: 530334 - DNA, 690 bp, Stenotrophomonas maltophilia
gtgatcaaccgctatttctgccctctggttctgtctggaatcatcctgtcgacctgccctaagcaggctacagctgaaccagtttccgaaatcaatatatcgtcagcgtcatcagcttggaactcatgccaagtcttgaaaaagggggtggtctatgtccaagggagtaacgctctatgcgtaaagggatatatcgactacgacctagcagaccagtttatgacgcgagtgaagaatgccgagagcattggactctccatcgatcttgttttaattgaaagccaaggtggcgagcttcgtccagccatacggattgcgaagaaaattgaagagctccatgccagcgtggctgttggcgggatgtgtgcttcctcctgcgcgcagttcgtattcatggcagggagacagaagctcctgttgaggcaaagccatctgcttttccatggcggccctgtttccgagcagcagatcaagagaatgaacctttccgcctccgcagtctccagcctgaatcgccaaaatctggaaatgactgagttttatcaggagcgcaacctcgacttgcggatgctcacggaaccaccggccaaagtgcaggcgcgaattgacgccggagagattgtcatgtggtcttggagcaaggccgaacttgagtcctttggcgttacgggactggctcttgaagagtga

SEQ ID NO: 530335 - DNA, 2109 bp, Stenotrophomonas maltophilia
atggatgtcgttctccaatctgaagcggctgagtgcggaatcgcttacttggcgatgatcgcctcgcatcatggtaatgccatcggcctgcgcgagattcgtcgccggcactcattttcacttaaaggcacctctctccctcagttaatcgctgtcgcaggcaagcttggcctacagtcgcgtgcgctccggttggagcttgacgagctggatcaactgaaacttccctgcatagctcactgggatctcaatcacttcgtggtggtacgcaaagttgagcggaacacggtcaccgtcgtggatccggcattgggaacgcgcaagctcgcaatgagcgagttctcgaagcacttcaccggggtttcccttgagctacagcctgggggcgatttccgccgaatccgtcgcccggaaccaacgccgttaccttggcttaccggaagaattagaggccttggcagatcgttggccctgctgatcgtcctctctctttctctgcagatcttcgtgctttcggctccattctttatgcaatgggtggtcgaccaggcactcgttgcatccgatcacaaccttctctctgtactggccgctggcttcggcttggcgcttctcattcaagttggtatcggtcagatccgcggcaggtcggtcatctatttgtccagccgtctgggctcacaatggtcggcaaacgtatttagccacttgatcaaactacgtctggattttttcgagaagcgacatcttggcgatatagtttcgcggatgggcagcgtccaggcaatccagaggatcattacaaccagcttcgttgaagcgatcatcgatgggatgatggcgatcgcgaccgtaatgatgatgatcctgtacagctggaagctcgctatgatttcactagcctcaatcagtgtgtatgccgtcgcccgcatgctttctttcaacgccttgaagctggggaccgagcagcagcttattgcctccgcgcgccagcaatctcacctgcttgaatccattaggggcatccagtcaattaaggttgcaggacgggagtcaactagaagatcacgctacctcaacctgatcaacgacaccgtcaatcaagacgtcaagctctccacctttgcactgacgttcaatggttccggccaactgatctttggaattgagcgcattgtcgtaatctggataggtgccactttggcaatgcaaagtgtcttttcggttgggatgctgatcgcttatcttgcatataaggaacaattttcccaaagagtcggatcactcgtagacaaatggatcgagttccgcatgcttaggctgcacggcgagcgcctatcggaaattgttttagctgaaacggagccggaacctaccagcaggggccgacggctggatccatcggctcctcttagaatcgatgtcaaagacctcggtttccgctactcggaatccgagcaatgggtgatacgaaactgcagcttctccattggtgaaggggagtcagttgctatcgtgggagcctccgggtgtggaaagacaacccttctgaaaatcctgctcggtcttcttcaaccaaacgagggtgaggtcgtagttggcggcgtgccgctgcggaacctagcatcggacgattacaagagactggtgggcgctgtaatgcaggatgatcagctatttgccggaaccattcgagagaacatctcatttgaagacgagattgctgacgattcatggatccaggaggctgcaaaactggccgcagttcatgacgacatcatggcgatgcccatggcgtatgaaagcctcataggagacatggggacctcactttctggcgggcaaaaacaacggatcgtacttgcacgcgctttgtatcggaagcctggaattctatttttggacgaagcaacaagccatcttgacgtcgaaaatgagcgagcggtcagcgaggccatcaactccatggacttaacaagagtcattatcgctcaccgcccagaaaccatcgccagcgcggaccgagtaattctgcttcgcgacggcaaggttatcaacgagctcgcgacacagcagcatagcgcattcgcccaagaagttctttcatga

SEQ ID NO: 530336 - DNA, 1281 bp, Stenotrophomonas maltophilia
atgacactactcttccgccaggaagccgttgatgccaagcgcggcaaccaactgggtagcatctcattggtgcagccggtccgcgcatggctgctcgctgcattctgtctactatcagcctccgcacttgtttgctatctggtgatgggtgagtacacccgtcgatcccgcgtgtctggagagctcgttcccgatctgggattgtccacggtaatggctccgtcagccggggtcatagccagtctggcgacggaggaaggcgatcacgcaaacaggggcgatggtctagtcctagttaatgtccctcgcataaccgggagcggggatgatgcctcgcaggcgctactgaatgctcagcagagtcgaatagccagctccgcccgattgattgactcccaaaaccgtcagatggcgacgcagttagtgggaatcaccgagcagagaaatactttgcttcaagaaatttcccagatcgagctggagataaggacgcggggcgatcaggtccgcctggggcgtgaaaccttgcagcgctaccaacgggtcgccgatcaacgctatgtgagtcttgtacaagtaaatcagcaggagcaatcattgttggagatggtgaatgccagacaattgcttcagcgacaggccacaacgctacgccgtagcttggctgagcttgatcagcgcatagccgagatccctcgacagcgcgaagcaggtatcgctgcatttgcccgtgatactgcggcgctcgagcaggagcgaatcagaatggagacagatggtgcaataatgctgcgtgcgccggtgtcgggagtcattgcaaaccggatggtggagcctggtcaggccgtcgaggctggccaggccgtcctcagcattgttccggacgggtcgctcctgagggcgcaacttttggcacctagctcagccataggcttcattaaggctggcgaccgcgtactactccgctaccaggcatatccataccagaagttcggtacacacgagggaacgatactccgtgtatctcgcagtgctttgatttcaggaagtaccagcacggattccactgactctgtttatcgcgttctcgtagcactggaccagcaagccgtcctagcatatggcagatccgagcccctcaggccaggcatgaaacttgaagccgacattctcggtgagaggcgaaaattgtacgaatggcttttggagccactctattcactaactgggagcatcagtgtggcaggtgtttcttcgcaaagatccgtcgagggcaactga

SEQ ID NO: 530337 - DNA, 153 bp, Stenotrophomonas maltophilia
atggcacacgttgaggagccgtccatacagttgacctttggtgatgccgagggactgggcaagcgcaagcaaccccggcgcgagctattccttgccgagatgaagcgggaggtgccgtgggaagcgcagctggcacagatcgagccgcactaa

SEQ ID NO: 530338 - DNA, 894 bp, Stenotrophomonas maltophilia
atggcgtcgcaggcattgctccccccaggcccaccgcttgaactgcagcgcgatgtgcagcgcaagctggggcggtgcctgcttcgtctgcagcaatacgaaatcctgctcaaggcattggtagcccatggtgacattgccgggccgccttcggcgttgcaggcagtccggggcgcacaggtggcctgcgcacagaagaagaccttgggcaacttggtcggcatgttgaccgagcgtcatctaatcccggccgaagaggatgacggcaccgatgagccgcagggtgatggcggcatgtggttccgcttccgctttcaggtggggctgggtgccagccagcatcaagccaccacggcggcattgaaggagttggtggacttgcgcaatgagttggttcaccacttcctgcagcgcttcaacatctgggagccgcagggttgcatggccgccgatgcctatctggacgccagctacgagaccatcgatggccactacctgaccttgcgcggctgggtgcagggcatggatgaggcccgtgcggcgatggcctcgttcatgagtacggcggcgtttgaggacctgctggtcaatggcattgcaccggacggcacggtggactggcctgccagcggggccgtgcgctgcctgcgcgaagccgagacccgtttcgctaccgagggttggaccctgctcaacaccgcgaccccatggattcgagcacaacaccctgaccagtatccccagcgctacggctgcggcagttggcggcaagtgattcacgagtctcggcaattcgagattcgcaggacggtggacatagaactaggctgcggcgaggtctggtatcgcagccgtcaggaggaagccagcatgcaagggaagaaaagctcatga

SEQ ID NO: 530339 - DNA, 1260 bp, Stenotrophomonas maltophilia
atgaatcaaacagcggagttcagcccggcgaccacggtagacgtgccctccccatccgattggcaatccggcgagctgcttaccttcttagaacttcagcgtggcgtagacctccccttgcaagacaggcggggtggcgatgtgccaatttttggttctaacggtctgctagggtttcacgacactagcgtttctgatggccccggcgttattaccggtcgctctggaacaatcggaaaggtgttctatacggagaggaagtactggcccctcaataccgcgctgtatgtgaagaacttcaagggcaacttacctaagttcgtctactacaaactgggtgctattggccttgagcggttttcgaccggcacaggcgttccgacgctaaacaggaacgttgcgcacaaagagatggtggcatttccccctctccccgagcaacaaaaaatcgctgccatcctgacggccgtggacgacaagctggacgtgattgcacgccagattgacgctaccctgaccctcaagcaggggctgatgcagaccctgttcagccggggagtaggcacccaagatgccgatggccactgggtgccgcacgccgagctcaaggtcagcgagctgggggagattccggtggggtgggaagcagccaaattgaactcgcatgtcgccaaagttggtagcggggtcacccccaaaggcgggagcgattcgtatctcagctcaggcataccgctgattcgaagccaaaacgtcttggtcgggcgactgtcgctggacgatgtggtcttcatttcggacgagcagcacgagaaaatgcgcaactcggcactgagtccgaatgatgtgctgttgaacatcactggagcatccatcggacgaagcgccgtgcttccggcggactttgaggtcggcaatgtcaaccagcacgtctgcatcatcagaacggaattaaccctgagtcctcatttcttgtgtcagtacctcaactctgaaatgggacagaaacaggtagacaagtttcaggcgggggggaatcgcgaggggttgaactatcagcagattcgtagctttgatgtgccgctgccgcctgtcccagagcaggatgagattgcttctgttcttggcagcgttgatgaaaaggtgggtgttctgacggccaagcaagagcggtatcagacactcaaacgcggcctgatgcagaagctcctcacgggcgaatggcgggtcaacgtggtcgctagggcgaccggaacgtaa

SEQ ID NO: 530340 - DNA, 777 bp, Stenotrophomonas maltophilia
atgagcggacgcttttacgacccgaatccggtctacttcgacctgctgagcaatcagccggtggccggtgggttcctgcagttctacgagatcggcacgaccacgccgaagctcacgtggtcggatcagggactgacgatcccgaacgccaatccggtgccgctggatagctccggccgggccaacgtgaatatctggctgtccggctcctactcggttcgcctgaccgacagcctgggcgcggtgatctggacccgcgatgtgagcgatggctcgaccggccaagccgtgatcccgccgatggaggctggcaagttcctgaccaatgacggctcggtgtacctgtggggcgatgtgctgcagatgcccgacccgaccggctcagacgggaaggttccggttgccagcggcggtgtgtacgtcctgcagtcgttcccgacctatccgaccgtgccggttgtaaccgacaactcggtcaaaagcggcactatcgttgatcagtggggaactggaagcattccggcaagtggtacgaagacttccagcgtcgtcatcaccttcccgcaagcatatgtttctgttccaaatgtgaacgcgtcgatcagtcgagggcccggtgttgttcctgctggtttcttgggtgtcctgagctgtatcccaaccacgaccaacgtgacaattgcttggtctctggatgaggctcagaacggcactgagtacaaccttgttactccgatccctatcgcgtggcgtgctatcggcaaggtagccagctga

SEQ ID NO: 530341 - DNA, 1926 bp, Stenotrophomonas maltophilia
atggtcaaccgattccctggcgagcagccgcgctttgaccagccggtagtcgatcaggcaggtagggtgacgcaggcgtgggccaactacttcctgcggctggcttcggcccaatccaatgatgacctgcgtgcgctctatgaggcccttgcggcccgagtagcggcgctggaagacggcgagggcggcagcttccagatcctcggccagcaatccatcgcggtgaacggcatcccgcagccgggccatgtagtgatcatcactctggacaacgattcggatgccccaggcaacactcagtactacggcaccggtccgaccggcacgaagggatggttccctgtctcgggcgcgatcacggtaaacggcggcgagctgaccaagactgtgggcgtcgatggcgtgaccacgttcggactggctgacgttcccgactctggcgccggcacgctactggcgatcacccgagatgggaagggccgggtcactggaaccaaggccgccacgatcactggaacggctcagcagatcgacgtcgccaatggcaatgcagctgctggcctgccgaccctgtctctggccccagaggtactggcagcgctggctgaggcggtgactgccctgcaacccagcgatgtaaccgggccgaacagcgtcaaggtgacgccgaacgggtcgggcggcatcgtcctgcagtttgagaacgatcaggcctctccggcagcgctgaccgagtacagcaccaactcggcgggcgtgcgtggctggcatcggccagccctgtttgaatccacgggcgtcatcaacggcggcgcgctgacgatcaacgcgggcaacaacgcccggttcgatatggcgcaggcggtgatcggctacacggactggagcgtcaccccgacgcagccaacccgggcgctgctgacggtcggcccgttcactgcccaggtggtgacctacatcgcctcggcgaatgcgacctatgtcggcatccagatgccgggcgggaccatcgtccagcagacaagtccgttctccaatgctcagcgacgcaccatcgcccagatcggcgtgctggtccacagcaacaacgtcaacctcaacgcgatcaacgatcaggcggccacgatccgggctggagtgaatcaggttggagacctgatgatggcggtgggcccgctgaacctgaccggcaacgtctacagcgccaatggcgcgaacctcaacatcaacaagacgggtggatccatcttcaagatgggctccaacttccaggccaacaacctggatccgcacgttgtcagccagagctcgcagacggcgctgacgttccgctaccggctgagcaatggcactgaaggcgctgacaccaccaacatcaacccgaaccagtacgagagctctccgggtgtcctgaccaacatcccgatcctcggaaaccagtggcacgtccagcggatcagcctgttccagtcgggacagacccgcatccagtacggccagcagctctatgccagcgctcaggcggcgatcaatggcatcaccatcgatgccttcaacaccgagcagaacatcgccgagaacgggattctgcggtgctacctgatcatcaatcgcggcctgcttggtctgctggggagtgccaccttcgcgccggtcagcaagtttggcgcgcttcaggccagcagcggggcaacccccgaccacaacagcctgccaggcctgcagggcggcacctcgggcgagtactaccacctcacctcagctcagtacacgcagctagtcgagggcggcgccgtgccgttcttcctcgccaacaacaccaactatctcgtcccgcagaaccggcaggccttgttcacgctcccgattgagttcgggaccggagcaacgatgacggtcgatggcgtccttgtggaggtttcctga

SEQ ID NO: 530342 - DNA, 1086 bp, Stenotrophomonas maltophilia
atgttcgttcttaccaataccgctggcgcctcggccactaccccggctgcgagcaagacgacactatttgttgattccagcggcgtcccgtccactaaaaacaacggcggaacggttaccccgctgctgactggcccggctgcggcgctcgcttaccagccactggacgctgacctgaccggcatcgcggggctcacctacgccgccgacaagtcgatctactacaccggctcggcatgggcgacctacgacctgaccggcgtaggccgcactctccttgccgccaccacccaggcggcgcagaggacggctatcggggctgttggccttacgggggatgaatcaatctcaggcttgaagacattttcaggtccctcatattggaatttcgccacgtcgattggctctattcgatatggcagtcccggaggcgtcccggggattcttgggttccaaggtgattacactggatcaacattcagccgatccgagatccaattcaggccgggcgtaatccgttttggggcatctgcggcgagcggtggcgatgttggcgcaactcagttcttggaagtgtcgaactctccatcggccacgcgtcctttggtggacaacaatatggctttgggcgctacagaccgaaggttcacgacggtctatgctactaattcagccatcaacacctccgatgcccgcctcaagaccgagccgcgccagttgtcggaggctgagcgcaaggccggctctgagctggcacggcttccggcgatctgggagtggctgacaggcgaccgactgcatgctggcccgactgttcaggctgcgatggctgtgatggaggcgcacgggctcgatccgttcgcctactccttcatctgctacgacgagtgggaggcagagcccgccacctatgacgacgaaggcaacgagctgaccccggcgcgcgaggcaggtgaccgctacagcttccgaaaggaggagctgctgtgcttcatggtcgcggcgctggctgctgagaacgacctgcaggcggccaaggtcgaggcgctggacgtccgaattgcggccctagaagccaaggcctga

SEQ ID NO: 530343 - DNA, 300 bp, Stenotrophomonas maltophilia
atggaactacctcccgacttcaaatggcagtacgcctctggccttgagcagatcccggtgacgatcagccacatgggtgtgggcgttgccaggatcagccagcgggtggatacgctgcggtggcaggtgacgctcaactaccaccacgaccaccggaggcagaccgtgcggccctgcgagaaccagtggacgggcagggctgggatggagcagtgggtgatccggcatcaggacaggctgcgacaggaagtcgcagctatcatcgctgagcgggaggcggggaagatcaggggggggtag

SEQ ID NO: 530344 - DNA, 663 bp, Stenotrophomonas maltophilia
atggcgccatccatggcgccaacggtcctgcgcagcccatcccgaacggcccctgacagtttcctgcgcgtgccagccacggaagagaatcaaaagatcaaaagcaaaggcaggcgctcgttgttgcgccgagcccatgctcggctgctgtacgcgaagcctctcagccgagcatggctcggctctaccgaagatcattccgatcattctttcgttcatccacgcatggcgtggatctactgtgtcgaccaaggtcgacacctaccaacagcagcgatgatctgtcgaaggcggggtgggtccggttgcgggggcgtgagcgccatggatggcgcgaccgagcctccatggacggatttacggcgtcccccgcaaccggacccaccccgccatccctcagaaacctgctcctgctgttggtgttgccggccagcggccggcactaccgcgggtgcagggcgcagccctgcatcgaccgaccccctacttcttcaggaagttgtccaccagcagatgcttcacgtcgtcgaagcggccgttcaacaccgccttggcggcatacaacgcggtaccggccacctgcttggcctcgatctgcggcggcatcaccagctcggcgcggctggtgtgcacatccagcaacgccgggccccgctgggatag

SEQ ID NO: 530345 - DNA, 768 bp, Stenotrophomonas maltophilia
atgggcggatgttcggtttcgaccggcatccgcccatttttatttgacaatccattttgttcaggatcttatgtgtcccaagtcccgggacgcgggacactctggggtgggctcatgatcaaaggtcaagatgtcgttctgcttctaaggctcatcagcctttggaaggctgacgcgggtagccaactacacctccgatccaggaactggcaggggtgggagcatgcgcaacatgaggactggcattgggatcacagtagacccggattcgagaatcactggcgcgggctcttcaccgttaggcagttggcaggtgacacaggcattagcaagagccaagttggcttggctctgaatcgatgcctcgacaatgggcttgcctttcctgatcgaaggacagagcttctgaagacaaatgtgccggctcttctgggggtgttggtgcacgcttccagattcattttccccgtccgccctgggctgattacccggggaatcgcaaccgcaatgagcgcccctgtccttgcggaacatctggcgacagttggtgagcacttgcttgtctggccgagcgtgacaggaagtagtcatgggcagtcaatcgaaccgcttattcccacggtccctcatgctgttaaatcggatcccctgctctacgcgatgcttgcgttgacagattcattgagagtggggttaccccgagaacgggcaattgcggaagatcaactggcatcaatcatgaatctacccgaaaaggcgaggctttga

SEQ ID NO: 530346 - DNA, 660 bp, Stenotrophomonas maltophilia
atgattgaaaaggtggctagggcgctcgggagcgaactacggtcaaaagttgcattcatcggtggatcaaccacgggactacaacttacagacccactggcgatgcataacatcaggcacaccaaggatgtagatcttatagtgccggttatcggacgagtggattggcagcttctgcaggagaaattgagggcacagggatttcacgacaagctgcatgagcaaactccggtctgcgccctcttcctcggcgatctgagggtcgacttcatgccgtatgacgccgagattcttggattctcgaatcaatggtacgaacgagcgctggctgccgcacagccagccctggttggcgaaaccgagattcgccttgtaacgccggagtacttcctggcgacgaaattggacgcgtacaagggtaggggaaatggcgatgtatggtcgagtactgacatcgaggacgtgatcaccttgtttcaaggccgagcggagctcgtacaggaggtggcggacgcccctgaagatgtacgggatttcatcagggctgaaatcggtgcgctgctggcatgtgatggtctgcagtacgcagtcgaaagcgccgcaagtgatcgggcagtacgtgatctcatctactcaagaatggagaaggtagttgagtaa

SEQ ID NO: 530347 - DNA, 684 bp, Stenotrophomonas maltophilia
ttgagtaatgggataaggaggcccgtttggaccagccgaagggggctcgagcgagaatggaatcacgatgctggtgggctatcaatagttggtaaccaagcaatcgcggtcatagtagatgaattcacgtcgtcgccttcccgaggaaggatggcacgtgaactcgtctgccggttgttgcagtcatggtatggggcacccacagtcgttggcgcagaggtgtcactgatgatgcagtcggtccacacagaactgcggcatcagtacaggcaatcgatggctgcctacggagttttgttgactgagaagggaagtcaggccgcctccgtcctggtagctggagactgtcgaattggctcgctgagagataggggggtggtctggttgacgcgtccccataccaaggaagaaacgttgattcagatgggagagaagccggctcccggagatcgatcaacagtcacacgctgcttcaagccccgtcgctggatggagccagaaacagtgactctggaacagaacgacgatatgacatgggccatctccaccgacggctacagttcaaccactcaggttggcgatccatttcaatccgacgatgacgccagttgcatcatcttttcctgggctggaatcggggagcccgacacgacagatgggaactggtacacggttcctggttga

SEQ ID NO: 530348 - DNA, 846 bp, Stenotrophomonas maltophilia
atgagaaatttaccaaaacctacactggatgctcagaaatactatcaactcatatcgtctgagaaaagaggatttcgctccagacagctggcgcttgctaaaaacaaagtatgcgtagcttatgtcgagtatttggctaaagcgcatgacttcgccagcctgattccaatagaccttccatcaacgcgaaagaaggcactggttcacgcgtacagcagccgaaccaaaagcttgacgataatgagagattacctcttagcccctgaggtaaatgactttgacgagtgcccctattgtggaattggagagccgttgactctggaccactacattcccaaagagacgcacccagagttcgcaattctcccagccaatctggtacccctctgccacgcgtgcaataccgtgtacaagcgagatcagttcctgtgcgccggaggcaatagaatattcatccatagctatttcgacacaattccagcgtacagcttcatacgcgcgagcattgattcgaccggcactgaaaccatcgtctcatttaaaataaatcatgaccccgcaaatgcagactttagcttggtgctggagaggcagttcttagcacttaacttagcagaacgcttctttaagaagtcggcatcgatgatgtcgcggaacaatccaacttttcaacgtttctttaagtcgggcggaggggctcggcttgcgatggagctccgcgccctcgcagacggactgcgacccagccgcacaagaaaccattgggaggttgcgctaattgacgcattggcggcgtcggcagaattctgtggcggcggattcgtcaaaccaattagacgaggataa

SEQ ID NO: 530349 - DNA, 1488 bp, Stenotrophomonas maltophilia
atgaagattttcgttgaatcaagtcgcgatccagcagggcaattccacatcaacctgaaagcggacaactgggatgacttcgggctcaagacgacattcttgcttacagtacgtagcggcactgaaaggcatattatcggacaagtcaaaattattgactgcaatgttcgactcggctctcctaagatccagaacgggtggactgctcttccagattctttctgctcattggggcagagcatagatttctaccgacgactacggagccttacgccagagcacgagaaggcagtactggtttcgttgcgcgattgcgcatttgatagaaatatctattccaagttcagcgaaaccccgcagtttgtaaattcgctgacccgcttcacacccgcacaagctgctctaaaatttgcaagagaacagttctcctctaaagccagcaacgtggagaacaatgaagacaagcgggctgtatgcgatttcacatttcgctctatgctcagaggattttcaaaagaacatattttgcatttttctttttccgaccccactgttgcgaaaataccttcaagaatatgcgtaatcataggaagaaacggcacaggaaaaactcagttgctgagcaaccttgcaaaggccgtctctggttacgggcatgacacacaggatgaagcaagcgaatctcaccgcaaaagctttccgaaaggccgtccagaatttactaacgtaatagtcgtggcatactccgcatttgacagctttgagatcccaggaaagagtaagatcgagcaaaaattgatctcaaagactggatccatctttggctacaagtactgcggattaagagaaagaactaatgatggaagttaccgcataaaaagatcaactgagatatttgaggaatttaaatctgcacttaataccattgattcgctggcacggagggaaacgttcaggacttgcctgtcacatgttctgagtgacccagcgatgtcgtcggtcgacgagacaaatattattgagaaattccaaacacttagctccggccaaaagattgtgctagcaatgttgactaaaatcgtcagccatgcggagtcttcgtccctaatcatagttgatgaacccgagactcatttgcacccgtcacttacgtcctcattcatgcattcgctgcgcagcgtcctggatgaatttgactcgtttgcgatcgtcgccacacactccccggtggttcttcaggaaactccatcccgatatgtgaacgttctctccggaactccaaattttcctacagtaaaggcactgaccagagagtcattcggcgaggaactatcaacacttacagaggatgtgtttggcctaccattcgaacaatctaatttctatgcagtgcttaagagcctctccgatcaaggaatgtcgatcaaggacatcgagagactttttgagaaacctcttggaatgacagcccgctcatttattacctag

SEQ ID NO: 530350 - DNA, 852 bp, Stenotrophomonas maltophilia
gtgaaacccggatcttcattggaaaagaacgtgcagtggatttacagctacctgcttaatttgaaggatgaaggcatagtagttggcaattcggtgacgatggttggcaagagtggcgccaggcatgaggtcgacgtgtattacgagttcggccgggcaggcgtccgccaccgcgtcgcaatcgaatgcaaggactgggcgacgccggtgtcgaaggggcaagtacaggagtttgagtcgaagctgcgcgacatcggcaacattaccggactgatggtctcacgttgcggctatcaaaccggtgccgagaccttcgcgcagcatcacgacattgttcctctgcgcttcgatcaattgccgtccgctggcaatatcattgcacaacggctatccaccgtcggcttgcccgaggaagactatgtgggagagccgttctgggtcatcatggagttgcgcgacggcaaggtaaccggaacccacttcgggcagaaggacgagtcggggcagggagttattccactgatgttctccagatatcacgcggagagagcgcttcgcgaagcggagcttgatccgaaacgctgggcggtacgagggttgcctcgatttgcctttcgagccttcttgctatctttggaactgtacgagaagaggatgaatgctcgtgcgcaactgctttttctccctcctggcgcagcaccagatgcgccatttatcggcattcccgtttcaagagaagagctcatccgcgagtattatggtggggaaattccttcgattgaggaacgcgtcaatcgtcgcttggcggtcgcagacgatgagagcctgaatgctgacgtcgcagaaggttga

SEQ ID NO: 530351 - DNA, 1107 bp, Stenotrophomonas maltophilia
atgagctggaattctaagctgcaggattgggtgtccctcttggtgcactgggtgatccgtcgtcgtcatcccggtaggatcatgctgggctcgggtgtggcactggccgcgacaagcttgaccggaggttggacttttggtgtgcgtggctctgccggcgcgcttcacttggcaggcttcgcctcgactaatgatggtctaccagagacattgttgatagtggtgctcttctctggcctttcgctggccctggcgggcgtgggactgatgctgttcgactggagatcctccaggaaagccgcggaacgtgccgcgattgtcgtggtggagcttagagggctcgttgacacctcggacagttcgctcctgaattctgtaccccgcggtctgaccggtcagaggctggacgcgctcattgatgttcgcgagctcgcaacggccggagccatcaggcatgcaatgcaaaagatcgtagcggttccggacctgattaggcgcctgcgaggatctcgcccacgatctgatgtgaaagtggtggtcggaggggtactgcaggtgccgctcctttttttggcgggtgtaatgctcgacgatgaaggccgggttctacctttcgactgggatcgagtaaccgaagtctggaagtcgcttgatgagcctgatgatggtgagcgcttcgagctttccggaatggatgaattgccaaacggaagtcaccacgtggtgctcgctgtctctgcgtcgtacctgaccgacgtctccgccgtcaaggatacattcggagaggtgcctgtggtgtcgctgtcgctggcgaatccactgcccggttcgctttggtcgggtgcaaagcaggatgcactggcggcacaatttacggctgcagttgcaactcttggcaacaagggcgttagaagggtctcgctggtgttggctgcgtccagtactctgtcgcttaggctggggcgcgcctacgatcgcaggaacatgccggagattgcctgctatcagtacgaacgtaagcttaggccagcttatccttggtctgttctgattagaccaagcgatgtggaactcgtaaaaaccagttctgaagaggtggcatgctga

SEQ ID NO: 530352 - DNA, 756 bp, Stenotrophomonas maltophilia
atgcatttcgctgaggcggacattggagggttgctcgatgcattctcgcgactgcgtcggcgcccagtccatcagccaggtactgctattgttgaaggggctgtcgcgttcgagtcatcaccgccaggcaagcctacgatcatcgacgagtatcgggttcgtattgaggttccgctgggctcgtcgtcggagctacccaaggcatacgaaattggcgggcgaatcccgcgtggtgcagataaccatataaatttcgatggtgatctatgcctcgggtctccccttgcaattctggctgttctgggcaacaggccgactttggtcgcatttgtcgagaagtgcctcgtgccatttctatacgctgcatcatggcgagagcagggtctgcctggattcccatttgatgaacttgcgcatggcacagcgggactcgtcgacgactaccaacggatcttctcgatcaaaggccgggatcgcgtagcctacactttgcatctgcttgcactgcggaggcgagtggccaacaagatgatgtgcccatgcggctgcgggcttcggctggcaaagtgcaggctgcacgcctcgctgatgccctttcgacgctttgcaccaaggtccttctatcgacgccaagcgaagactgtacttcaggcaggaagttcgcctagggatctctctgggcgagcggccagttccccgctagtggtgcgatctgtccggacgcaacatccgttgttacttggtttggcgaactga

SEQ ID NO: 530353 - DNA, 1164 bp, Stenotrophomonas maltophilia
atggatagcttggcaccgaagtcgcggttggaagtgctgttgaaggacattgatttgcccgaaggcgcctacaagcgagcggagagtcgataccacgacctcgcaagttggatttccagggatagctctactctcgcgccctatgacgcgcacatcttcgtccagggctcgtttgctcttgggacggccattaggcccgtcaatcccgaagaggaatacgacctcgacttcagttgcaaactgcgcgaaggcatttcccgtgagtcgcactcgcaggccgaccttaaggagatgattcgcgtcgagctggaggcgtatcggaagtctaggggtattcagagcccgcttgaaccgaaacgtcgctgctggcgcctgagctaccaagatgagctcgcgttccacatggacgtcgtgccgggcctccgcgccgatgaccagcgccgctctgtgctgacggagcgcatggtaaccgccggcgtaggccggtcattggcgcaggaagtggctcgtcgcgctctttggatcaccgacgatcagcgcgacgacttcaagatgctgaccaaagactggccatccagtaaccctggcggctatcagaaatggttcacctcgcgcatggagccttcgggcttgcgtgcactggctgaagctcaggtagatcccgtaccggtgtatcgcgcacgccaaccattgcagcagacggtgcagctgcttaagcggcatcgggatgtgatgtttgtagatcaggcagaattgaagccggcctccatcctgattacgacaatcgcaggattagcttgcgttcccggggagtccctcgacgtgacgttgggtcgggctctcaatgggctgaaagaggttcgtgataggcgatccatggagattcttaatccgatcaacccgcacgaaaattttgcggaccgatggactggccccaactgcccacttcgcctcaatttctatcaatggatcgactcggcgttgaccgcgttcgacgcatggcggtcgatcagcgttccccagcggcttatcgaggtcgctaaggacgacttcgaggtgtccctcggtgcagacgcagcacgggcgctcaccggaggggcggcactggctccgacggctcggcgagttgcgattgacgcgcccccggcgccttggcgcggataa

SEQ ID NO: 530354 - DNA, 1665 bp, Stenotrophomonas maltophilia
atgtccgcccaagagaacctcgagcgatttgttgctagcagtattcgtggcgcgatctgtctccaaggtccatggggaggtggcaagacccatctatggaagagcgtcgtcaagtcgcagaaggttgagcacacatacgtctcacttttcggcatcaactcacttgctggactcaaggctcagatcgcactgtcagctcaggatcagcggggtgtgagctttctgaagcggcgctactacttcagagacattcttggcgccattactcgttcagcccccctagttccatccaggttcggcggtagctcggcattgaccgaggcgacacagtcgctggcatttcacttcgtcaagaaccgcttggtctgcatagacgatgtcgaacgcaggggcgaaaaactccaacttaaggacgtactcggcctcgtttcctatctcgaagaacagcgaggctgtcgagtttgtgtaatcctcaactctggtgcgttcgatgacgctgatgcagatgtgtgggctagtcagcgagaaaaggtatttgaggcggagctgctttacgacccatccgcaacccaagtgatcagcgtcgcgctgggttctggcgaccaactgcaggcgtggtatccccatgcggtcaaagcactggaagatctctccatccgcaacgttcgcatcattcgacggattgctcgcatgctggggctcgtctttggtgaactaacacagcttcacgaattcacgctgataagagtcgtacgcgacttggtctttcttgaattctgtcacaacggcaccgccatgggcgcacctagcttggagctcctgaagcggacgtcgccgctttcatttgcagcggagcgactggaacgtgagaagggtggtggtcaactgtcagcagaagagctggctctggcggagaagatcagcaactatggcattgatggaagcgacaggctaactttgctcttgtctgacagcgtagctgctggctttcccgtggatgggctagctcaagccattgaggcacgggatcgcgaggaaaggacaaatgccaagcaccatcgattctcggcttcatggcgccggtaccgaggagatctctcagcagaagaggaggatgtcctcgttgagatgatggagagttggaagggtgttgttgacactgacagctcacgtaacgcagacgatctggcccgactcatgcgagtgcatgggcatcctgaaatggcgtctgagatcatctcaggctgggtcaacgcgcgcctcggggcaagggtcggagagatgggcgaggaggctgtctcattctttggggaaatccaagatcccgaatttctcgacgcacttggtaaggcccgtcaaagttccgcgactctcatcgacttagacctcgccttggaggctattggcaaggggacaggcgaccaggactccttcaatgcagtggcttctgcagaggtatcagagctagtcgctgcgctgaagcgcatgccgcagagctttctagtattgaaggcgcttttgggcaggcggtcagagtacccaagtgcctactcacgcgcgggaagcaatgctgaagaggcattgaggtcgattgcacgtgaatcggaatggaatggactgagggtgaagtcaacctatggaatctcgctttccggtggagattga

SEQ ID NO: 530355 - DNA, 1584 bp, Stenotrophomonas maltophilia
atggaaagttccgttgagcaattcaggcggctgtgcgagcggacgatcacaaagttgagtgatgccgaagctatagatcacatcgcgcttctagtggattcgtccacagaccaagggttggcgaaaggtgctaaccgagcaattcgtctacttgatcagctttccgaacgggggttgaacgataggaatggcgcgctgtctgagtacttgcgtgccaacgctttctcctgtttggccaagactgagaaggtcaggcaatcctgggcatgggaggagccactgcgacagaaggaactgttggctctttctcgatccgcgagccacccaggcttccaagagctggataggctccgtcgctgtcagatcctgaccaatcaggcaaaccaacttaatacgacgggacgaacgatcgacgcgattgagctttggtcaaaagcgttgagtatcattccgcgatttgcaatggcctcggggaatctgggctgcggcctgttgacgtatgccaagatggtatcagacccgggtcagcgttctactctggcacttcacgcctttgatgcacttacggcagccacttcaaaagatgcggtcctcgattccgagggactggagccagctcttgagtacttcgcgggcaaggcagatcagctctcgcgcatgtgcgacatacccgctattcgagagattcgaaggcgccaggtccccgagaaccggcagtctaacgctgagcgcagctatcggaactggtgccttcaacgtgggctgtttctgaaccccctgaatgatcttggagatcttcccgacgcaggggtagacgagctcatgctgccgccgctaacggagcgtatcggcgagagggctgagggccaccttcctccgcctatagtaggattcttcaatcagttgaagcaggagtacgtttccgcgcgcttcatgctctacgagggtgcaactagttctcgagttcacttctcggacaagggtgtgtctctcgttgacacattggactacccccttcactccctggctactgagcgggtcagaactgccttccgagtcgggtactctcttctcgataaggtcgcgttcctcgtggacctttactggaatcttggcaaggttccgcactctattagcttcaggaatgtctggatggttgaaggcgggcgtcgcctgctgccacagcttgaagcccgtgaaaatcttccgcttcgaggactgttttggctctcaaaagagctctttgacgatgagatacaaggcactacagcagccgatgctcgagatcttcagcgcattcgaaatgcgcttgagcacacgtatctacgggtatgcgaaggctggacaagacctttccccatcggtcatgaagcagcccctgatatcgggttcagcattggaagtgatgagctcgaagccaaggcggtgcgcgtaacgaagatggcacgatcagccctgatctacgtgagcctggccattggcgtggaagagcgacgtaaggagaggatcaatcctgatagcctgaaggcagtgatgcccctgtcgagcctcgtgaactggcgaaaacggcgcgaacccacgtag

SEQ ID NO: 530356 - DNA, 855 bp, Stenotrophomonas maltophilia
atgcatgacgaggatgggttgatatcgacgggtacagccttcttctatcagcatgacagaagttggttcattattactaactggcataatttgtcgggtcggaattttttgaccaaagagccactgtcggttcgctttccaacattcattgaagcgaatctgtcgtcttacgaagtgcctggacatcaaattccgcctgggcattttacgactgtctcgcgacgggttgatatataccgaaattatcagcctgtttggtacgaacatcctgttctgggctcgtcctgtgatgttgtggcaattccattcgagcggccatccgcttgcccggaattcatgcataacgctgccaactgtgtaagccggacaaggatcccagtaaagcctggtgtgacctgctttgtgattggtttcccatattcgctcagtatcggattcggtctgcctatctggaagtctggtttcatagcttctgagccgtactacgatatatgcattggcggtcagactgcttcgattggaggtttccgcggaggagcaaagttgccggcattttttttggatacccaaactcgacaaggcatgtctggggccccggtgttcgcgagctatgttgggacatggaacatgaccgatccgtatcgggaagttgatccagagtcagaaggcttctgggatcggaatgatgtcgcaatgggtgcgtccgcaatggaattcgttggttgctatagcggacgaattggaaaggttgaggagggcgctgcgcttgggctgtgctggcgtgctgatgtaatcaaactgatctgcgagagcaggtcagcagcgaagcatccgcatttcagctctagcgagtga

SEQ ID NO: 530357 - DNA, 1137 bp, Stenotrophomonas maltophilia
atgatggaacacatgcatggtagcggcggctcgggcaagcgcaagatgcgcatggccaagccgctccttgtcttcgatcagcccattacctcaagaatgctggcgtcactgggactggaatcactcgtcagtacgccggagcgtctgaaacggctggatgggcgaacctggaacgaattcatacaacttctgcgaacactgcgccccgcggactcaaggcgcatcagtgacgtcatcgccctgcgtacctcacagcatcgtttaccggaagatagtcagcgcgagcttcgcctgaacgaacagcgagatggacttggcttagctttggacattggaggcctggaccgagcagaagtccttaaatcgatgaacatcgagcgtgctgcgaatgccacgtccgtcctggatctgctagacgacctgcctgtgcatgagcgcaccctactcgaacacgatcgtaggatcttcagttctctttggggagaacaatccgtcaatgtcgccacgttcggcgacagcaacgagcgttcagtccgggtaatcgtgaccgaccagaccgatctagaaaccgttcttggtatcgatcttctcatctacaactgctgccacgagaactacatccttcttcagtacaagcgcatgcataggaagccaaaaagttggagctacccaatcccaccatcatcaaatttgctcacacaactacagagggccaaggacttcaaggccgcagcagggcggcaaaacgtcttgtcgtcaccttcactttggagttacaggcttagcgacgatcccttctttttcaagttctgtgagcaattccgccctggcgcgcgcgacgaaagcctgattccaggcatcacaatgtcagccgatcacctagacgaatttcttcagttgcccgaatcaatcaacagcggcgggggcagagcgattggttatcaaaattgcccgcgctacttcaacaactcggagttcatccaactggcaaagtctggctggatcggcacaagcgcccgatcggcaaaattactgagcgaggtattgaaagcgaacaagaagggaggcaggcaggccatgctcgccatcatcgatccgccaaaggaaaaatccgcagcaagtcgtggccgaaagtga

SEQ ID NO: 530358 - DNA, 1044 bp, Stenotrophomonas maltophilia
atgtgggcgcccggccagcatctgcgtgtcagtgagctggggcgcgcgcccatcagtgatgatggcaagctggaactggttacgattactcccaaactgatcgcaatggatgtggcgtctgagcgtgaagccacgcttccgcaggctcttctctcctacaaccccgcaccctaccgcgtcggaataggcgattcactctatgtgacggtctgggatcacccagaactgaccgtacctgcgggcccccagcagacaccgaatcttgctggacgcgcggtccagagcgacggcaccattttctacccatatatcggtattgtcgaagcagctggcaagactccagctcagattcgcgaagaaatatctcgtcgcctcgcaaaatacgtggagtcgccgcaggtggacgtctcggtccttacctatggcagccagagagtctgggtcaccggtgctgcacaacagccgacaccgatcacactcggcacttcgccactgacgctttctgatgcgatcagccaggcaggcctgagcgcagcaggcgcagatctgtcaggcgtacagctcagccgtgaggggcagacccactccatcgacctggaagcactggcgtctcgttatggcggccgtcagatctacctcaaggacggcgattccatttacgtcccgttcctcgaccgcaaggaaattttcgtggtcggtgaagtactgcaaccgggagccttcagcttccggacgggcgatgtgaccttaaaccaggcgattggccgcgcacgtggtttgagccagaccacctcgagcggaaacgccgtgtacgtgattcgcggatcggccgatctccaggcgaagccatcgacaatctatcagctagaggcacgatcacctgctgcattctccgttggaagccagttcaagcttctacctggcgatgttgtcttcgtaggtgctgcgggcgttactcgttggagcagattcgtcaaccagctcttgcccttcagctcgatcatcagcagtgcggcaagcgcccgaaacgatctggataactga

SEQ ID NO: 530359 - DNA, 240 bp, Stenotrophomonas maltophilia
atgggagttaatgttgtcagcacgattcacctgaaaggcacggaagcagtgaagatccttggagtacagcgcactctcagacgctacgaggagcaccttgaagggggggggttctctgacctcaatgtctattgggtcgacgcggaatccggcttcatctggaaaagccgccagcaccttgccccgggttatgcggtagagctgacccagctcaagcccttcctccccgatcgagactga

SEQ ID NO: 530360 - DNA, 762 bp, Stenotrophomonas maltophilia
atgcgatcccatatcctatcggcctcgctggcgtcgctgtgctgtgcgatgccagcagcgacactcgctgcccaacctgtcgtggaattttcaggggagatcgaatcaagccattcgcactttccagcgccagacggccgcctggccagcgccctgcttgccgcaagaccgtcctctcgcgctttcccccctgcaacagtattcacgcgggaggcggctcgcaaggaacagatccgcttcaaagctggaatcgagcatgatcttgaccagctcatgatccatggagagcccacaatcgcgtcgctggcaggacggctgaggagatggattgcgcgcatgccggtaaccgggcgcaagggaattgtcactgatgcgcgtctgatggagcttcagcctcaacataatccacggatagaggccggagacactatcacctacctcgcccggcccagcaccgttgaggtggtcggtgcagtcgtcaagccttgcaccatcgagcactcaccgctcgatgacgcaattgattatgtgaaaaagtgcccatcaaccggggaggccgatcctgaccagattgtcgtgatccagatcgacggcacgattcagattcagggcgtagcactatggaaccgatcggacccgcagcacgtgtcgccaggcagccggatccttgtgcccatcgccacccgggaaatcgcgcaaatcgctccggacctaaacgaagaccttagtagattcattgcaacgcagcttccatcgccgtga

SEQ ID NO: 530361 - DNA, 2001 bp, Stenotrophomonas maltophilia
atggctgatgatggtgacgttgctttcaccgcatcgcacaactccccttacagtcgctacaacctcacgatgcagccgttctcctggcttgagggctcctttcgctacatcaacgtatcgaatcgtcgatacggcccgcgctggttcagcggcgatcagaactacaaggacaaatcgatcgatctgaaagtccgcttgtttcaggaatcgcgactactgcccgagattgcattcggcattagagacgtgggtggcaccggcctcttctcgagcgagtactttgtcgcaagcaaacgattcggccccgtcgacacatcactgggcctagcaaccggctacattgggaatcgtggtgacctctcaaatcctctaggcggccttgatgatcgtttcaagatccgcccaatccccaccaacgacatcgtcaatgctggaaaattcggcgcaagctccatgttccgcggaccggtcggtgtcttcggcggcatcagctatcagacgcccatggatgctctgatcctgaagctcgaatacgacggcaacgactatcgacgcgaacctcgcgagaacaatctaaagcagaacactccgttcaacttcggcctagtctatcgacccaatccgagcgtcgagcttaccgcggcgtgggagcgcggtgatgccgcaatgttctcggtcgctcttcgcggcaaccccggcagagccaggccggcggcaaagcccttcgatccaccacctgcacctatgcccgcccagccacagccgtcaacgcactcaggtttcggcaccaagctcgcaccagactggaagactatcgaggaatcacttagatccgatgccggcttccagctcgatgacgtgcagtccgcggacggggagttgatcgtgagcggctatcagatgcgcttcttcaacaaaagcaagggacttggtcgtgtctcgcggattttagccaatggcaccggtgacgaatacgattggtatacagtccgcagcaaacgccttggaatgcctatcgtagatatgtcggtacgcagagaggccttggcctcatacatcgacgggaccatcgacttagattccctacgccgaaatactgaactgacggccccggacaacaggaagtccgaccacagctacaacgcggagcgccccccctttggcggcggcttcagcataggctatcgccagaacctgggcgggccggatggcttcatcctttatcaagttgcggccaactacagcgccagttattttttgacaccaacgttgtggctcaccggcactgcgagccagaatctggtgaacaactatgataagttcaggtacgacgcgccaagccgactgcaaagggtccgaaccgacctccggcagtacatgaccacctcggagaccaccctccccaatctacagattaccgcctccaggagactgggacgcgacacctacggcttggtctatgcaggctaccttgagtggatgtacgcaggtgtcggcggcgagctactgtatcgaccggttggccaaccctgggctgttggcggcaatctgaacagggttcgacaacgtgatttcaatcagcattttggcctgcgcgattactctgtgaccactgggcacgccactttctattattcactggatcgccaagagcgtgttatcgcctcactaagcgctggacgatatcttgcaggtgactatggcgccaccgtaaacatcgcaagggcattcccaaatggcatgaccatgggtgccttcgtcaccaagacgaacgtgtcttcgcgggactttggcgaggggagctttgacaagggcatctacttcagcattccgtttgacaatctcctgccgcgttcaacccctgctcgcgcaacgatcaactggaacccactcatacgcgatggtggtgcgatgcttgcgagaaagtactccctgtacggcgccacctctgaacgagacgagcgtgggttctatgagaacttggacgaaatcgcggaataa

SEQ ID NO: 530362 - DNA, 1104 bp, Stenotrophomonas maltophilia
gtgaacaaggtagttcgaatcctgggaattcgcggcattcccgcggcacatggcggatttgagacgttcgcggagaggcttgcgctctatcttgtaggtcgcggctggcaggtgatcgtctactgtcaggaagagggcgcaggccaagcctggcaggatacttggcagggtatcgagcgcatccatgttccagtcaaaggccatggggctgcgtcgtcggttgtattcgactggcatgcgacgcgcgatgcctctagattcgatgatgtctgcctgacgcttggctacaataccgccgccttcacggcgctgttgcgaatgcgtgggttgaagagcctgattaacatggatggtatcgaatggtcccgagccaaatggggcgtgcctgctaaggcttggttttggatcaatgaacggctagggtgctggcttggcacgcatctgatcgccgatcatccagagattaaacggcatttagctacccgggtgtcgtcgaagaagatcactactattgcgtatggcgcggatcgcgtagtttcagtggaagggcttcaaggcgagttgggcgggcttcagcgcggcgggtacctcactgtgattgcacggccagagccagagaattcactgctggagatcgtctcggcgttctctgcacggccaaggggcatgaagcttgtcgtcctgggtaagtatgaccgtgcggttccttatcagcgtcaggttctcgatgcagcaggaaatgaagtgatgttcgttggcgccatctacaatcgtgagattgttggagcattgcgtgcgggctcggcagtgtatgtacatgggcatagtgtcggcggaaccaatccatctctcgtggagtccatgggcgctggcaatgccatcattgcgcatgacaatcggttcaacagatgggtcgcaggcgaaggagcgcgatatttctctgatgaggcggggctggctaatttgtttgattcacttctgggcgatgcgccagagttgaaattgttgtcagataatgctctggcgcgttatgaggaatgttttacttgggggcacattctcggccagtacgagcagctcctggaacgttacgcgagcggttga

SEQ ID NO: 530363 - DNA, 1005 bp, Stenotrophomonas maltophilia
atggagggtttccatgttggattcaagcgaatctatgggagctcaagtcgctgggtgcgtgcaattaggtacgtgcgtgggctctgttggtcactgaggcatgcgaggaggagcggttgcaagctggcacacttccatttcttccatggtagcgcgatggagctggtgacagtctcgatcgcgagagcgctgggatttcgagttgtcgtcacggctcacgacgtggagagtttctccggagagggtggcgtggcgaccgcgcagcgcacgtatgccaaggcggatgcggtgattgcacacaacagtgttacagcgcttgagctggttcagaaggtaggcgtcaagtccggtaagatccatgtaatcccgcatggaaactatatcgattcgatcagatctggtgcttcgcttgtcgaggctcgtgatcgcctgggtatcgagcagggaactcgtatgctgctcttctttggccagattaaggcagtgaaagggcttgatgtattgattgaagcgcttcccgaggttctggcctccggtgagaatgtccgcctggttgtggcgggaaaggtctggaaggatgatttctccgtatatcaggagattatttcccgcttgtcgcttgagcgacatgttcatctagatatccgctatatcgaggaggacgaggctgagctctactacattgcatcggatcttgttgtacttccatatcgcaggatctatcagagcggtgttctattgatggcgatgagtcatgccaggactgttgttgcttcggatcttcccggcatggcagaggtcgtgaccgacggcgtcgatggatttctgttccgcaggggcgacagttcagatctcgcgcgcgtgatcattcgcgctcttgaagggctttccagttcggaagtggcgtgccgcgggaaggatctgatggaaaggaaatacagctggtcggcgattgctgagcagacgcgatctgcatatgaagacgtacttcaagaacgaggttaa

SEQ ID NO: 530364 - DNA, 1233 bp, Stenotrophomonas maltophilia
atgttctatatttggatggcgatcctcatctacgcccttccgttcctgattctgcgtccgcgcgacgttttccagccggagtttttgatcaacgcctacttcatcacgcttgtcgggcttggtccgatcacgttgatgaccttcttcccgacgatcgcgatggggggctacacgcggctcttctggattgtcgccgtaggctatctatcgatcaatgttgggttcttgatgtcgcgggcgatgtcagggtgtccggacctttcgcgactgatgcttccttatattcgtaccaagcgattacgcgcggtgggcctgctacttgtagttgtctcgctggtcgcgggatgcgccttcttcgcccgtgctggcggtgtgcctttgctatctgaatcgaaagagcttgcgcgagttgcggcgcttggggtgtcaggaaacggctattttctatatttgatgacgctaggggcttacggagtgctgctcctgttcgcggcgaagttcgtcatgccgcggccgagcttggacactacaatggttatcgcaatcatctgctttgtgattgtggctgcctttctgacaggcacgggttcgcgacgctatgtgatctggatgctgttgtatgtagtgatggccagacactatctggtcaagcagcttagcgtgaccaagtctctgattcttggcgtggcattgcttgcgttcgtcagcctgttcgagttggtccggaatcccgatagcgaaacgacggcttcgtttgctatcgctgtcatgtatcgaagcgtgatctatacgagcaatctggagaaggtattcgcagcgttctcagcaatcgacggtgcgatgggcgggaagacccttctaatggatattgcaaccattcttccgggaaagcaggttgactatcagagctggcttaaggaagttgtgggaatcgagttcgagggattcggaatcccaccaaccctcatgggcgacatgtacgtcaacttcagatatgggggcgtcgtgattgggtgtgttgcctttggtttcgtggtcaggttcatgtactcattcctgctcgcccgattgaatcccttcttgggcgtattcgtctatatcgtgatgattgagtacatgacgaagattgtgacatcgggactgtccgcccagtcaattggcttgatctggggggcaatggtctgcgcgatggtcgcgcttgctggtggtcttgttcgagtgcgtgcccgttag

SEQ ID NO: 530365 - DNA, 1053 bp, Stenotrophomonas maltophilia
atgaagaagcgtaacgcaatcatagttgtcggttactacggcgagaactttggcgacctgctaatgctgaaggcactcttggccagcttgcccacttctgcgagtccagtgcgcatcttcagctatggggacgttcgcgcgctggacagattccttaaggagcacttccctcgcagcgatatcacgatcgtgaagcccggtatttgggcattcattgccgcatgcaagggggcttcgcaggcagtatggggaggaggcacctgtttcatggacgaaggtggaactggtggggtgaagtatctggcaatggcgcgcctgctgggcgtcagagtgagatacctgggcatcggagtcgatagatgcaggagcatcaagacccgaatgtcactgtggattgctacgcgcatcgcagatgaaatgctggttcgtgatgaaggttccgctgaagcgatccgtcgagttcggcgtggaggcggagcagcggtcaagaagataccggatttggcgatggcgatgcaccattccgacgtggagaataggcagggtgcagtactgtgcctccgggatcttgattcctactacgatccgataaccgccaggtcgatcaatcgaaagctgtgcgatctcctgctgcacacatgctggaagcagtccgtcgctcaagttcgcgttctggtggcagatgaagcgttggatgctggtgtttcacgtgaggctgcggactatctggttgccagcggcattcatgttgacatgattgcgggctggaatctggatgcatcgatcgatgcagtcgcaggaagcaggtttgtggtatccgcgcgacttcatgtgggtgtcgtcgcgcagctggcagccactcccttcgttctgttcaactattctgagaagaatcgcaagttctgtcagacagtcggccagttgaagcgatgtcttgatctatcgtcggcagcggaatgggaggttgacatggccgctcctgatcgcagaatctcagagctcctgcggcgtgaatgtgcggatgccctcgaggcgttgcaggactcacgatga

SEQ ID NO: 530366 - DNA, 1206 bp, Stenotrophomonas maltophilia
atggctggcaagaggtctgcggggttgaaatcgatcgttaccattctggccgttctggtggccgcagcgatgacatttttcctgcaggtgattctgtcgcgatcattattgcctgtggattttgggcgctatgcgctgatcaactccatactgatgatgtcggccccggtggcgtctgctggagtcgctgcgctgctactgcggcgtagagtgagaggcgagagtggctcgataggagttgcgctggcagcttcgactattctttgcttgctcgcggtagtcgtgactatcgcagtcgctggcgccctcggggttttggggctgccaagcattcttctgtcgacgctgtgctttgcgatggcagcccaggcactgagcgtttctttggctcaggctgacgaggagcccgggagcgttgcgcttgcacagataatcttgccgcttcttcggattcttggcgctgtggttgcggttgttctgggtgcggagctgcttggagtgtcagtcgctcttgcggttgctgggctggctgctgcatgtgtctattgggttctgcagttgcgacgcgctcgcgtggccgagccttgtgcgccggggcgcacgcgtgcgtttctgcgggaatccatgccctacagcgtcaacgccattgttaatgtggcccagctgcaggtgattgttgcgctatcctcggtggtattcgacttgcaagtgacgggccgaattgccatcgtaatgacactgcttgcggctgtgtatcttctgcctaacacagtatttggggtcgtacttctgcctcgttatcatcggctcattcctgggggcgatgaacgatggctgccgatgctgcatgcgttgatggcagcaatacccgcgattttgattgcactgttcttctggtggagcgggagcaagctcatggggctcgcgttcggacacgcgggggctgcagcctacccactattggccgcgctcgtctgggcaataccgttgcgcttctactccactggtatcggagcagctcttctttcagagagtgctattcgttggaaggtgccggtgtcggttgctgctgttgtggtgcagggggcattgtgcattctgttgaagggtaaagccgagcacaccttcgcaacagcgatgatcgtgggcgagcttctggtggccgtgttctattcgattgtttttgtgcgtgagttccggaaatga

SEQ ID NO: 530367 - DNA, 2217 bp, Stenotrophomonas maltophilia
atgaataccgaagtacgcagcgccagtactcaggacgatgtcgaggaaatcgatcttcgtcaactgcttggaactctgattgaccataagtggtggattgtggctatcaccgccgtgttcgccattgccgcgagtgcttatgcgttgttcgcaacaccaatctaccgcgctgatgcgattgttcaggtcgagtccaagatgccgtcgttgccgggactgaccgatctcagtgattccctgggtattggcggtggcgctggcgtatcaactacagaaatcgcgttgatcaagtcacggtcagtggtcgggagtgctgcggaacaattgcatctggatatcgaagtcatgccgcgccggttccccatcgttggcacgtatgtcgcacgtcgatggagagatgccgaacccgaccaactttccccatcattgatggggctttcgtcgttcgcctggggtggagagatcctgcagatctccaagttggatgttccctaccggctcgttgagcgaaagctcacgcttgtagcccttggtgatggaaacttcgagatcctgaatgatgacgccgagcagttggccaagggcaaggtgggggaagttgtacgttctgcgggcgggagcgtgatccgagtggagcgacttcgcgcgaacgctggaactcggttcagtgtggtcaagcgaaaatctatttctgtagtgaatgagctgcaggagcgcatttcagtcaatgagattggaaaagagtccggaatcctcgcgctaggcattgaagacaaggatgctgatcttgcgcaggcattcttgcagcgggttgcggaagcttatgttcgtcagaatgttgatcgtaactcagctgaggcatcggcacagctgacttttgtgaagcagcagttgcccagcattcgcggtcaagtggatgcagcgcaggctgcgctgagcgcctatcagatgcgagccaattcggtggatctgagtctccagacgaagggactgctagagcaggaggttgcggtggagaccagtattcagcaactccgcctccaacaggcagatatggatcgcaagttcaccaaagatcatccggcctatcgtgcgctgctccgccagattggtgagctggagggccggaagaatgatttccagggccaggtgaagcagctcccggaagcccagcaagagttgctgcgcctcactcgggatcttcaggtaagcaacgagatgtacaccgtgatgttgaatcaggcccaacagttggaggttgcgcgggcgggcactgttggaaacgtccgtatcgtcgacaatgcagaggcggatgcaacggatccggtcaagccaaacaaggccgctatcatcctggttggcatctttttgggcctggctctctcgatgggcggcgtctacgcgcgccggattctcaatcggggcgttgaagatccttcccagatcgaggagcttggtcttccggtctatgcgtcagtgcccgcaagcaacgcacagctcagcgattcggtccgcggcgcattcaaagccgacggaaaggtccatttgctggcgatgaaggatcctgcagatctggctgtggaagcaatccggagtcttcgcaccagcctgcatttcgcgcgcttggaggccaagaacaacatcgtcctgatctcgggctccagcccaaacgctggcaagacctttgtatcgtcgaatctcgccgccgtgatcgcgcaggctggccagagggtcttggtggttgacgcggacatgcggaagggaactctccacaaggctcttggcgccaagcagtcccccggcctctcggatgtactggtagggcgcgccacccttgtagaggcgatcggagctgtcgacggtcttgagaatctgcattacgtcacgcgaggcggcattcctccgaacccctccgagctactgatgcacgagaacttcacaaagttcttggagcaggctgagcggtcgtacgaccttgtgttgatcgatacgcccccgattctggccgtgactgacgctgcggtaattgcacatcatgcaggcacttgtctgctagttgctcgcttcgggttgaatcaacctagggagctggcattggcgaagaaacgattcgaacagaacggtgtgaagctgaagggcgccatcttcaatgcagttgagcggagagctgctggctactacagctatggctactacgagtacaagtcagcgggctga

SEQ ID NO: 530368 - DNA, 1128 bp, Stenotrophomonas maltophilia
gtgctgagtacgatcggtttgttgatgggcctgtatgtggcctggcgcctgttctggccactgcgcatgcccatctggatgaaggtcgtgctgtcgctgctgctggtgagcgttgccgtgcagctgcgcatcgtcgccatgttctggggcacgatggcctcgccggaaatcccgaagctggccatcgcctcgttggccacgggttcgactgccgtactgctgctggcgctgttcctgctggtgctggacgcgggcctgctggtgtcgcgcatcctgcgcagaccacgtgctgtatcggcgttgcgcgcgccgaagctgcgcccggcggcgggtgtgctggcgctgctggtcagcgcctatggcgtcagccagggaatggcggtgcccaagcccaggcagatcgaggtgagcatcgccgggttgccggccgggttcgacggctatcgcgtgctgcagctgaccgacatccatgccagccgcctgctgaccggcgactgggtgcgcagggtggtggaggagagcaacgcactgaagccggacctgatcgtgatcactggcgatctgatcgacggcagtgtcaaggcccgtcgcgacgacgcgcgtccgttggccgacctgcaggcgccggatggcgtcattgccatcaccggcaatcacgagtactacgcgcagtaccaggactggatgcaggcgttccgcgcgctgcacatgcaggtgctggagaacagtcatctgcaggtacgacgcggtgacgcggcgctgaccattgccggcgtcaccgacccggtggccgcacgctacggtctgccgctgccggacctggaggccgcgctggctggcgccgatccggacgcgccggtgatcctgctcgaccatcgcccgcgcaacgcacgcgaggctgccgcgcgtggggtgaagctgcagctgtccgggcatacacatggcggccagatcattggcatggaccagctggtgaagcgcgccaatggcggttatgtgtccgggcgttacgaggtggatggcatgacactgtacgtgagcaatggtgctggcctgtgggccggtttcccggcacgcatcggcgttccttcggagatcaccctggtgacgctgcgccgcgcgccgtga

SEQ ID NO: 530369 - DNA, 321 bp, Stenotrophomonas maltophilia
atggaaaccctcgactatcgattcgacggcacgacgcctgtgcacttcctcaccgatgcagtgctggtcggcgtgctggcctcgggcaacctggaagtccttctggaaccggccgcgctggacggcgcgatgacggtgcgcatcatcaccgccgcgcagggcttcggcagcgtgtggcaagcggtgatcaccgacttcgcacgacgccatccgctgcgcgatgtgcgcatctcgatcaacgatgccggcgcaaccccggccgtggtcagcctgcgccttgaccaggcagcggaaacgctgctggccggaggcacgccatga

SEQ ID NO: 530370 - DNA, 234 bp, Stenotrophomonas maltophilia
atgcataacgagagcccgctcccgatcggtagagtcgagccatgctcgactgatgccctgggtagagtcgagccatgctcgactgacgaaaagcagccgaccagcggtcggctctaccagggtggaagcatcgagcagcaacgccagcgcgccaggcgcacggcgatgtgggtcggcgccatcgccgtgctggtctacgtcggtttcatcctcagcggggtgatcggccgatga

SEQ ID NO: 530371 - DNA, 240 bp, Stenotrophomonas maltophilia
atgatccgcttgccgggcatgaagctgcccgaaagccagcaccgagccatcgtgccgctgaagggcggttacctggaaatccccaaggacgccaacaagaaggcctacatcgaatacatgccggccgaccccaagcacgggattacctccttggtgccggcaaagctcaacttgggccaagtgcgcgaagggtgctacaccccgaagccgttggtgcccacgtcccgttgggccaaatag

SEQ ID NO: 530372 - DNA, 645 bp, Stenotrophomonas maltophilia
atgcaacacgacctttggcctgagcttcgagctgcggcatctgaaacctccgggctcaatgttcacgaatacgcgtctaagctgctcctgcagctcaaccgggacttgacggtcttgccggaccccggcctctttgggaagaaggtgtccgctactgatacgcgcttcctggatttggccgctggcgcattgaaagtggccgacggcttgcgcgcgcgcgccacgcgggctggggctgaatcgtccgcctttcaccaagagttgaacgctgttcttcgacaggtcgaaagcctgtttcgccggctaggcatgggcgatccgcaagaaacgctggatcgctattactttaacgaagctgcgctggactggatgaaggcactgggcattcattcctcgaacgtccggcgcgcgttcacgcgctacacctcagagcctgcactcctgcccatcaatgagattcaccgccgcattctcaacaatgacagacttctcaaagaaatgctttccccgtcggaccgaatgacgacggctgactgggtgcaccaagccgaccattggcaatccttgcatcgcgcttgggtgccggtgcttgaagagttctgcactcaatcggcgaccatcagcggcgacctggaaccggtgtaa

SEQ ID NO: 530373 - DNA, 525 bp, Stenotrophomonas maltophilia
atggcagaggtgaagccactgcctgtccttagggtcctgtatacggcgttggataccaccccagctgtcggcgctgttgtgctggcagacctgaatcgagattccgaatcactcaagcgcctgatccacgccgaggtcatgtctgcccccgagatggcggggaccgtagacgactacgaagcgcgtgtccaagacatgattcgccctaacgacaaccccatgtctatcaaggtccctgaagaactggcgcgctctttcgccaaagacaccgggcctgtccatgcgttggatggctcggcttacttcgacaacggccgcttgatcgcttcgtttgaaggccgatacaccgacgccagggaagagtcgggccaggtctccgttacgctccagttccagcccgtctccccctcgctcttcttgctggaagaccgggaagtggagttcgagtccgaggaggacgatgacgcggtgactgccgatgacctggactaccagttcgcctctatcatggatgacgaccgctaa

SEQ ID NO: 530374 - DNA, 474 bp, Stenotrophomonas maltophilia
atggggttgtcgtatgagtggggcaagagatggcgtcaaagtgtgacggcaatggatcagcgttccgttgacgtgctgcgggggctggccgggtccagaagggcgagggccgtggtgttgggagtggtggcagccgtgttgttgggtctggcaggttggtccctgcggccactgccggacgatggcgaaggactctcgcagttctgccgaagcaccgcaggtggcaacctctttcgagcgaacgtttgctatgaccgattgctgccggtgattgaagagctcgttgagagtcgcaagcgcggcgatgacgttcaaaagatcggtgaagcctgcttgcgtgttgcggaacgctcaggcggggatgtctgctcggtcacggtgacgggcccgttctccatacgccggaccaccgttgagttttcccggggcgttgccgagccattggttgtaacgaagcttggagagaggccatga

SEQ ID NO: 530375 - DNA, 846 bp, Stenotrophomonas maltophilia
gtgagctggaaagagtggcaagcgtctgcggcccctgaccgggtggccctgctgttgggccggcgtcgttcggcgttgctctacgccgacaaccacttcacccctctatcgcggcactcgaagcgcgagcggctgctgacccatctcgccgcgcgtttcgacaagccccggtttaaggtctacggctggtcgggtgagatggatcgggagcgcgtttgcttggtgggctggagcacccggtcaggcgatgcctgggcactgagcgaggcgctgttagcgttacgactgagggacgggggcgaggtgctggctgagggcaaggtgacccttctgcgcgttccgacagacgggttcctgggggccgtgtgggcgctcattgaggcccatgggatcgtcgtgccgttggaggggccaagcggtggtccgctcgatgtgggcgactggagggagtgctggcgccaccgtgtgatggacccggtgagcaaccacaagcgcattccggtgatcggcggccaggcgctgcctcatgctcctcgcgtgctgtccacgaacccggattcggttcgccggctggctcaactgcaggccgcccggcgtgctgaccgagtggaggaggcagagctggcgtatcgcgaggcgatggcccgtaaggccaaatacctggaccgggtgaagcgcggcctggaggccccaatggcgctggacgaataccgggcgtggagcgatgaggtgaggcagttgggcgtggactggggtcggatggtcacccagagccgacgggacctgaatcgcccgccggcccacaccgatgtcccctactctggtcgctcaatgacaaggacatag

SEQ ID NO: 530376 - DNA, 423 bp, Stenotrophomonas maltophilia
atgtccaatgtactggcgctggccattcggcagtacagccacacgctgctccgtgatggtggccgccgtggagcgcgaacgccctatctactcgtgactgaggaaggtacaccgatttccggttcgagcttggatgccatctggaaggccgtcaatggacgtacttcgcgtcgaatgagctggcacgtgctgcgacacacctgggccgaggaggttgcggacgatctgctggagcagtatctgggcagtccggattcatcggaactggtgctcggaatgctgcgcgagatggggggctgggcgcccacatcgaacacgcccatcacttacatcaaaaatgcgctcaagaagcgcggcaatgcctacctccgaaagcgcaatgcacggttcgatatggagttggggaatgactccgactactga

SEQ ID NO: 530377 - DNA, 1020 bp, Stenotrophomonas maltophilia
atgactccgactactgacggccttcttgcagagcagctgagcgacttgtccgacctgccagaaatagtgttgaccaaggatcggcaggagctgagtacgcaaggtgatatctggtcgttgcgtgccaatagagatggtggaggattggttgaggttgactatcggccgctgcggaagctgtgtagtgaccgattcattttgatcgtcaagctgtttgttgctaagaaggcagctacttcagctgcatggagcctcagaaatattgtccaagcggtagcaagatctgttagatgctggcgcactggatcgcgaacgggcagtgttaactggtccgaactgagaatttcggacttccaagcagttctttcgtctggcctgaaatcaccacagggagttggtgggaatgacttcgcccatcttcgtgcgatctacgcgtggggagcgcatgttgccaggctaactgacttcgatccggcactctcactgcagttgaagggcatgaaggcgcctgggaatctgaagggtcgtaaggtgcttggctccgatcctaaagagggtgccttcacgcccgaagaagtggagcttctcgaccaagcactgaagcggggggcaggcgatccgagggctgtgatcattgcccagctgtttcaggaactgggcctgcgcccgacccaagtgctgcgaacgtggtggtcaggtttgcgtcggtttgaagccaacgtcgttgagtcgggtgaaacaagaacattggtgcgctatgtgctgtcaatccctcgcgctaaggaacgtggggaacaccgggttgaggaagatcgacccatcagtaccttgcttggcgaaaggctagacaagctcaagccgtcgatgtacgacgaaacaacaccgctttgttggtggttggacccggatacgtcgagtaaggacctgggctacctgctgcaaggctgggtcgatgaggtgggtatcgtctcgcctcgaatgaatcgcccagggttttgtagacagtcgtcagccgtctag

SEQ ID NO: 530378 - DNA, 774 bp, Stenotrophomonas maltophilia
atgcagccacacccccgcgtgaactcgttccgccccgtcgacgctgagtccttccaggagagctcgccgcacttcggcgacttcgtgacctggaatcagggccgattgtggcagctgatcaactccgaaccggtgtaccgccagatggcagcgttctccctgcgtgggttgccggcggtggccagcatcacccatctgctcgcccccatactggcgccgatcgacgaactggccgagaccgacccggaggcgggcaagacggccgaccgcgcgcgccgggccatcgggtcgatggtacgcgccgtcctggaggccaatggcttccggaagaccgggacgcagcgagcagtaccaccggagccgcgacgcctgttcgtccgcgccgaagtctacgagcaggccccgctggcaccgccggaggaaggggaatccttcgactgggacaagtacgccgtgcaggcctcttttgccaatgtgcgcagcctgtcacccgacctgggcggccggcccctgccgtcgatgtacagccccgaccggcgctggttcctgctgtcctccctggacatcgatgtcccaaccgcttccgaggaccagctgcgcatcgcgctcgacgcggtgaagcgcagctaccaggccgaacgcagcaagccgacgttgaactaccgccgcctgtgggtgcaccagatcgatttctacgagctgtgcaacctgctgttcggcctggtcagtgatccggatgaattcgccgatccggaagcgctgctggaagcgtga

SEQ ID NO: 530379 - DNA, 261 bp, Stenotrophomonas maltophilia
atgcaaacgctcacggaactaggggcggccgtcgccaatcgccggcgcgccctgcgcatgacccaggccgatgtggccgcgcaagcgggtgtgtcgtcggacacgctgtctcggttcgagcttgggagggtctccgagttcggatcccgaaagctgctggctgtcctgtccgccctgggcatggagatggagttcaaggaagagggtgccgccggcaaccttgatgagctccggaaagagcacatggcgccgcgccgatga

SEQ ID NO: 530380 - DNA, 1335 bp, Stenotrophomonas maltophilia
atgaaactgtctgtctatgtgcacgggcgtgaggtcgcctcgcttgaggatctgaacagtttcacgagccggctcagttaccacgatgatgtggagcaagacgacttcgtgtcgctcaccatgccggtgcggcgggagccgtgggactgggacgaccagctgcacccgatcttccaaatgaacctgcccgagggctatctgctgcaggtgctgcaggagcaattcggcccccacatcgggggcagcccaatgaacctgctgtcggtggtcggcaggaacatgatcgggcgcatccagatcgcgccccctggcgccgcgctcaatgagccggccaaaccggttgacgtggccgcgctcctgcagggcgacaactccgccgaagccttcgcagagctggtgcgcgagcatgccaccagcggtgtttctggcgttgtccccaagttcctggacacggagaagctgaccggcctgggcaaccacaagaagggaacgctgttcacccaccggcacatcatcaagggctcatccccgcacctgccgttcgtgtccctcaacgagcacctgtcgatgcaggtggcggcgaaggtgctgcccacggccaagactgaaatctcgcgcgatggccaggcgctggtcgtggatcgcttcgacgtggatgacgacggccagcccctatggggcatggaggacttctgcgcgctgctcggcatgcggccggcgaacaagtacgaaaccacgtgggaacggatcgccagggctgttcgcgatcatgttccagccgatcgcaggatgggggcgtaccgacatctcgccacggttgttctgttgacctatgcgctcaggaatgccgactgccatgcgaagaacgtggcgcttcggtacacatcccgccgcgacgttgaggccacgcctgtctacgacatgctcaccacggcagcctacggccaatacgccaagaatccgccaggcatcagcttgggtggtcgaaagacttgggatccgggccggaccctgcagcagtcgatcgtgtcggtattcggggtgcccgcgcgcgatcaagccctgatcgtggagcagattggccaggcaatctccgaggtcgcgccggcggtgcgcgaagcagtcaacgagcatccgggcttccgcgagatcggcaagcggatgctcctggcgtggcaggatggcctgggcatgctgcgaaacaagcgcacctacaacctgggggagctggaccttggcgagtcgttccgtggcctgtccgacccagagccagtgaacgctcagcggactgtaattggccggtccgaccttgcggattcggatccgatgggctga

SEQ ID NO: 530381 - DNA, 294 bp, Stenotrophomonas maltophilia
gtggttcgtctgtcgctaacaaccaagtcgttcaacattgccagcgacgagctggagagcgcgcggtattgcgcgaaagaacaaggcatttcactcaacaagtatttgcgcctcgctgttctggaaaagaaccggggcgtggtgcaggggttggaggcccgcgacgcattggacgacatccgagctaccgtccgcaacttcgaaacccggaatgccctggcgctggaagcctcatggcggacctgcgagccgaacagggcgcggcgctccaggccaacgaggaactggtggtga

SEQ ID NO: 530382 - DNA, 330 bp, Stenotrophomonas maltophilia
atgccacggaagaagcagctaaaggtcagaggcagcactatcaccggttacgatgtagctgttaagcggatcaaaagtgagcacacagattcttcgatcgaggtcatcaagctccagatcgaagctgatcaggtgatctacgaataccagttgcacaaggacgagaatttttctgacctgaagaaggcgagagacgccattgatgcgtcacttagaaaggcacaagaggattttctgagcgtagagatctctgaatatcctgaacgctcctacctcacgcttaaggttcagggggagtcgagcaagcagttcacgggagaccgcaaatag

SEQ ID NO: 530383 - DNA, 1554 bp, Stenotrophomonas maltophilia
atgaaaggatccggcgtgccagcgacccaccttgccattgccggattgcccaccgaattcgtcgaaatgcgcagcgggggcctgtactgggtggtcgccgccggcagcgcaccgacggatctgctcggtgccggtgtgctggccacggccgacgcactggacgaggccgtgctggtcacgctggggcggggggccgaatcgatgctggcgctgctgccggccgaccaggggccggcccgcctgcggctgttccaacgctcgcaccatggcatgcagcaggcgctgcgcgggctgaccggcgatctgccgcgcaccgcgtcggcgcgcacccggctcagcatggtgcagttcccggtggcggcgctggacggctgggacgatgcccggctggcgcgctggtgccagcagctgcaggactgggccgtgcaggcgcagcaggtgctgctgttgctgtgccatggcgaagtggcgacgcttgcgccacggctgctgccgttgaaccgcagctgtgccggcgtggcccagctgcatccgcatcgcggcgccctgcagttgctgctgcactactggtccaacagccatggtgtggtggcgcagcgatcattcggcatcgagcaggagaaccgtgggctgcgccatctggccgaggccgatgccgccgagacggcgatcggtttggccagcggcggtgaccgcgatgtctacctggcccagaccgaagtactggaaggtgcgccgccgttgtcggcggcctggcgcctgtatgacggttggggcgggttgctgccggccgcgctgcaggcgcgcgaggccaccgtggtgctggccatcgacgagaatgcaaaggtggatgcactggcccgcctgctgcaccgcctgcgccgcgaacgtggcaacgcattgaaactggtggtgcgcgagctgcagccctgcctgcgctacgccgatgagcggctgctgatgcagtgcggctgcagcctggtggtgccagccgacacgcctttgccgcgcctgttgaccctgctggaaaccgtgcagcgccaacgttggcagggtcagctggctgaagatccggagccgttgatccgtgcgcatcggccaccatcggtcagtggcctggtcaacgccgcacgcttccgccagatcgctggcgaacgcatcgaccaggacggcagcgcggtggaaagcgccgtgctggcgctgcagccggtggccgggctgcgcgcggagcagaccctgcagcagctgcgcatccgccgccagggcgacctggcctgtgtctaccgcgggcaggtacgcctgttcctgtttggttgccggcgtgacgcggtcgagcaggccctgggcaatctgttccgtctgccctggcgcgaactgttcgacggctaccagcgtctggccgaatacgacattgcagcgatgaacgcccgcagcagcgatccggaggccgaggtactgcctgaagcccccgcggttctgccggcagtggccccggcgctggaggcacctgttttcaccgccccgaagccgctgcgactgggagatcgcgcatga

SEQ ID NO: 530384 - DNA, 207 bp, Stenotrophomonas maltophilia
gtgtccgagctggtgtcgcgtgtgtacgcgctcaatgcccagtcgccgccgagcgagcgtaactgggacagcctgctgaaggggctgccgcagacaccgtcggtatcggagaacgaaggcgccaaggtcatcgagtacgccggcaagccctggctgcagctgcagggcagccagacctggagcccctacccggaggaggcgcgctga

SEQ ID NO: 530385 - DNA, 756 bp, Stenotrophomonas maltophilia
atgagcaccgtgttgtcgctgcagggcatccatggcggaaccggcgtcactacggtgcttgccgcgttgggccagggcctgcacgcccagggccagcgtgtgctgctggtcgaatgcagcccggaccagatgctcggcctgcacctgggcctgccggccgatgtcgacaacggctgggcgcgcgcgcagctggacggcacggattggcgcgatgccgcctatgccatcgcagcggggctggcggtgctgccctacggtcgtgtcgatgccggggccgcgatgcgcatcgaacagcagctgcagcaggcgccggccacctgggccgaacgcattccgctgctggagacccagttcgactggatcctgttcgacctgccgcagcgcctgccggcgcacgctgcggccatcaaccagcacgcgcgctgcacgctgccgctgcgcctggcctgtgtcgatccggtcagccatgtgttcctgcaacgccagccggatgacacccgcctgctgctggccaaccgctatgacccggtcattccggtgcagcgcgatctgatgcagctgtggctgcacgcgcacggggcgcggctggtgccgcagccgctgcacgaggatgcgcgggtgccgtccgcattggccagcaagcagccactgggccgctatgcgaccgattcgctggctgctgccgatgtggatggcttggtgctgtggtgcctggcggaggccacacggcgccaggccgcggcgagaggacgctga

SEQ ID NO: 530386 - DNA, 573 bp, Stenotrophomonas maltophilia
atgagcatcaagagtgaccgttggatccgccgcatgtccgagcagcacggcatgatcgagccgttcgaggccgggcaggtcaagcaggccaacggcgagcgcatcgtcagctacggcacgtccagctatggctacgacgtgcgctgctcgcgcgagttcaaggtgttcaccaacatcaactcgaccatcgtcgatcccaagcatttcgactcgggcagcttcgtcgacattaccgccgacgagtgcatcattccgccgaacagcttcgccttggcgcgtaccgtcgagtacttccgcatcccccgcgacaccctggtggtgtgcctgggcaagagcacctatgcgcgctgcggcatcatcgtcaacgtgacgccgcttgagccggaatgggaaggccacgtcaccctggagttcagcaacaccacgccgctgccggcgcgcatctacgccaacgaaggcgttgcacagatgctgttcttccaggccgcggccgatgacatctgcgagacgtcgtaccgcgatcgtggcggcaagtaccagggccagaccggtgtgaccctgccgcggacctga

SEQ ID NO: 530387 - DNA, 519 bp, Stenotrophomonas maltophilia
atgtcgaacgctgaaggcactcctccccaacaactaacctcgccgttcttggatgagttccaaaattggttctccgtcctcaacgcggagagccctcgcggcgctgtgctcactgctgcggccattttggattcgctactcgaggagttgctccgggcgttccttgcgccaggcaccggcggcaagaagctgctcgacggcttcaatgcaccgttcggcacgttctcttcaaagattgcggctgcccacgcgcttggcttgatcaacactgtggagtttcaagacttggagctgatccgtaagatccgcaacgagttcgctcatgagattcatgtttcctttaagtcgacaagtgtgcttgaactctgcgaaaagcttaggtcctccccggaatgggatggcaaccctcctagggagtccatgtcgggccatatgcttttcatttcggctgcggttgttctcattctgacggctcgagtgaggcgagataccgtcgtgcagctggtgacgcgttcctag

SEQ ID NO: 530388 - DNA, 240 bp, Stenotrophomonas maltophilia
atgggcgcagctgaaaggctcgccagggcgccgaccatcggggcggtgatctttgaagggatcaccgtcaccgacggcgaaggcctcccggctcagctcgcagttatagacagccgtgggcgcattatcgcggcaggtccggaagtctcaaaggcagcctgggctgcttcggtagaggcgtaccgcaatcacctgcgcggacatgggcacatccgcgccctgcggaagccatcaccctag

SEQ ID NO: 530389 - DNA, 315 bp, Stenotrophomonas maltophilia
atgacccaggaacatatcagccacccggaagggttgccgaactgcgccgccggccaccgcgcgcgccacattcacgacaagcgctgcgcctccgccggcggtggccacctggtcgagtgcgcctgcaggtcgaccagcaagcacgcggagcccgacgcggccattgctgcatggcacaggctcaaccgccccgcgcgcagcgcgcggccggcagcggtgtctacgacggtcgacaacgtgctgcagttcaaacttggtctgccggagcaaccgccgcggcagcgtgcggcaggaggcgaccatgggcgcagctga

SEQ ID NO: 530390 - DNA, 282 bp, Stenotrophomonas maltophilia
atgtcgaacaagcacgacaagacgttgcagaggatgcaaacccgtcctccgccgcaagatatttcgtgggaagaattgacagctctcctacgacacttgggatacgttcaactcaagaacggaagaaccggcggatcgcgcaggaaattccatcacaaggagaaggacgcgctgatcagctgtcaccaaccacatccccagcccaacgtggacaagggatgcatcgtggatgtggtcgaacacctcactgcttttggtttcctgggggaacttaagaaatga

SEQ ID NO: 530391 - DNA, 471 bp, Stenotrophomonas maltophilia
atgaacacaatcaagtatgccggctacgaaggaaccgctgcgctggatcttgatcggaatatgtgtcgcggcaagatcctcttcatcgatgaccttgttacgtatgagtccaagctctctgacggcgcggaaggacttgaagccgcttttagagaggctgtcgatgactacgtggagacttgcgctgaacttgggcgtgagccgcagaagtcgttgagcggcacgttcaatgttcgtattacgcctgagctgcacaaagctgctcgcctgcgcgctgtagaggatgatgccacgcttaatgaggttgtggcggctgccatccattgctatgtgaacggtggtcagcgcatcaccaaccacagccacaatcactttatggttgctcctgacgaccatatgtttgatgtatacagcgctgcttttactgccgccgacgcttacaagggagctgtgaagagtgtcctccaataa

SEQ ID NO: 530392 - DNA, 303 bp, Stenotrophomonas maltophilia
gtgtcctccaataaagcctctgatgggccctccaagttgcccgacgacatggtcaccccgatcttctctctcaagcagatcggagcactcgtagcggaagcctcagatcttgaatctggaaagtacgacttggttatcgaatttaagctcggctcgataggaatgaagcccgagggcgatggcgcgatcattcctgcgatgggggttgggttcgggggtatcgggatcaggaagtcttcgaaggactcgtctgttacctttgagtacgagaagaagaccaagagtcgatcaagtaagaagtga

SEQ ID NO: 530393 - DNA, 198 bp, Stenotrophomonas maltophilia
atgagggaggaccacgtcgaactggaggtgcgcctggtgtccgagccggtggcggtggccggctggtatctggcctatgggtacgggatcaagccgctggtggtctacgcgacgcgcggcatgactgtctggcgcgacggcatgcgccagatcccgatcacctggtacgtcggcccgctgccggagctgaaggcatga

SEQ ID NO: 530394 - DNA, 630 bp, Stenotrophomonas maltophilia
atggacagcattcaaaaagaacgcccggatagcagggacgttctcgttctcctgactatggcatttgcttttggcgctttcttctcgtgggcactcttctatcgccccggatcgcttccaccgcttaaggcggtcgatccagctgcatggctgcaagcgataggcagcctgattgctatcgtggtggcaatcggagttccgaccttcctctacatcagcgagcgggatcgacagcgcgcgaaggagttgaacaaggcgaagtgtgtttttgctttcgtccaaaatgaccttcacaccacggtactgatgttgggccacaccaagtggatggttcagcagggtcagttcgcgtccagcatcaaagaggccgaagcatgggatgcacacacccgcatacccgattcgcttgtggaggcgatgcgagcagcacacgagttcccggcgctcattgacggcctgatcgaattctattttcagatgaaccacaccaacgcatttgcgcgctactttgcaacctcggcagagagcgtccacccaactcagttggaaccgcttcgcaaggacgctgactacacgctggagttgggtagcaaacttcaggattccgtgagcaagctgttcggtgtgtga

SEQ ID NO: 530395 - DNA, 744 bp, Stenotrophomonas maltophilia
atggtcaaaaagtcctttgatgtgccaggcgatgtgcccaaacagtccaagaccgctactagggttggggttgttctcactattgcgtatgcgtgctgcatgggggtctacgtatggtgtgagtggaatcatctactgatgatgaagcccaacgagttcggtgattttatggcgggagcatttggcccgttggcgttgttctggcttgtgtgcggctacttccagcaaggtgcggaactccgtcagaataccgacgcgcttaagctccaatcggaggctttagagaggcaggtggaggagctggaaatgtcagtccagcatcaagccgagcttgcggccgcatctcgagatgctctggaattctcgcttagggagagcgcaatgcgtgccgagcaagagatggagatgcatactccccatttttccgcgcagagcttcgaaccctatgtccagaacgcgccagggcttttcgacgtccagctgaagaatgacggcgcaaatgcctcgattgttagtatcgaatcgagtgagtgcaaactagttttggaagaacagagcttccttggtacaggtgattcaatgagaatagtggccatgaagccagatgggtttggttggccgccggaagtgaagatcaccgtaacctttagaaatgcgctcaatcgtagagggcaagcggtgatgacattccagcaggacagggaacggcggcagtacttgagcccggttataaccgtaaattga

SEQ ID NO: 530396 - DNA, 477 bp, Stenotrophomonas maltophilia
gtgaaccgcatcgctgtcgcagtcgtcgcgttaatgctgtggtccggcgccatgttcggcgttggctgggcgtggcgcgatgatcgcgctgagggcgccgaagctcgtcagcaggccagcaccagatccgctcaggtgcagcaggtcaaccagacccgtgccatcgagtacgcccaggccgagacactggccaccattggagcaaagcatgaggaagaccgcactgcggccgcgaccgtccctgctgctgttgtggctgacctgcgcgctgggcgtctccagttgcgcgacgacctcgccacctgcaataccgctcgcctgtccgaagccgtcgccggcaccatcgaacgtgaccaggcaggccaactacgagcagaggtcgcgggcgctcttgttcaaatcgggcgggacgccgacgaccacgtccgcgcctgccaggccgtgatcgcagctgaccggcaaccggtgacgccatga

SEQ ID NO: 530397 - DNA, 282 bp, Stenotrophomonas maltophilia
atgactgtgtccgtgattgtttttcagccattcaagaatgacgataagctggcgggttttgaacacgaactggaaatgcgaaccgatagccaccaccgcttcgcggacaacgtgattttcgcgaagcaccagggcaccacacgcgacctctatgatgcactcaaggctgcgggccagatgaccggccttgtgctgatcgaggcgaaggaagtacaggacagcagctgggtcgtggagggccaagcattcgattggctaaacagtgccctgccgaactactag

SEQ ID NO: 530398 - DNA, 951 bp, Stenotrophomonas maltophilia
atgcttaccaaaatcaaccacatcacaggaactgggctctttgaatccgctggagcatcgccgccgttcactgcagcgactctgatctttggcgagaacggccgtggtaaatccaccctcgcttctctactccgctcttcgacgggagaggaaggatcagatatcaatgcgcgccgcacactaggcaactctcttacgcagacagccagcattgagatacaaagtgccggaggtgtggaaaccctcaatctgaatagcaacacatggtccagccactggatggacttgatcgtgttcgatgccgagttcgttagtaagaacgtttacgcagggcacggcgtttccccggaccaaagagcaggcctcctgtccttcgctgttggcgaggccgccgttcaaacgaagaagagcctcgacgatctcacggctcaggcgaatgcggccgccgcaacattccgcgcggttgagtcggcactcagtcacgctcgtggtcccttcactttgagacagtaccgggcccttcccgccgacgcagacttgcagcaaagaattgatgcgctgcgactgcggtcgaatcaagccaaagacttggcaaaggtaaaaggtacgcctggggcgcagctcatcccaacgccgaagctggacattgaagcgctctttgcgatcttgcgaaagagtgttgctgacgtctccgaggcagcagccacgcgcgtgaaagcgcacatcgcatcgcgcagctcggcagcattcgagggctggctggctgcgggactgaagtacgtggtggacgataactgtccgttctgcgggatcgcgaaaggtgacgagccccttctcgctgcataccattcctacttcaatgacgagtatcacgcgctgaaggaacaagcatctacattgcccgcgaacgtggagacgcgttggcgaacaggtcgcagttatagtccatag

SEQ ID NO: 530399 - DNA, 1143 bp, Stenotrophomonas maltophilia
atgtggcagtgcttgattggtcagctcaattatttcaatgagagcctcaccacgtgcaatcagctgatcgattcatataagcagtcgctggagacagtgcagcagcagctgatcgaacttgaaataaagaagcttgagatacaaagagacaggcacaccactgctgcgatcaatcagctcgctgaatatgacagtgctgatcaggctcgcaacgcactcgcaaagcagaaagagacagctcgcaccacgctcaacggacagatggaggccatcttcgtaacgtatggtgaaaatatcaacaagctgctggccgactttggcgcgcaaattgagattcggtctcttaagccagcgttccgtggacagggggccattggtcgaacagagtacgaactaatagttcgtggaaatccggtatccctaacatccacagagggtgcgcacttcgggaatactctcagtgaaggcgataagcgagcgctggcttacgccttctttctcgcaaaggtcatcaccactcccaacctgagcgtaaagaccgtactaattgatgatccagtctgcagcctggactggaaccgacgtgccgcgaccatacgttcactgctgcgtctagcaagaagttgcaggcaactgatcgtccttgcgcatgacgcattctttgttcgcgcgctaggtgaaggactgtcaaaacttcctgaaacgaagaacaaagtcagctacatcaaagtggtcgcaacagcaggaaatgcgtctgatctgtcgtccttcaacgtagaagacgaatgtaaaggaaggcatcggcgaaacatcgacatcctttctgcgtatctagcagatccgtcctccagctccgccctcctagcttcaagaaccatccgcccggttcttgaaggatacataagaaaccggtttccactcagccccccaaccggaaacatgcttgggaaccttatcgctttcatccagagcgccgatcagaactcgccgtacttcgccctgaagccgttagttggtgagttcaatgacatcaacgactacgcaactcagttcatgcacgaagatggtatgcaggaaccgcctctcgtcgaggctgaattgagagcgtattgtcaacgcgtgcttgcacttttgagcaaatag

SEQ ID NO: 530400 - DNA, 657 bp, Stenotrophomonas maltophilia
atgccagatcacgtcgatttgcaattcgtcaacctcgaatggcaggtcgctaacaacgaggccaaatgccgcggcgtagcgtctggcgacaccggcttgcaaggaagcgatgagtggggcgcgagaagccatcgcaagcaaggtgatgccgttgtgcgacaagtggggggcctccagctgcatcggggcgtgccgcaacagatgttccaaaaatccaggcaaattttcgctgtccgacacgaggccgtgcacggaggaaaagtagtcttcggaggcgataggggttgcgtaggccagctgcgatgggtggaagcagcaaacgaactgttcgcaatagagcatttcacggcgcaggcgtccggtatcctcactcacatgcgcgatcgcgaggtcaatctttgcgtcattgacctgcccccagtagccttaccacccattactggtggagcccggggtgaagggtactgcggcgggatgggtttgggttcggtggttggcagcaaactgggccggcgggatgcgtccgcagctgctgtgtggtcgcacctggttgtagtcgcggcgccactcggcgatgacgctgctcgtgcgggtgcccagttgctgcgctcgcgtcagataccattcgccaacccggagtggcccgggccgagatga

SEQ ID NO: 530401 - DNA, 1242 bp, Stenotrophomonas maltophilia
atgccccgtaccgtcgcccctcttaccgataccgccatccgcaaggccaagccaggccccaagccatcaaagctgcgagacggcggcggtctatacgtccagatcaacccggatggctcgcgctggtggcggtgggactaccgccgaccggtgaccgggaagcgcaacactctcagcctcggcacctaccccgaagtctcattggcggacgcacgcggacgccaagccggggctcgccggttgctggcagcgggcatcgaccccggggaacagcggaaggctgagaaggcggcgggcgtcgagaaggcctcaaatagctttgaggtggtggcacgggaatggctgggaaagcagacatgggtgcagaactaccgggtgaaggtcctggcctggatggagaaggaggtctttccctggctcggcgcacgccccatcgccgacatttccgcacccgagttcctgcgagtcctccggcgagtggaggagcgcggcgcggtcgagtctgcccatcgcatcatgcagaactgcggtcagatcatgcggtacgcgattgcgaccggacgagcggaacgcaatcccgtgtcggacctgcgcggcgcgcttgcggcccctgctgagaaacaccatgccgcgatcaccgatcccgcacagctcggaggtctacttagggcgatccgttcgtacacgggggatgccacgactcgcgccgcgctgcggctggccgggctcgtgttcgtccgcccaggtgaactcaggcacgccgaatggtcggagatcgatctcgacaaggcggaatggaacatcccggctcataaaatgaagatgcgggaacctcacttggttcccctgtcagcgcaggccgtcgagctgctgcgcgagcttcaacccttgacgggacaccgccagtacgtgttcaccagcggtcgctcggctcttcgccccttgagcgagaacgccatcaccgctgccctgcggcgcatggggttcgataaggacaccatgacgggccacgggttccgcgctactgcacgcaccctgttagatgaggtgctgggctggcggcctgacctaatcgagcatcaactggcacacgccgtccgtgaccccaacgggcgagcctacaaccgtaccagtcacctaccggagcgccgaaagatgatgcaggcgtgggcggactaccttgatgcgctggaatcggacacggggagcgtggtggtgccgtttagaacccgagtcgcttag

SEQ ID NO: 530402 - DNA, 1191 bp, Stenotrophomonas maltophilia
atggattggctggtgaaagggttggatacaagtctcggtaaaactgttctagggctagtgagctcgctgttacttagcctagctggcctggccgggtacttcatacgcaggcgtgccgagggcgcttctgagaagcgcgatatagactcattgcataggctggctgacctgcgccagaagctgactcagcagaatgtgagcttgggcgatcttcaagcgtttaggcaggaagcactcggggcgaccgcgcgtgtcgctgtcgatacggcgcaggagtatattgagcgcgcacggtatctggtagaacttccagcgcgtggacgtactgcggagtggccagaagcgatgacgcagtcagagatgaaccaacaagccgcagcgcagtttagtgaggcggacgatgagctgaccgctttgttggtggagcgattggcgaccgaggacgctgatgctgcaattgcgttacaaaggacacaggacgcgtggaaggtttggcgtgaagaggaggcgatttgggacgctcgctattgggagggcggtacaattcgtccgctcctgttcagtacaaaaatggaacagctaacccgtgagcgcatagcttctcttcgctctcaagctggcttggagcaagaccccagcagagtagtggtgccatatcggagtgctccggtagacctggctgagcatatcgagcctggcacgaccgcagcgcatgtgcgggaagtattgggctcccctcactttatatctggtagctactggtactacagattccaggaggtgcgcctggatatctatttcgatggtgaagtggtaagggacgtttcgttcttgattattgaagggcaggtgtaccacgccttgctgtcgggcgaaagtctgccattcggaacgctcacctttggcgatctgactgcgctcgatgacactgttcgcttggagttcgactggtctgcccgtacaaacgaattgatagccaagatgaggctcggtccatccggcgcatgggacgagtactacttcggggccgtcgtcccgttctcaggtggcgggcagctcctaaatacagacttccattgggatcgcgagagtgggcggctgctaagccatccatccgaaacgcttatcaactggtttggacggacgagcgcgatagatgaccatcctcgcgtaagctggtttgtaaaatag

SEQ ID NO: 530403 - DNA, 873 bp, Stenotrophomonas maltophilia
atgtcgtggcaatctgccccaatccggtctaggaatggagcaacacgggtgaacagtgataaaggtagcccgtcgagcggcgaaaacgtagacccgcctgctacgttaacaggatcgcttactagccaacggcgaaaggagcagtggagtgtgttacaggcaggctccgactctcctatggagtgggtctcgaaaaggcttgcagttgcggctggcgcactcgcggctgtgtatgccttcgcgtatgttttgggctaccgctacctctccgagtactttctagcattaggtgcgccatgggctatagacctgtacagcccatccgcgattgcgcaaattccctcgccatttgcggtgctgatggtggcgatgggcgtaactcttgtgacgcatctgcgcgattttgaaggggtcacgtatcgagcctctctaattgcgtttggtgtgggtggggtgatgctaggtgttcacttcattatcaagtggttcttcaaagaatacacttcatattggttgataggtgtctggctattcggggtgctcggggcctttggtggggcaggtattttcataagagataccgttaagcgccacggaagtaatcacgcaaccggaattgtgctgactgttcttgcgctcgcagccttccttggtgctcccgttgttgcgcgagtcaaggcgcgcgatgtcgtcgatagcggcgcttctgggttgcctgtagtgagcggcaatagtctggacggagcgccttggcgtctggtgagggcgacacccgacggaaagttcctcgtgacgcgcgcttactcgggtaaagggttggagtttcgcgtgattgaggcaacgacacccgcagcggtccgaaaagcaaaatga

SEQ ID NO: 530404 - DNA, 153 bp, Stenotrophomonas maltophilia
atggatagtcagaccggacacctagctgacaggttgattgcctccttgatcgccgaaagttcggcgattgctgccactcccccgtggaaggcatttgcatacggtgcaggcatgttcggcatgttgctcgtgcttgctgcccacatcggctag

SEQ ID NO: 530405 - DNA, 414 bp, Stenotrophomonas maltophilia
atgaagaagatcaaccaacccgaacgatttttggacgaagatggccgcgtcctcgtgcgcctgcaagtcagcggaagcgacatccaggcggtaaccgaggctgtcctttgggacaacgcctgtatccgccatggcctcaccggcgctgtatacatgaacagcgatgggaaggggcatgactacgtcatggcgactgttccaggcagcggtgggcatacccctcttgcccggctgttgcttggttgcccgaggggctacagggttcgctataacgacggcgaccgactcaatctcctacccgagaacttgcgcctccatgcgccatgggccgacatcgacacggccaaggccgctctcgcagcgatcctcgactccgtccgcagccccagcacgccatcgctggtgtgcgcatga

SEQ ID NO: 530406 - DNA, 3093 bp, Stenotrophomonas maltophilia
atgttcgagaaccttcctggcgctgacgagaccaagctcgcacccgcgcgccagcagtccgtcgtagacgctgtccgccagaacaaggctgagcgagaggaaacgcagcgccggaaggatcagacgaccgtgtgggacggcatcggtgccgctcaggttaagggcggtatcggcttcatcgaccgcttcgtgtcttccctcggcttcgagcctagccccgattaccgaatccccgcagacgcgcgcaagcgctgggaggccctgggcctccgccccgagcagtgggaactgttcggcaaggcaacctcggacgaacacctcggctacctggagagcatcgccttccagaaccagatggccgacgacgaccttgcgcagttcgggctgggcggccagatcgccctcggtctcaccgaccctgttgccacgggcatcgacctggcctctggcggcctcggctatgccgcaaaggctggccgcatcggcaacatggctcgctccggcattcaggctgcgggaacctctgccctgatgtcggcggcaaccgacacctacgacccggagcagaccctggccgagactgtccaaggtgcagccctttccttcgcgttcgcgggagcgctgggggcacggaggggggcgttctacgacggcgacgttgaccccagcgccgtgaagcgcctcgcactcggtgatgactccgtgtccgcagctcgcgtggcggacacctccgtcaacgaccccgtgccaggcgtgttgccgctacgcaatgagacgacgttcgagcaggacttcaccgacaaggccttgctcaacgcgcacatcactccgcacttcgccgccgtgcgccgcgacctcgctgctcgcatgggcagcgcgaagtcgcccatggtgcgccaagcggggcgtctactgtttcgcgatggtgtcggttacaccgaccaatccgtcgccgtcccggagtccgccagtgagttctccaagcgcgacctggccgtcatggagacggaatggcgcggtggcgtcaatgatgcgtgggatgcctacaagcagcggaccggcacccaatggtggaactatgccgaacgcagcaagttcaacgaggaggttggccgcgctgtccgtggtgcccctgatgtctccaatgaggcaaggacagcagcagcggctgtcgccaagacgatgcaggatgcgctcaggctcgccaaggagagcgggcttgaaggctttgccgaactgtcggagaacgcgaactacctaccccgctattggagcagcaaggggttccgacgcctctttggcgagctggacctgcacgaagacacagtgatcgatggtcttatcaagcccgccatgcggcgcgcttgggaggccgtgggggatgaagccaccgagatcgacgacgaactactgagcgcggtagcccgttcctatctcaagcgagcgcaggcgaacttcgagggcgacgacgctggtctattgcaacggcccctggacagcgacgcggtggaggagatcgggaacatgctggcagaagccggtgtctcacctgcgcgttctcaggagcttctacaggcactgaaacggcaggcagacgacgcgggcagactggatcgagcaaagaggcgaatcgacctggacgagacttactcggctacgctacgcaacgaagcgggagagtccgttcaagtatcaatggccgacctgttcgacaacgacgtcgattcggtcatggcccgttacctgcgagagatcgcggggtggtctgcactgtcttccaaggcaggtatcaagaacccagcccagctcgaccgatttgttgcacaggtgaagcgggatgcttttaaggccggagatgacgccaaggacattgaccgactgttggacatcggcgtcaaatccacgtttgggcgtagcaccgaaatcgactccgccagtcgggttgcgcggtattcgcggttcctgcgcaactacaacttcgcccgcgtgatgaatcaagtagggttctctctcttcgcagagctaggccccgcagtggcgcacggcggcgttcgcaacttcgtcaactccacctttgcggtgaagtctttcctgaagcgcggcgcagacggtaagctgtcctctacggaggctcgtgtggtcgagcagctattcgcacccggcacggactggcttcgcaacccgccgttcctacgactggacgaggacgcatttgtcccgcagaccttcaacgtcaagcacggcgagaagatcgacaacgcgatgaatctggcgacgcacgtcaccagcatcgcttcgggaatggccccgatcaacacgatgttgcagcggatcgccggtcgggcgaccctgctccggctgctggacatggcgaacgccaagaagctgagtgctgctgaggtcgcccgcctgcgcacttggggcctcgacgagaaggcccaggccgacgtgttgggccaccttcggggcaaagcctctatcgaggacatcgacccggatgcgctgccgttccaaacgcgggagcgcatggcagcgttcttgttccgcgtgtcgcgccatcaggtcctcgaaggggacgcatcggactccattgagctgatgcactccaccacgggtcgcctggtgatgcagttccgtagtttcatggtgggtagctatacgcgccacttcctcaactccttccaccactacgacgactggcgcacctacgcaatggtcacgctgtcggcgtcggctgctggcatgggctgggcggcgcgcacgtacatcaacaccatcggtaacgaggaagaaaggcggaagcagcttactccggggaacttcgcgcggaacgccgtggcgcaatctagctggtcgaacatccttccggccgtgaccgatatggcgtgggcggacacattgggcaatgctccggtgttcagcaacaaccggtctaccggccttgagaatggcgtgatgggcattccatccgttgacctcctcaacaaggtctacgggagcggccgactcgccggagcgctcctcgaccccgaccagcacatcaccgagcgacaggctcgggactttggcgcatctggtggttcaacaacatga

SEQ ID NO: 530407 - DNA, 219 bp, Stenotrophomonas maltophilia
ttgtcggtgcacctgccggaagaccggccgggctcactgcgtcagctgctgaacgtgttcgagcagcaccgcatcagcctggcctcgatccattcctcgcgcacgcctggcggcgaagtgcatttccggatcgggttcgtggccggcagcgatccgggggcgatcagtcgcgcggccgccgaagtggacgccagcggcatcgggcgggtgctgggctga

SEQ ID NO: 530408 - DNA, 459 bp, Stenotrophomonas maltophilia
atggcgattctctttcgcggtgtaaccaagcggacggacgaagctttcaatggggttatcgcgccacatggatcggcttcagcagttgccatactggctgatggcggattcttggcagatgggactgctacggctggcgagacagtcgacaacgcggcaagggcgcaccagatcaaggccgggctctatggtggcagcttcgtttcgttcactacgaaccgtgaggttgccatcgacttcgccaccaaccacttctcggaacctggttacgtctacgtaatcgatgcttcggacctcgcgggccatggcgttgaggcgaagagcttttctgatccgaagcatccaggagaggatgaggtgtccctgcggcatctccacggcggccccatcccgcaaatcctgatcgtcaggaagatcctcgttgatcgagatggcgtcgtggtcagcgtgggagggtga

SEQ ID NO: 530409 - DNA, 558 bp, Stenotrophomonas maltophilia
atgtgccaggtctttggtctgcccgctgccagaaagtatgactccgatggcggccccggcatcgttgcgatcatggatctacttcgacagcccgaacaccccaaggatcgcgcgatcttcttcaagacgcagtttctcctctggatgctggccgcaaccgacggccatgccaagaatttcagtgttcatctggaagccggtggacgcttccgccttacgcccgtctacgacgtgctgtcggtgtatcccatcctcggtagaggacccaatcaactcgacccacgaaacgcacagctcgccatggccgtgcagggcaagaaccgccgccggaaactgcaccttgtgcgacgccggcactggaacgaaaccgcgcgcgcctgcggtgttgccgatggtgcagaaccgtggatcgaagcactgattgcagccgtcgaacccgccatcgagcacgtcacccatcagctcccaagcaacttcccagcgagcgtgtccgaaccgattttcaacggactacgtgctgcagccgctcgactttccagcatggcctccgacgcatga

SEQ ID NO: 530410 - DNA, 1086 bp, Stenotrophomonas maltophilia; identical to SEQ ID NO: 498911

SEQ ID NO: 530411 - DNA, 1206 bp, Stenotrophomonas maltophilia
atggcaaagatcaagctcaccaagaccgccgtagagacggcgcaaccccaggccacggccatcgaactgcgggataccgtggtgcccggcttcctctgcaagatcaccccggcgggccgtcgggtgttcatgcttcagtaccgcacgaacgccggggaacgccgcaagcccgccttggggttgttcggggaactgacggttgaacaggcccgcgtcatggcgcaggactggctggccgaggttcgccggggcggcgaccccggcggcgccaaggccgaggcgcgcaaagcgcccacgatggccgagttgtgcacgaagttcatggaggactactccaagaagcgcaacaagcccagcacgcaggaaggctatcagggcgtcatcgaccgctgcatcatcccgctgctgggccgcaagaaggtgcaggacgtgaaacggcccgatattgcgggcctgatggagaagctggcctacaagccgaccgaggcgaacaaggctttcggcgtgctgcgcaagatgttcaacctggccgaagtgtggggcttccgcccggacggcacgaatccgtgccgccatgttccgatgtacccgcctggcaaggaaacccggctcatcgtggacgatgaactggtgcgcgtcttccgccagttggagaagctggaagcggaggaactggagaactacgtcatcccactggcgatacgcctccaattcgagttcgctgcgcgtcgctccgaaatctgcccactcgaatggacttggctggacttcgagaaccgccgcgtggtctggcccgacagcaagaccggcggcatgtccaagcccatgagcgcggaagcctatcggctgctttcgacggcgccgcgccgtgaaggttgcccctacgtcctgccgtcgcccaacgacccggacaagcacctgaccttcggcgagcactatggcggctggtgccgggtgctcaaggccgctggcgtgccgcacgttggcacgcacggcatccgccaccgctcggcgacggacattgccaattctggtgtcccgatcaaggtcggtatggagctgacccagcacaagaccgtcgcgcagttcatgcactacgtccacaccgaggacaagccggtgcgcgatgcggccgagctggtggccagccggcgccaggccatcacgggggcgcggcagagtcagccacaggaggcaacggcatga

SEQ ID NO: 530412 - DNA, 510 bp, Stenotrophomonas maltophilia
atgtcgcaactgtccttttcctcgttcgatgtctcgctgatggtgcgtgatgcgcagggccgctacctgctggcgacgactgaccagattctggaggccgcgcgccaggccatcgagcacaagatgcagcgcggtgaagcgttcagttcgccggcggcggtcaaggagtatctgtgcgccaagctggccggctacgagcacgaagtctttgcagtgctgttcctcgacacgcagcatcgcttgatcgaatacgtcgagatgttccgcggcacgatcgacagtgcatcggtgcatccgcgcgaggtggtcaaggaggcactgcggctcaatgcggcggcggtcatcgtttcgcacaaccacccgagcggcaaccccaagccgagcgcggccgacaaggcgctgacctcacagcttcagcaagcgctgacgctggtagacgttcgcacgctggatcacatcatcgtggctggctgcgccaccacgtctttcgctgaatgtggcctgctctga

SEQ ID NO: 530413 - DNA, 426 bp, Stenotrophomonas maltophilia
atgccaaatcagaaatattcagtcttccaacccgccaagccttacttcgatctggtgcggagcgccttgggcgaccttgtcgatggtgagcacttcttcgacatcgtcaccgatgacaccatctacgaagtgctctacgacctcggctggccgcgcatcatccaagggcggactgacctgatggcagcattccggggctacgtggaaaacatcgcgctgcaatcggccgacaacttgatcgcccacaagaccggcgacggctgcgtcatcgaatacgaggtgcatggaaccatcctcgcaacgggcacgaaatacaacaacaggttctgctcgatcatcaagatcgagaaccggaagatcgcgcactggagggactacatggactcccatgcggcctggaaggcactgacgccaggcgcgacctag

SEQ ID NO: 530414 - DNA, 843 bp, Stenotrophomonas maltophilia
atgaataaccttagcgaccacctcaccctggtgctcggcgccaccggcaagaccggctcccgcgtcgcccagaagctcagcgcccagggcattcccgtccgcaccgcagcgcgtagcggcgcggacgtccgattcgactggagcgacccatcaaccttcgccggtgctctgaacaaggtctcgggcatctatctcgtgtcgcccgtgatgcgcgtggacttcgccgacatcgtggcccgatttctcgacgaggcggagcgcgctggtgtgggccatgtcacctatctcagcgcctacggcatggagcacgcgcctgccgaagtcgcgctgcgcgctgtggagctggatctggcttcgcgtgcctcgctgtcccattccatcgtgcgtcccgcctggttcatgcagaacttcagcgaaaccttcgtcaaacccgtgaacgatgaaatcgtggtgccctgcggcacgggggccgaagcctttgtcagtgcagaggacatcgcatccgtcgcggcagcaacgctgagcgaccccgcacggcacgctggccgcgcttatgcacccaccggccccgaggcgctgactttcgaggaagccgcagcgcatatctcgaacgtcaccggccgcaagattgcgtaccgggacgtggatcgcagcgcctgggtcaacgcaatgatccaggccggcgtgcctgccgaatatggcgaggtgcttcgcatcctgaccgagacgatcgccagcggccgaggctcccggccgaataacgatgtgctggccgccactggcaaggcacccacccactttacggacttcgccgcagcgactgccgtcgcatggcgccaatga

SEQ ID NO: 530415 - DNA, 924 bp, Stenotrophomonas maltophilia
atggacatattgcaagagcatctggtgcgcgcccgcgctgctggcggcgtgttcgcgcgatccatcgccgtcgcaccttgggggcttcggctaccgggcacgatccagttggccgttcacgcggtgattcagggtcatgcgtggctgtggctcgatggcgggggtgagcctgtcgaactcaggccgggagacctggcactggttcgcggtgggcctgaccacttcatcgcccacgaaccaggggcgcattgcgtcttgccggaggatttccaggttgcgcacgcctctgacgaggccgaacgcgatccgcgagcgtcggcattcctttgcggggcttatcgctttgccggggacatcggtgtagggctggtcaatgcgcttccgccggtgttcctgattccctcgcgtatggacaaccccatccaagcggtggtcgctctgctgtcgagagagctgtcccagtcggagccgggtcgtcagacggtgttggatcgactgctggatgttctcgtcgtgttggggcttcggacagggctgacatcaagcccgaatgcacccgcatgggttcgaggtgcgtcggatgcacgtctgtcgaaagcattgcaggctatgcacggggacaccggcaagccgtggacggtggaagaactggcgaggatgagccatatgtcccgtgccacgtttgcgcgcgtgttccaggaggtgctgggcgatacgccgatgcggtatctcaccgactggcggatgaccgtggcacgtgatctcttgcggacgcaggacgttccgctgacggaagtggcggaacgggtcgggtactcgtctctgtacgcttttgcgacggcgttccgccgacatcatggacagcccccaggacggtggcgccagagtgggcaggatttgcccgaagccacgctgactcactag

SEQ ID NO: 530416 - DNA, 783 bp, Stenotrophomonas maltophilia
atggtcagccctcaccatttcgcgcactggtatcccaccgccgcctatctctacgttctctggctcgatgcgttcgcattggcctgggagtacctgcgccgtcatcctgactaccggctcgactggctacaccgtcatcgccggtcgcacgcggcacagcacgcggcgcatcgctggggcttgcgcctgctggaagacccggccctggatgcgcgcgacgcgcatccggcctggctccccggccatgccggcgtgatccagctctatcccgatgccgatccaccgcccgacgctgctgcattcgacttctggcacatcccaggccacaagcaactgctccatgacggcaagcggctggcgctgatcgcgcacagccccggccattgccagcgctacgcgctggcgcccggcctggaagacggcatggcggtggcctatgcccatcgcggcggcgctgccgcgcatggccgcggccatgcgctcggtgcggcccaggctcaggccaataccaagcccaggccgtcgcctgctgcgctgctggagctgcacaccctgcaggcgctcgacgcgaccctggcgggcgcgtccttgcgcgaggtcgccgaaggactgttcggggccgatgcagtgactgctgactggcatgccgatggcgacttgcgagcccgcgtgcgccgcctagtgcggcgcggcgatgcgttgatgcgcggcggctatcgccgcctagcacaactgccgtcgcctgagaagggacgttttgaaggggacgcaaaacgtccctga

SEQ ID NO: 530417 - DNA, 546 bp, Stenotrophomonas maltophilia
atgaccgcatccgctttgcctgccgctggtgcggccacggctgcaccgtcctcgtccatcccagcacacgcggcgcggcctacctcaacaccactgacgcgcgtttcgctggccttcctggagcaccgtttcaagctctatctgcgctttggcgaaccggcgcgcacgcagcggctcgaccgctggcgcagtctcgccgtgttcatgcccagcgccgtgttctgccgcattcgctggcaggccaacgactacggcaccgtccgctggcagctcatggtgatgcaggcttgcacgccgctggacgctgcgcagcgcatccccggcgtgcagccgggcgcgcgcttactgttgcacgccgaaggtgagcaaacggtgcgcgccgtgctggagtgcatcgacgccatcgaggcgctgggcatcgcgcctgctggcgcttcgcccgcgtactggcgcacgctgggcaaccggctcgctgcgcgcttgccgctgcctgactacagcgccgagcggcacgccgcctggctgaccgggagggcgctgccatga

SEQ ID NO: 530418 - DNA, 612 bp, Stenotrophomonas maltophilia
atgacgctcccatccgccgttgccggtgcaaccggcatcccgccgcgtcctcgctcgcgcctgcgcgctcgcttcgtgctgacgggcctgtccgcctgcggcctcgctgcgctggcctgggcgtccttcgtgcatccgctgccgcgcctgacctacaacccgtccgacagcgtggcggttggctggtatcgcgtcgatccgctcgaccatcgcgccagctcgtcgccacgtctgctaccgccgtcattgcacgtgggcagcatcgtgctagtgccgctgcctgccgaggctgccgcgctcgctgcgcagcgcggctacctgccgacgcgcatcccgctgctcaagcgcgtgggcgcggtcgcaccgcaggaggtgtgcatcacaggaggcagcgttcgcatcgacggcgtgccttcggccgccgtgctgcctgccgatcgctggggccggccgctgccatcctggctgcagtgccgccgccttcggcctggcgagctgtttctgctcagcgtcaccaatccagcgtcgttcgacagccggtatttcgggccggtcagcgcagccgccgtgatcggcgttgcgcgcccggtctggctggagaagcgcccatga

SEQ ID NO: 530419 - DNA, 1131 bp, Stenotrophomonas maltophilia
atggtcttggcagttgctgcgggtgcgggctggtggatgctttcacgccccgcaaaggagtcagcggcggaaacgcccgccacggcccccgccgctgacggacacatcacattgggcgtggcgcaacagcgcgcgctcggggtggcaacggcggcggcggacaccgccacgcaattgccggtgcctggcctgcccgcgcaagccgcagcgccgctggccgccagcgcgcaggtcagcgcgccctacgcgggcgtggtcacgcgcatcctggtcgatgaaggggctcttgtccggcaaggccagcccctggcgcgcatccagagccgtgacgtgctggccgcgcagggcgaactggcccgcgcgcgcagcgaggccacggcggcggcgctgcaagccaagcgcgatgcggccttgctgaccgagggcatcatccccgccgctcgcaacgagcagtcgcaggcgcgcgcgcaggccacgcaaagcacgctgcaccaggccacgggcgcgctggcgcaattgcgtcctgtgacgggcgggcaggcgggcgaatacgagctgctggcgccgatggcgggccaggtcgtgcggcggcacctgatgccggggcagtcggtggctgcgcttgaagccgccttcgtggtggccgaggcgggccgcatggacgtgaacttcaccgcgccgctgcgcctgcgcagcgacatcaagcccggcctgcccgtgggcctgcccgatggcaaggtggccaaggtggtggcggtgggcgcggatgccgaccccgccagccagagcctgcgcgtgcgcgccggcatcgaagggcagacggcgctcgctgtgggtcagcaattcagcgtgagcctgctgctgcccgcgcctgcgggcgcattggccgtgccgccgtcggccttgctgcccgccgggcagaggcatgttctgtatgtggcgagctatgcggcgggcggagagaagggggcgatccgcgtccgcgccgtagccgtgcagttgctgggcggggacgaagccgtcagcgtagtggtgcccgattccaagggcggccctgccttgctgatgagcggtgagcaggtcgtcacgcacggcacggcgctgctcaagtccatgctgccgctgcagtga

SEQ ID NO: 530420 - DNA, 408 bp, Stenotrophomonas maltophilia
gtggatttccataccgaaggtctgctcatggcgccggcgtatgggatccctcgcctgctcgcccggaatcgactgagcttcgccgacatcgggctctgggagatccacgaggccttcgcgtcccaggtcctagcgaacgtggcggctatttccgacccggagtgggtgcgcacaaaggccggcgtccaggcggctatgggcgatttcaattgggaccgtgtcaatcccaacggaggctcggtcgccattgggcatccgtttggcgcgaccggcgcgcgtgacctgagccaggcggtgaaggagctctgggccatgcctcctggctcgcgcgcgatcgtcagcatttgcgccgacggcggtcagggcacggttgcactcctcgagcgcccatggatgggagatcagtaa

SEQ ID NO: 530421 - DNA, 468 bp, Stenotrophomonas maltophilia
atgcacaagatcaacctcattgccgctctgatgctggccgccgctccgctggccgccaacgccgccgacggcaccatcaccttcaacggcaaggtgaccgacaagacctgcaccatctcgaccccgggcggcaaggacttcgccatcaacctgaccaagtgcagcgccggcaacgtcgcgacctacttcgagccgggttcgaccgttgatttcaacaccggccgcctgctgaaccaggcctcggccaacgctgccaccaacgtgcagctgcagctgctgggctcgaacaaccaggtcctgccgatcaaggctgccggcgctggcctggcccagaccaactcgcagtgggtcaccgtcggcaccgacggctcggccgacctgaactactacgctgagtactacgccactgccgccgccaccccgggcgacgtcaccagcagcgtcaagtacacgatcatctacaactga

SEQ ID NO: 530422 - DNA, 552 bp, Stenotrophomonas maltophilia
atgaccattcctgagctctttgtttccgttgatattgaagcttccggacccatacccggcgagttcagcctgctctctattggtgcggttcttgtggatcgacctgaaacgacgttctacattgagctgaagccagaaggtacgcggcatgattcggaggcacttgctgtcacaggatttaatatcgatgagctgacactcagtggcattgaaccaagtgcagccatgcaagactttggcaattggttgtcagattcctgtacgcaaggtcagaagccggtcttcgttggccttaacgcagcgtttgactggtccttcgttaactactacttccacaagtactgtggaaccaatccatttggatttgctgctctagacatcaaggcgctctacatgggagtagtgggatgccgttgggaccagaccaaatccagccaaatggcgaagctacttcatccagagctctcagggacgcacaacgccctcgacgatgcgcggtatcaagccgaactgttccttcgactccaagagctaagagctagccagagttga

SEQ ID NO: 530423 - DNA, 495 bp, Stenotrophomonas maltophilia
gtgcgtgcggcgttcactgacccggcggccagtaccgcgttcttctcgcgcatcgacctggcggtgaacgcgctggcgctgctgatgcaggtgggcctgacccgctggctgctgtcgcgccacggcatcgcgccggcgctgctgattcccggtttcgcgatcctgatcggcttctcggttctggcagcctcgccgatgccgttgatggtcgcggtggtgcaggtgatgacccgcgccagcgaatttgcactggccaagccggcgcgcgagaccatctacacgcgcgtggaccggcagtggcgctacaaggccggcgcagcgatcgacaccgtggtctaccgcggtgcggacctgagctttgcctgggtgcacaagggcctctcattgttcggctcgcacgtggtgttcatcggcggcatgctggtggccgcgtgcatgaccgcagccgcgttcggtgtactgcgcgaagaaaagaaactgccgcgcgaccgctga

SEQ ID NO: 530424 - DNA, 663 bp, Stenotrophomonas maltophilia; identical to SEQ ID NO: 518291

SEQ ID NO: 530425 - DNA, 903 bp, Stenotrophomonas maltophilia; identical to SEQ ID NO: 505126

SEQ ID NO: 530426 - DNA, 240 bp, Stenotrophomonas maltophilia
atgggcgcagcggagagcatccccgaagtcctgctgaagctcgagcagatcgaagccctgaccgggatgaagaagagctacatctaccgcgaaaatggacaagggcactttcccgcccaggcacaaggtcggcggcggcactggctggtaccagagcgacatcaagcgttggatccgcgcacgcaggagcgccccgcagtggacgcccgaggatgtggagcgaccagcggccaactgtga

SEQ ID NO: 530427 - DNA, 1005 bp, Stenotrophomonas maltophilia
atgttctcgctgagaaacatcttggacatgatcgacgagggggagattgatcttgcgcctgattttcagcggcttagggtatggtctgcgaagcaaaaatctcgcttaatcgaatcaattctccttagaattcctcttccggcattttactttgcatcggatttgaatggtcgccttcaagttgtggatggtgttcaaaggctgtcaactattcatgcgtttgtgcgcggcgatgttccgagtaggctttcaaatctcgagtatctatctgacgagcttgctggtaaaacatttgaagacataaagaactcggtctggagtaagcgtcttcatggaactcagatcgttgccaatgttatagatccacagacgccagcagctgtgaaatttgatattttcaagaggatcaataccggtgggacgccgctgaattcacaggagattaggcattgcatgagtttgtctagatcccgtgatctactcaaggatgctgcctctcttcagtccttcgcgctcgccaccggtgggggactggtaaacaatgttcgaatggctgatcgcgagatggtgttgcgggttgctgcgttctcccttctcggtcttgacgagtactatcgttcagatggactggacgatttccttaactctgtaactgccaggattgataatgggtattatgacgaaattattccgttgttcctggcgcgatttgatcactctatgaaggtggcgtatggaattttcggtgataacgcttttcggaaatggggggtgactgagggggggaggcgaagccccatcaatcgcgcaatttttgaagcagtatctaccaccatattgacaactgaagatagtaggttgaagggtgttgaggacatcatttatgggtatcgcttcctgtgtagtaatgatccatctttcattgcctcggtcactcaatccacgtcttcggccgggagcgttgccgagcggttttcaaagattcgagagttgatgattcaatga

SEQ ID NO: 530428 - DNA, 1077 bp, Stenotrophomonas maltophilia
atgatttcatcatttaaaatttcgaatttcaagtgctttgagtcagttgagattcctctcggactcattactctcttgtgtggagtgaatggcgggggcaagagttcggtaatccaggcgatgctcctccattcaatagcgagtcgggctggggatagtgagtcggcgcttaatgggccttttgggcttgcgctcggtgattatgatttgcttttgaatagaaactctggagtcggggatggtaacattctcttctcttacaggggggagtcgcctgtagagattcttcctggtcgaacgcagcgaagttttacttcgagctgcacaggttctagtgttgatagggggctaatttatctttctgcggagcgctgtggccctagaataattcaggatgagttttctcctgtggggtatgacttatttaacgtgggtgttcgcggagagtatgtcgcgcagattttgcttgagcatgataggcacttggttagagatgagcttcttcccgtaggtgagggtgatgttcgtctgcttcctgcggtggtcgaaaagtacatgtctatcatattcgggccgctgcaaattcaatcaagatcaaatggaatcgctcctccctccctgttcttcaagcgcccaggccttgaggaggagtggaccttgtcttcgcatacaggttttggcctgagctatgctcttcccatagtcgtcgccggtctgttagctaagcccggcacatcgctcgtggttgatagcccggaggcgcatctgcatccagcggcgcaaacggcgattgcaatgttcctctgcagagtggctggttcaggtgttaatgttgtcgttgaaacacatagtgactatgtcgtagatggtgtccgaatctcggtgggtgcgggttccgtgcttcaggctgaggactgcgtagtcctgaacttcggacgtcacgatggcaaggtaattgctgagtctgtggttgtggatgatgcagggaaagtcaagaactggcctgccggattctttgatcagcacgtcattaatatgaggtcgcttgtcggtgcgagacaaggtaatcgtgggtaa

SEQ ID NO: 530429 - DNA, 960 bp, Stenotrophomonas maltophilia
gtgcgagacaaggtaatcgtgggtaacgcgttcctggatgatgggtttacgcgagaaattccgtccgcgggtctctgtggcatcattgatgatttgcagggactatttcataggattgcttccagcgatgtcgagttgcacgtcccttccgattgggaggtgatggagttttcagatggatgtgagctttgggaggttctttatcagaatcctggcgattatgggttaagcatcgggcaggttaatgatttttcaaggcttttgcagcagagtgcgacctatgatccagttcgcgatgatgatctcgtttcaccggggcgcgttgcgccgacttgctcgggttgttattcgagggtgcatggcgaccgcgatgatggcccattggcagtcatagcgggggctggctatgcaggaggaatcactcatgtgattagaaactctgacgggacgagagttgggttttattcgctgattctgtcgtcgaaaatgactgatctttttcgcgagcatctgatttcccgggagtgttgcgatgatgatttttcaagatattcaaaaaatgctttccctttgatttgctttgctgataatttgtctccaaaatctttgaacgttgatctgcggctgcgagcgccgcaagttgttgatcatttagcttatctgaatgacctgtttgcttctgatatgcagtccgtgaattggagtccagggctcgtcgccagtgtcgcggcgggtcgaggtgtggctcttagtgatgagagtgtcactactaagaaatccgagaagaaaatgaagcaacgggacgctacttttacccgttctggaagtaagatcgtgctcaggtgttcgatgcatacaaagctcgattttgacaacggaaggattcatttttgtcttgttgaagttgaggggaaagcgcttgttcatgttgggttgatgtgcgctcatttggaaacttag

SEQ ID NO: 530430 - DNA, 1335 bp, Stenotrophomonas maltophilia
gtgcggaccccgtatgtgccccatgtgtttggcgaggaggtggagcgcaagctccgcagccgaatgggatggctgtccgctgcggtggtgagttccataccgtggccgaagaaggacgtgtggatccggtacgccgaggacgatttcatcctgcgcggcaccgagaacggacagcaactcaccgcgccagccgtcactgtgccggggacctcacagcagattgaagagggactggccaaggtctatcgcctaacctccgttctggggtggttcttgaacggatacgtggatgtggtcgaaaccatccagggcagccaccccatggggtttggcgcgcaaatgcggcaggcctattccgaagtgggccagttcggagatcgaggttttgattgcaatcatatgccgatcatcgagtcggagaacgtgcgcattgctttggcgttctggcgggaagggcaacgcctgacacgggtccacgacagttacgcattcctgagctacttcaaggtcattgaatcgcaataccaacagggcgccgaccgcgccgattggtttgctcgccacgtggatctcatgacgggcgaggctggagcccgagtggcccaactgcgtggggatggcgtggatgtggggcggcacctgtatgacagcggtcggaacgccgtagcgcatgcatccttcggtggcggcatagtcgatccggacattccggccgatcgccgacggattgcggccgacctggtcctgatgcgagaactggccaagcactacatcgccagcgagttgaaggtgccgacagcgtcggagctttatcgaacccgcaatcgcattgagccctgggaaccgctgattgacgaaggggcgctcgctgcgttgaaggcaggcggaacccccgaaggggagtttggtttggatgggttggctgtggcgctcaacttatggccggatagccccatgccaggtcttagccggctcatcatgagggtggacgcggtgcatgaaggggctgccagaatgctcttgttcaacgaccgcatgacgatggtgtttgcgttcgtgattgacttcctgaaagggcaaatccacacgcagctggacaatagcggattgctgcagaacgacgagcacaggccaatcgaggaagacgttcgcgagttctacacggtgttccaccgggtgatcggaaatgctgtggtggaacttcgcattgaaggacgtgagcccgtggactgcgaggtggtcatccctgtgaacatcctccccagaaatcctgaggaagcggtggcggaagccgtcgaggcgttccgtcgggcggatgcacaaaagccggaatga

SEQ ID NO: 530431 - DNA, 1881 bp, Stenotrophomonas maltophilia
ttggacgcgaacacccgtcagctcaaggccatcttcgatcccagcgtgaacttccaggtgccgctttttcagcggccctacgtgtgggcggaggacgagaactggaagccgttgtgggaagacattctggcgctgctcgataggcatctgcgcaccggggctgcccgcgcccactttctgggcgccatcgtgttggagcaactgcccaacccggccgggtccgtggaagcacgccaggtcatcgacgggcagcagcgtttcaccacgctgcaactgttcttgatggcggggcgtaacttggcggctgagcacggcgccgagcgttacgtggggcgcttcacgggcttggtggagaacgacgacgacctggtggaagaccccagcgagaagttcaagctgtggccaaccaacagcgaccgggcggcgttcaaaaccatccacgcgagtttgaacctgcaagacctggacaaggcaatgaagggcaagcccgagctcgcctgcagcaacctcgtcggcgcctaccgctattttcacgcccggttgtccgactggttgaacgggaagctggacgacgtcgatgacacgcccgagctggccagcaagacggtcgccgatcgcctggaaacgctgtggcaggtggtgaaccgcggcctgcagctggtggtgatcaacctcgacaaggaagacgaggcccaggtcatcttcgaaaccttgaatgcccgcggcaccgagctgttgccggccgacctcatcaagaactacctgttccgcaaggcgctgaaccaaaaagcgaacgtagaagcgctcaacgatcagcattgggcgcgcttcgaaggtgggttctggcgggaagaggttaagcaaggccgcatcactcgccaccgcattgatctcttcatcaaccactacctaaccctgatgacccgggatgaggtgaagacctcacacctgttcaacgccttcaaggcctttgtggagtacgccgagccggtgccggggtcgcttatcccggtgccggcggacgcggatggtcacattcgccagctctcccgctacgccgatgtgttcgaagccttccaccgtcccgacggccacttggccttggcccggttcctgcgcaacctggaagcggtagacaccaccaccgtttaccctttcctgctgcacgcctatgcggagctcatgcccgacgaccagaccgagttcgacaaggtgctggcagtgcttgaatccttcctcatgcgccggctcatcaccaattacacgagcaagaactacaaccgcctgttcgtggatctcatcaaggcggtggagaagggaggcagcctgacggccaaggccgtggccgagcacttgggcaaaggcgcgggagagagcaccaagttccccatcgactcggagcttttgaccgcagtgttcgaatggccgctctacggccgcatcgcccagtacaaggtccgcgcggtcctggaagcgcttgacgccgcggcgcagtccaccaagagccccgtgctggccatccccaccaacctgaccatcgaacacgtgttgccgcagacgtggcaaacgcactggccattgccggccgaggcgaaggcggacccggtggtcgagcaaaaggccatcgtccggcgcgaggtgatgctcaacaccttgggcaacctcacgctcatcacgggggcgttcaattcgtcgctgcagaacgcggcatggtcggccaagcggcccgagctgttgaagtattcgaagatcaacctgacacagtatttccacggccccgaagcggacgcctggcacgaggacgccattcgcaagcgcactgagcacttgtttgggttgttgctcaaggtgtggccggacgccagcaaggttgccgcatag

SEQ ID NO: 530432 - DNA, 609 bp, Stenotrophomonas maltophilia
atgaccagccagctaggccaccgaggtgcagccctcggctatgatgcggctatgcccgtctccgatgccagcgcctttgctctgctccgtgccttcgggatgctggagttcaccctgaaacgcacgccgggttttctggcggctgatggcaatccactaggaaaccaccgggcaaaagcgaaggcggattggccggccgttgatcgcgcggtggccgcgctggagccggcggacttcctcgaccagctgtccggggcaacgcgggccaagctgctgggtggagcgcgcaaccgaccgcaggtgcagttcgtgcaagtggctgccgacggcacctggagcgcgaactacgaggacagccccttgccacgcaacgacgccgaagcgctggtggtcgccatgcggcgtgtgcgcaacaacctcttccacggcggcaagcaagacccgttgcaggagccctaccagggcgacgacgaggaatggacggtggccgcccgggaagtcgccggactgctgctggatctgctggaccgtcgggtgctcaggccatatccgcgagaccgacgccgcctctcgaagacgatcttgccgtccagtccgaccacctactaa

SEQ ID NO: 530433 - DNA, 408 bp, Stenotrophomonas maltophilia
atgaaaattgaccgcgccaccgcctggaaagccaagttgcccgccttgacccgggcccgttgggccatccgctgcggccacgtgttttcggccgacgagctggcgcggctgcgagaaggtctgtggccgcgcgatatggacgatcgctggaccgtttggctcgacggccacgcaatgcgctgctggcgctcgtggaccggcacgtgcatctacgaaacccacgtcgcgttgggcgaggacggcacgggggtggccgaggtgctggacgtgctcgacgacccggcgacgtaccgccgcgccggcaccgacgccgtcgagctggagcgctttgaagggatactgtcgctggtgtggcgtcgcgaggacgaccgcgccgcgctggccggtgtgacggtcatcggtggctga

SEQ ID NO: 530434 - DNA, 747 bp, Stenotrophomonas maltophilia
atgctgttgctgcaccagggcgaagaggagttgtgccagcgcgccgtgcgcctggtcgaaacccaccccgacttggccgaccacctgggcatcaccgagcgcgccatggacgtgatggacatgctgcgccagcactaccaggccgacgacgacgaacgcgccatcagccaccttggtatccgcacgttcaacggctttgccaccgcgtggaagctcatggcatcgggctattaccaggcggccacgctcatcctgcgcgacatcgtggagaccaccaacttggtcaatgccttccacgtggaccgcgcgttcatcgaaaagtggcgcaaggcggaccgacgtacgctcaagcgggatttcggtcccgcggccgtgcgcaagatccttgacgacgccgcgggtttgggcaagagccggcgcgaagctatctacatcaagttctccacgctggctgggcaccccacgctagacgggttcgccatgctgcgccccaagggcatggacgcgcacatcggcccgttctcagacctcacggcgctgcgcgccgtgctggaggaaatgggtatgcttgccctgcaagccggctttgcattttgcatctacctggacacgtccattgacgcgtgcagccaagtcgcgcactacttcttgaccggcgcgatggactactcgggcaagtacctgggcaagccctactcggatgaggagcgcgcggaagtcgatcggttgtttgcacgctcaccttga

SEQ ID NO: 530435 - DNA, 699 bp, Stenotrophomonas maltophilia
atgaaatgggacttgaaagagcttcggggacacgtggagcggctgttcggcgtagagcagctgcgcacagtcaaccagtgcttgcgaaccatcggcgaccggcgcgagttcagccgctaccacttcaacgaagctaaagaccgaatggagggtgccctccagggccgcgaaacttttgagttgactgccgcgctcctgggggcgttcgacaccgacgatcggcagttcagcaccgcgcgatttcaggcgtatgcgcacacggtagcctgcgtccagaacatgcacgcggtcgtcgataacatggtccatttcgcctactacgtcctcggtgccaacttggacccagccacccgcatcgagagggagcgcgacatcacctggtccaaggtgagcaagaagctcgtcgcggggcccatcaaggatgggttgatcgccttactggacgatccgggcttcacctacctggcggctctgagcaaccactccaaacaccgttccatcgtcgaggtgtcctactcggtgaacttcgagtcggacgcggtcgaacacggcctgcgattcaaccccttcacctacgacggagtgacctatcccaccaagtgggttcgccctacgctgatcgacgaataccagcggcaagagggcttgatactgacgatcggcaacgcggtgaacgacgagctcagggatcgatcctga

SEQ ID NO: 530436 - DNA, 243 bp, Stenotrophomonas maltophilia
atggtggccacctataagctgtccaacctcaaccgcacccgcttggagagcctgttccaccgcattttccagcaagcccggttggatctgacgatcgaggaccggttcggcaacccggtgaagccgcgcgattggttcctggtgctgctccacgtcatcgacgaagcagcaaagcgcatccaggacgggacgatagccgattacgtttacgacccatcgcaggcggctttggtgcgtcgctga

SEQ ID NO: 530437 - DNA, 201 bp, Stenotrophomonas maltophilia
gtggtcaaggacagcgtggccgacgcttgccgggactatgtcacttggctgcgcagcgaaggctgcaaggatgcagccacagacacagagcgccggttcgagcggacggtctacggtgatccgctagggaagatccgtttagcgaagctgcaccaggacgatctggaagcttggcgcggacgcgtgaagcgtgaagcgtga

SEQ ID NO: 530438 - DNA, 738 bp, Stenotrophomonas maltophilia
atggacgaactaaacgcgaagatcgaaatttggaagaagatcgttgatgtccaacaacacttcaatgatctcgaacttagaattcggaatttcgcactcattgtgacgggcgcatttctcggccttggcgggtacgcaattaaggatggtgggtccacccatcttggcggaatggatgtttccaccgcatcgatcatcattggtgcatcgctaattccactttgcgcattctacctaatggatcgcctttggtatcaccgccttctcgacggcgctgtcagtgccggagtagaggccgaaagacagttaaattccgatcatcagctcagaaatggcacgacgatgagtggaatatcggtaaaccttggccagagcatcaaagagaaaagtccattcagactctggatatttggagggatgatccactcccgccacaagatggacggattttatgggctacttggcgtggcaattatcgcactaaccataaccctagccagcgccacaagctcgccgaagtcacgcgacaactcgcttgacgacatgagcctcagtgagatagtggcccagtcagccattattgaccgcgcagcggcaaaaaaaatatgcgacttgcgtgtcaagcagcttcttaatcgatcagcgtcgtcacccgggtcgttggtgaccgacccagacacgggaaaccaagcagttcttgtttcgggacaatgggagctagtaccaaaatgccgttag

SEQ ID NO: 530439 - DNA, 774 bp, Stenotrophomonas maltophilia
atgagcaaaaccgcaattgaaatatctgggatcgacgaagaaacgttctatgcggagtgcagggcactccatcaaaagcatgggaccacggagtacgcgtttgttcttacagagctcccgtcatttaagagcaagtatggaaatcgcgttatagaggcaatgcaaccagccatagatagctttcgcgaagcccgccgagaacacctacgcctttatccaggagttgatgaaacactaataaagctaaaagaatcaggcgtaacaatcgccgccttcactgagtccaaggcattctatactaactacagatttagaaaactccacttagatgggaagatagacttcctatattcacccgaagatcacagtcttccaagagactctagctccattcgaaaatatccagatgaacactataatttgaagaaaaccgagcaccgctttacgccgacgggcgagcacaagccgaatccccatatccttctgagtataattgaggaactgaatttcgataaacaggaggcaatctacgtcggcgatagccttctcaaagatgtgtgcatggctcaagatgccggcgttacagatgtatttgccgcctatggagctgcacaggatcgaacgccggagtacgatttactcaagagggttactcattggacgccagacatggtcgccagagaacaagccaagctgaagcccggcgcagtgactcccacctacgcgcttccggacggctttttccaaatagttgaaattctggacagggaataa

SEQ ID NO: 530440 - DNA, 1500 bp, Stenotrophomonas maltophilia
atgaaggatgggaagcgacaggagagcgtcattggtccggtgaagatcctcaagcggggacaaacccagagtgatggcatgctggtaagagagaatttcccggagctgggcgaggagttctgctctgtgggggactctctggactactacgagcggcttcgcgcgctcggaccgttgggtgagcagattttggctagccttcgggacgtgattcacgctccggaactggtagagaagttccagggggagcgtggctggcgcaagtctctgtttcgtgaccaggacgatggcggatccagttaccgaagtctggcgacgggaatcgtccaagggcactacacgaccccgccgaaggatcagcaaccgttcgaatttcagattactggctggtcgcgtagcctgaagatcgacacgaggtcgcaggaatcgggggccggcaacgagaggctgcccgagcgagtgaacgtcctggtgggtcgaaatggctccggcaagagcaccttgctctcacgcctggcgcgtgtcgccttcgcgtccacgacagaacgagcagcgtcaccactgagtgacctcggcaagatgcttccggagggcgttggcttcccgcgtatcgtcgtcatcgcattcagtccgttcgacaatttcaagctacccggagcggatgcacgcaaccgcatccagattgcgaaagacatgcagaacggggtcggacgatatgtcttcatcggacttcgggatttcgcaggagaggccgagatcacgatctcggacttgccgggtaccaggcttggccaactcgaagcggacaccgatcgcgtcagtcagaccaagctgaaatcgatcgccgatctggccatcgacttcgatcggtaccgctccatgatcagcaacgattcccggcgcgagctggtcctcaagaaggcgctggatgccctcgagactgggctgatatcggacgaatggctggacagcaccagtagcgggatcgatcaggaagcagcgacatggttcatgaggctcagtaccggtcacaagatcgcggttctgtccatctacggactggtcgcgtgtctcgaggatcgatccttggtgctgatcgacgagccggaaacgcaccttcacccgccgttgctgtcggcgatgatgcatgcgttccgtcgggtgttgacccggtttgagtcgtctgcgctggtagcgacgcattctcctgtggtcgttcaggagtgtctggccaagcatgtgcacgtggtgcgccgtgagggcgaaagcttctcgattcgtccgctgcgtgccgagacctttggtgaaagcatcggactcatcacggctcaagtgttcggcatgcaaagcgatgccactgacttccatgcagtgcttgatcgattagtggacaagtacgactctcgcgagaaaatcgaagaattgttcctcggcggcgtgatgagcggtcaggccagggcctacgtcatgtccaagctcgcggaggaggcctcggagtga

SEQ ID NO: 530441 - DNA, 825 bp, Stenotrophomonas maltophilia
gtgaaacccagtcagacaaatcagagcatgcagcttgtaggcgtcacagcgttggcgtttttggtcggcgcagcaagtgtatggttgctttttaagctaggacgcgactggacgtttccaaggttcggggaggagctcggcagcttcgccgactggattgcggctgtggcggcatgcgttgcggcgatcgctacaataatgatcggccgggcagctcatgctttcgcgcgcgaagccgaagatgctcgaactgctgaagcgaagttggccacacagcgcgaagaggcagaggccaaatcccagagcgcgaatcgcgaagaaagaaaacgacgggaggacgaggcgatcactgcacagatactggtgatgagatcgaccgctgagaaggcatgctacccgcaaacggctctggcacacgtattccctcctgaaggcgggtctaatcctggattttcaagatctcgtagaccaatgattctgcaacttgaattgacggtcctttacgtcgatgcaatctcatggagcgacgattttaagaaggcgcttgatgcagagtctatcgaaacgctctcgagtctcgagcggagcctactttggtaccgcgctctcacaaccgaccagatagaccgacttaggtccgccgaaggtcaatacaacgagagcggccctgcccgtctcgagctggattggaacgccgatgcgggagtgttgcttgtacgtgaatcagcgaagaccctgtcggaagatgcgctcaagttcatcgaatgcctagatcgcagggcacaactattcatgcaacccaccgacaagcagaaccaggcctag

SEQ ID NO: 530442 - DNA, 744 bp, Stenotrophomonas maltophilia
atgagagcccccctcttagacctcagtcaaccgaccaattggcccacagagcttcgtcaagtcatcgatgaactgcgccctgtgttcatcgcttgggaaaaggatcttcccggaaagtcagcggcacaattcgacatagcgatgaagcagctcggcaatgcgctactgccattttccattctaggcttccacctcacccgtctgacaaatgacgaagctacagagatacggctgagcggcttgagggttctgacccccgaactgattgggcaccgtatagcgaaccaagtcaaaagcggctccctgacttcggagcaagcggcacagctgctgaagaccaatcaagtccgggatcccaaccgtgttcgaatggcttggttttgcttctatccgcctgttgaggcgttcgaaagcggcgtgcggccactcctcgagaactggggaggtgaagcgctctataactccaataccagcgatcgcgctcttggtcctttgctgcgctctattggtaggcctgccgtggtccaagcgcatgtcccgacggcctacctgagtggcaccatgaagctggctacagaggcttatcgagcagacctaatcgaccagggctttgaagtagacgatccaccaggtcgatttgaggactacagcaggttcgacttggagccgtcccgaatagagcgcgtcctcctgcaccccgatgccgatttcattcggctcactggaagcagccgatggatgtga

SEQ ID NO: 530443 - DNA, 897 bp, Stenotrophomonas maltophilia
atgcatcatcattgcatggcccaaccccgatgtctccctatgactgatcaatcccctgaaacactcgaagtgattggcctgagcattgcctatgaagcgctgaagagcatgcttaaccgctctatgctggacatcctccacctatccgatggctctggcgaagtcgaagtcaggttcaagtccgcgacccaccgcgaccttttctacatcaggctactagactttgctcatgagggcggcagcaggaggttgctcggcacttcaaagaatatgtcttgcttggaaattctggagaccgttggttcgacccccaggctatctactcagaaatccgcagaggacctcgctcgttctgctgcaaaactgcgaaattggctggagcataccgttcaacccaagctctggctcggcgagatcaacgtgagtgcgaggctttcggtcacaagactgcaacttctgaagatctctgggaaccaagctaaacacaatgtttctcgacttaccggtgtgtgcactcaagttcaagaactgctggctatcaacggatacgacgtgccttttgagttgataccgttcgcactcgaagacttgcgtgcgcacctaggcgacaacatgttcatctactacggaagctggctcgcagagctgctcaacgatctgacatgggcgctataccattacgtccgccccatctacgagcgtcaaatcgtctacgaggaaggtccactgccgggctactatcgctatcaaccgttagccggcgtcgatccgagatcccccgcgcattcttggctttaccgactgctcaacgaggcgcgcaatatgccttccattccatcgttccgggcttcccactacctaaagcaacgatctggcctggagtgggaagacatctaa

SEQ ID NO: 530444 - DNA, 786 bp, Stenotrophomonas maltophilia
atggataaggccaagcaagcactcaaaacggttgaggaatactctgatgccttcagggatatggttaacgagtgcgttcaatggaagcctgagcccgcaaggaggttgaggcttgagaaggacgaggactggagctttgtttgcgtcgcaatggacatcttgggcgacgcaagcgttgctattgcgaacgtattgcggtttgggctcgatgggccaacaaaatacgacgaggtgggcgaaaagtatctgcgtctctatggtttgcttggcgccacctacagtcaacagagggcagccctcaagctgcacaagctgaccagctgtccaggcgtaaggcagttccaagacaaggcaaaggggctccgtgccacgagccttcgccatcagatcgcggcgcatagtctcgacaacatggacgaacagggtagggttgtcgccgccttcgttcctgtgaggatcgacttgggcggattcaactgcaccgtgacaaaaaatcgcggagacgcgatggattcctatgacctgctcgaggcaatcaaagagcattcggagttcgttgcagaggttatggatgttgtctacgagaaatgtgcaaggaccttctttaagaacgattcagtgcggcggcagtcgcatctggagaagctaagggagttgagattgatacgggacggagccatggtttttaacgcaggcaaaactcgcattattgttaatattgttggcatggaacgcgaggaggggaagggcgcgagtggctcactaaccgacccgcagagcccttag

SEQ ID NO: 530445 - DNA, 657 bp, Stenotrophomonas maltophilia
gtgctggccctggtcggcgagaacggcgcgggcaagaccacgctggtgaaactgctggcacggctgtacgagccggacgaaggccgcatcctgctcgacggccgcgacctgcgcgactacgacctggacgacctgcgcgccaacctcggggtgatcttccaggacttcgtgcgctacaacctcagcgccggcgagaacatcggcgtcggccaggtcgaggcgatggacgaccaggcacgcatcgccgatgccgcgcggcgaggcatggccgaggaagtgatcgacgacctgcccggcggctacgaccagctgatcgggcgccgcttcaagcagggcgtggacctgtccggtggccagtggcagaagatcgccattgcccgcgcgtggatgcgcaatgcgcaggtgatgatcctggatgagccaacggcagcgctggacgcgcgcagtgagttcgaagtgttccagcggttcagggagctggcggataatcgtacggcagtgctgatttcccaccgtttctcttcggtacgcatggccgatcgcatcctggtgctggccgatggccgcatcgaggccagcggcacccatgagcagctgatggcccagggaggacggtacgccgagctgttcgagctgcaggcggcgggttaccgctga

SEQ ID NO: 530446 - DNA, 318 bp, Stenotrophomonas maltophilia
atgggcaatgccaccagcgtggcgagaatggtgaacagcaccagcgacgagcctaccgtgccgaagcccaggccgcccttttccagcggcttggtgagcagatcgccgaaggtggcgccgaacgggcgggtgagcacgaaggcgatccagaacaggatgacccggttgatgcccgtgatgcggctggccagtgcggtgagcgcgatgaggctgccgatcagcagtgcgccgccggtgaagcccagcccggaatcgtcggcgaggaaatcacccagcgcggtgccgagggtgttggagaacagcacggcggtccagtag

SEQ ID NO: 530447 - DNA, 1287 bp, Stenotrophomonas maltophilia
atgaatcttgaacgccagcgccagctgcgtaactatgtgcatgattccaggcaagcactgctcaactcgagcctcgacagtgccctcgccccagccatctcccttatcggagatgaggctaatcgagcgatcattgctttgctcggccgtgcagagcggaggaacgatggcatctttttttctggtgcagcttgggcgtctcgcctgatcaactccctacctcccggtcctttcaagcgatttgtcgatccgagctgcggggtcggtgacctactacttgaggcagcgagacgactacccttagggatagatttatcgtccacattggcgagttggtcgcgaggtttccatggcatggacctacacgccccgcttgcacaaatggcgtggagtaggctgcaagcgctcgcaatgcaccttcatcctgttgaaggcgcgaaggcagctcctgcgtatattgatcacactgagagtttccgtcagctcaactccctcgaggattcatgggacctgatgccaggtgattgcgtgctgatgaatcccccctataacccagttataagtccggagtggtctaccacaagccgaggcagggtgacagccgccgcacttttcctggagcgtgcggttgccactgctcccccgggcacagtcatagccgcattggttccagaagtgctgaggagtggaaccagatttgaaaagctgcgtggattcatcgaacagcgatgccagatccacgagttctctcctcaagggagatttagctctgaggctgacatagacgtatccatcatctcattgacggtgcgggacgctccacttgaggttgctcccccaatagaaatcgacggctcggggctcactctggccgagatcgcggacgtgcatgtagggtctattgtcccgcaccgcgccgttccctctaagctacgcaggccatatttggatgtagatggagcacctgtgtgggcagaaatttacccttctgtgcaggaaaagctgtccgggcgtgcgtttaaacctcccttcgtggttattcgaagaacttcggggccgagtgacaaagagcgagcaagggcaaccatcgtacgaggaagcagcccggtaattgttgaaaaccacttacttgtaataaatccaaaaaataaaacattacgaagctgtcgtcacattatgcgtgtacttcgcgacacgcgcacgacagcgtggctcaatgaaatgctgagatgccgacatttaaccgtcaaggttatgaagaagcttccattgtggacggagacctag

SEQ ID NO: 530448 - DNA, 2085 bp, Stenotrophomonas maltophilia
gtggccaaagcatcactgcgattcgcgagcgacttgctccggagacttggagaagagctcaacccatccccggtcaacggcattatcgaacttgtcaagaatagctacgatgctgattcgacaacttgcaatgtgactcttatccagccgcgcgagctcaatggcactgttatacctggaagtctcacaatcgaggactggggtgacggaatgacggagcaagacttccgagatggatggctggtagtcggaaggtcacggaaatcacgcaccaataccactcgactgggtcggcgtcccgctggagataaggggctcgggcgcctctccgcgctgaggatggggagctcggtgcaagtgacatccataccaagaaagcaaaagaataaacagttccagctttctattaattggcagcgatttgatcaaagccgcacgccgaacgaagtgcccctcaaccttcggacatctgtcgccgcaaaaggctctcatcatggtacccgcatcgaaatcagcggcatcctgcgaaagctcgaagcaaacgagattgaaaggctcaaccgaggactattaatagtttcaaatccatttgagcaatccgccgaaccatttaacataaatctagttattgacccactccctcgaggccttctcccaaaattacctgatctattcaacgccgcctccttcaggctaaaggccagtgttgcaaaagatggaagcatggcagcctcgcttcttgacggcgcagggcaagtactagcgactgcggattcttcagacctggagcagagattcaaggtgcacggccaaggcgcgagcctgcacgccctcatacctgccgagttgaatatttggatttacttgctccgatcaagcgaattctctggcggcgtaaaagagctaaacgctgtacgcagcatgctgcaaaattttggcggagttcacgttttcctcgatgaagtccgagttgcaccttatggcgaccctaatgatgattgggttggtatggcttcgatgcgagcttctaaccctgaattcctgccacaacccaggaccgctttaggctacataaaaattagcgatcaacccgggcttcgacaaaagactgatcgatctggatttctagagaatccatcaactgatgccttacgagcattcgcacgggcggcgctaagttggcaatcgatggtgcgggtgagctttcgcgataacacggaagatcatgagcggaactcagccaaggaggatagagaaaaactctctgctgagcttcaggggatagtggagggccttgaagatgctccgaaaaagcgcgcaaagcagctcgtaaagcgactttctgaaatctcaaatagacaggagaacgtcctcactcgcgaggtggatttgtatcgagctctggggaccgcaggcattgcatccagcgtctttgcgcatgaggcagcaaataattcgctcgctagaattcgtaacaataccacatcaattcagttcagggcacagaagaacggtatcgctctaacgaaggaaatcagtcctcttgttgagagaattaccaatgatgtagacggacttttggcagtttctcagataacgctctcacttgtgaaggcaagacatcgtcgccggcagaagatcagtgtattccccataatacgagacgttttagacctattctctccgtacttcgaactaagcaaggtggaagttcgacattcaaacataatgaaagactggtctttaatggggtcccgcgcagccttagagtgcattcttgtaaacctactgaccaattcaatgcaggcgatggagcacgcaggcaccaccttacccttgattacaattgaaggcagctcggcgcccggaagggcaataataaaggtaaaagacaacggacctggaattcaagatcttccactgacggacatctggcttccaggagagacaacaaaggaagagggaaccggcctaggcctgacaatcgtaaaggcatccgtaaaggatctgggtgggacgatcaaagcagaggcgtcgtgcgacttgggcggcgcaggtttccacatcacattgccattgatttag

SEQ ID NO: 530449 - DNA, 291 bp, Stenotrophomonas maltophilia
atgccccgaaacatcagccccatgtccccacccatgacgcgtgtcgatttcgaagaacgcatgaacgctcttcgcgaacagcttcgcctgggaaagatgcattttgcgcagggcctgcgcggcccggattcgctgctgcaggtgcggaaattgcctaatgggcggatcgacctcctcagcatcgacgagacagcccgactccatgcgaacacaacatatcagttgatggccggaggattcggcgccaagttcgaagagctagttagctccgatggcaatgcgacggattaa

SEQ ID NO: 530450 - DNA, 5838 bp, Stenotrophomonas maltophilia
gtgatcgaggaagaagtccgggatgcatcctgccaagtcctggcgggcgggaaatcaggcactggatggttgatctctcatgagcacgtattatcggcgctgcatacgatcgaagatgcggacggtgcgcggtgcgagcttgccaaggtctgctttggtatcggcgaggcgttgcaggcattcgaggcgaaggtgctcgcgaccgatgcggaactcgacgtatgcctcctgcaactgccggaaacgctggtccgccgccctgttcctcttgctactcatccggtgagaccgggcatgcgctggcatgccttcggttaccctgccgcgaaacttgagctggggcacctcgcgcaaggtaccgtgcagcaagtgctcgcatcccccgtccacggcattgacctggacttaaccgtcgatccgacaacggccctgtccaactatgaagggctgtccggtgccgcgctcatggtcgacgatggctgtcagggattcattcggatccgcgtggacaactctctgggggcagtgggagtggcgcgtttcaggcggtttctggaaagtcacggagtcatcccttcaagtgactttgaagcaacgcacgctgatcttcccgtgaaaggtgagcgcccacatttcgactacatgtttgcggacattctccgcaagggagaatcaggctatctgtttttggacggcgcacacggcattggaaagtcgacgtactgtttgaccttcaaatccgacgatgaagagattgaggtgctaggcgtttatgcattcacggaccgggcccaaggctccacgcccgcacatcaggtgcagccagagattttcttcgactggctcaactcgttgcgctccgcaaggtctacggggcgcccagcgcgactgacggagttgtcctactcgcagctcatcgagcatacggcgcgtgcgctggaggagcttgcatcgggatgccttcactctggaaagcgaggcgtattattcatcgatggcctcaacgaggctgatcgactggggggcgatgccatgcagcgtttcattggcttgcttccccatgttccgcctgcagggctcaagatcgtcatcacgggcgtcggactggacgcactgtccgccaaactcggggacattgcgcgtggcgcagcgagactgacgctgcctgcgcttgacggccaagctcaggccgagatctgcagggacttgctcgaaggtgatcgagccaccttgcctctgatcgatctgctgcgcgaacgagccttagggcacccgctgtatctacgctatctgattgacctagtgaacggtggcgccagcgatgatgagcttcgcacgctgcccgccttcagtggtgccatcgaggactactacgacacgatctgggcgaggatcgttccagacaatgacgctgttaacctgctcgccatcatcgcgcgtttgcgccggggcgtgccgacggccacgcttatgcccgtgttgaccgctggcgagagtgcagtttacgtctcgacgctagcgaggatccgacatctcttgtcgcgacccaatgagacggagatctaccatccctcattctccgaattcgtcgctcacaagacatcggtttcagaccgctgggtgcacagtcggctagcggaattttgcaccgctccagcaagcggcgagtacggctctttgaaccggatccatcacggtctgctcggcgatcaggactctaggagcgaagcgatccaggcctgcgatcaagcatgggttgaccaagcggttctgctggaagcagagcccgatgtgctgctggcagatatcgaggatgcactggccgctgcgacagtcgaaggtgcggccactcagatcatacggctactcctgctgtctcagcgattgaggttccgctacaatacgctgtttgcgcagtctgcggaatcagtggcccacgccctcgtctcattgggtaagaccaaacaagcgctgcggcacatcctgcgctaccgcacgctgatcgtagaaccctacgaagcctttgccgtagcgcagcgcctgattgcagctgaccagaacgacgatgccaggcagatactgcagactgtggagaaagcattgctggaggcctttacacctgacggcatgacctgggagcagttcacactcttgatgaagctaaggatccatctctgcgtgcttgccagaagtgcaggggatgatcctccagtcatggaactgcttcagagcgctcatgagttggtcatgagtcagggggattcactgcctaatgagcacaaacaagagatcatgcagtccattgttggcgacatgctcggtgctacgctgtgcttgacgggctcctacaggcctatcggcaagattccgatccccgacggcgtgccagccgatgctcaagtcaggccgctcattgccatcctggtgcatgcccgactgtacagtcttacgtacggcatcaagctgccgcagcccgctttgaggcttctactctcggacctcgaggagaagcttgacgggacactacctgctgatgatcggacgtttttcgtggttgacgccctcatcgaggtcggcgcagcggttgagttcatcacgcgatacacgggcgaaatgcccatcgatgcgaccgagatccctttgtgcgccaagaaccgcgcgctcacagatggagatgcgttcgacgatgcctatagacgacagcgcgctagctatttcctcggccagcagcgggtgctacctgttgcagagctgcccgactctggcaactgggagacttgcctcggcacgctcgcacggtcagtggcctgccacgacggcctcgcacgccgtgcgcacgggctcaacaatgccgcagcagtcgactcaatccgcaatgacattgagtccaatctactgcccgtgttcgagttcacactcaaatcacgcatcgattgggaggacagttatttcatacctgagcatgtactgccttggctctatcaaagccttgcgcgactgtacatcgattgtttcgacgggcgcgccgaggctttgttcgccttgctgaagcgtgggttcggcgagcagctcgggctctacaatgagggattccgtcgtgcactagagaacataatcgagccgttcactcgagccaaagaactggatgacttggcggacacggtattcgatgctttggtcgcatggcgtgactacacgttgaggaacgtcgaaaatcggcacgaactggtgcccgagttgctgaagatcgtatcactgctcgcacgaacgggcgcttcggaagaggctctacgcacgtatcgatccgtgcttgcggtttcgatgggcccagggtggtacaaggaagatcaactctcgctgatgtcagaaacgctcgcagcactacccgctggcactgatgtcgatcccgcatcgctcgctcagatcgcagcctatctagagcgtgcgaccggagaaatgacatttcgacgttacgtgcgagccgacaaggggacgtttatcggcgaattgtgccggagaggaatgggtgctgatgccgtcaggtacttccagcatcaggcgtgcggcacgaaccaacagttactcgaccaggtaacggagggcgacttagaccgcgtatcgcctttcgtaggtatgcggttcccgggcggagcaatcgaagagcaagcggcgatgctgaagttcgtcaagcacattgacgattcccttggctggcggatccgctgggcgctactggagacctacctacatggcgatgatcgccacttggaggactgggggcaggcctatgccgacataatcaatcggatagtagatattccgtcggagctgacatcggcatgcgacagaattaaaaggctgacgttgtcgatgaaccgcgaaagggcatggctcttgctgcaatcttttgcatcggccgtggagccggcggcgttgtcggcgctgggctccctgctcgacgaggttgaggaagaattttccgaagagcagattgacaggatcaagtcgaattttggcgtccagcgtcgtcgtaccgcctccacccagagggatgaagaaacgccagcgaagcccgctgttgccggcgaagaggccggatccgatgttgaagctgatgacgaggacggcatgttgatgccgggcaccttcgggcgcaggtccgcacttcagagcgcggcgagggcgctggaggtgtcgacggcacatctcaagcgacgcaactcctccgaggcgatcaagtgctgccttgatgcactgaaggagttgcaggagggcggatggtcggtatggaatcacctgcactcggccagcgaagcggatcgcaccctacaaggcctcatatcagacggcgatgcgctggcgcgggcctacggcgagctggccatcaaggaacggcacacagaacgctggcaagtagcctctcacctgatccacttgaccagccctggattgccagccaaagcacaagccgacatgctacgcgtggcaattgaccatgtcggcttaattgtcggtgaagcatcgaccacgccctttgcctacctcggaaatgccgtgctggacaacgatacgccgccggcgctggaactcctgctctgggcactggaccatcccagctgggaacgacgggacacggccgcatccatgctgctctggctgctgcggacagacgacaggtggttccagccagtcgtgcggctcatgatctcgtgcgaccctaggtacagggctgatgtggcggccggcgcgctagatgttttgtccaaagagaatccgctgggactgtggtcgcgaatcaccccacatctacagctgggaaacctgccggatcatgtcccccacgcgagtcggtatgcgacgctcctgcgcgtggcggatcgggctgcaaaggaaggggagcagagcgcggccatacttgcgcgttccttagaatccaggttgcgtgactcgcggacgccacgtttcatacagccctcgcagcccccgccgacctacgtccccgagcatctagacgatgtctgggaggaattgaacgagctagggctattggacgcggcaacggtcgagcgattcaatgcgacacttgcaaccgcctgcgcacctctgagcatcgaagactgtcacctcatggaaagatgcgtctcccaggggttccgcgagcgaatgaacctgctagaccgctgggaatgcaaggtgcgtcatgcattgtgcattgccatcttccccaatctgtcgctcgagggattgcgtgcagccgacctcattctgagaacctgcaacccggactcactgattgagccgcctgtcgatctgcgacccacgtcgcacttgatcgacgcgctgcttgcaggaaatgaggaagcctaccagccatcggaccgcgaccttgtgtacctgcacatgcagtgcattgcggaaatcgacgaaaggctcgtccatgtcgagttagttccccatctgtttgcaccagaatcgcagcgtcccaacccaatttccgatccgacatttcattcgacggagctgccgacttttccagagagcgaggcgacggatgtgtgcggcagggtccttccagcggcagccacgttcgggtcgctgactcccgcgattgcgacaccacagttcctcgcgctcatcggcgcagatgcatcgtcatgcgttcggcatcactggcgggacggcagtacagcgaccttgatgcaacgaattcagagtcgcgcttacgagaatgcgctacttgccttgccacgcacggcgctcaatctacccacgggttggcgcttggcttggagcttgcgcgtcagcggaaggcatatactcacattaacgaggtactga

SEQ ID NO: 530451 - DNA, 1167 bp, Stenotrophomonas maltophilia
atgtaccccgccaagaacggcgacgcgttcctcgtcgagatcgccgggaagtacatcctcatcgacgcagggtacgcctgtaccttccgcaacgagatagcgccggacctgtcagccttgcatgatgccggaaagcatcttagcctggtcgtttgcacccatgtcgacgccgaccacatcggcgggatgctcgaattcatcgcatccaatggcgtttccggctcccgacagatcattgaggtcgatgaggtctggcacaacagcttacgatcgttgcctgcgcccccgggtgcggcggacagccatgcggaccagcgcctgcttgaggcgatccagcgccgcggatttccggcgctaacgggatccgctccggccgcacaacctatcagtgcccgtcagggcagctcgctggccagacttttgacccagcgcggttaccgatggaacggcggcaacggcctgcaatgtgtgcggtcgcagcccgtttcggaggtgctacctgggggcatggaacttcgcgtcattggtccaccgatagaacgcctccagtccttgcgtagatggtggctgtccgagttacggcgcctcagctacaagggtagcggccaactaagcgatctagccgaggacgcgtacgagatgtcactggcgtcggaagtggaccccgccgcgctgtcgatcgccgcggttgctgcaggcagcctgcgcaagttgagtgacgtgtacacgtccgacacgtcgctgaccaacggcagctccatcgccttcgtcgcgcagggcgagggggtgcgcctgctgttcctaggggatgcgtgggcggacgacattatcgccggcttgaccgtgaatgagaccgatcaactcatgttcgacgtgatcaaggtctcgcaccacgggagccggcacaattcaaatgtggacttgctgcagcgggtcgatgcaccgtgctttctagtgtcttcggacggctcgcgccacggtcacccggacttcgaggtgcttgccgaaatcgttgatcgtccggcaaacttcaggcgccacatctacttcaattacgacacgcccgctgcaaggcgtttggcacattattcatcgaaatccggcgcaccctttagcgtgcatatcggacacagcaactggatcgaaatcgagggggcagggacgtga

SEQ ID NO: 530452 - DNA, 1644 bp, Stenotrophomonas maltophilia
atgggcggaaataggccaggcaggaatgaactctgcccgtgtggaagcggcaagaagttcaagcgctgccacggcggcaccaacgtcaaccgcgaagagatgatctcgcgaggtgccgaggaagccaagcacaaagctgagatcaatcggatacagcagcagcgacagcaaggcctaggtcgtccaatcatcgccacccagacagccggtaaacggatcgtcgttgtgggccatcgtctatttcatggcgcatggccaacctttcatgacttcctttatagctacattctagatgttatggggcgcgactggttcgaggcccagacgcaattggggcacagcgaacgtcatcctgtcattcagtggcatgaaaagttcctgcgggcttccaaagccgccaaccttgcaccaggcgagacacacacgacgctgatgaccggtgcgatcagcgcatttctgacgctggcgtatgacctctacaccctcgaacacaacaatgatcaaacgcgcacccctcagctgcggaaatcactgattggtcgtttgaagtgccaagatcagttcatcggggtgcgttatgagatccgtgttgcagccatgctgctgagagccgggttcgagctggaatgggaagatgagaccgatcgccgaaccaagcatgtggaatacaccgccacctatccgcgcaccggaaaagcctttggcgtcgagtgcaagatccgaaaccaggatgctgcgaagcaggcgaacaagcatctaggtaagtttaccgggctagtgagcgatgcgctgaagaaggcgacgccacatgcccgtttgatcttcgtcgacctgaatacgcaggcctatccctatgttccgggtggaccgcatgactggcgaacgatcggcatcaacatgctacgaaagttcgaggcacaacccaacgcagcgaccctgccctccgccgtggtgttcatcaccaactatcccgaccatcaccaccttgacacccaggttcccgatgctggagcaaccgttgagggcttcaagatcgatgactatcgaaccggtcagttcctgaccctgccgcagaagattgagatgcgcgcacgaaatcctgaggtcgaggcactagtaacgtcgatccaggaacatatcgacctgccttccacatttgaaggggaaattcctgggctgccatcaaaccgtctgctcatcgggcaccgatatcagatggacgatggtgtggcaggtaccttggaagacgcgtgcgtgatgaacgaaaacggcgaggtcgcgttaattattgatcgggacgaaggcgggcgagcgatatacaccaatcagctctcgcctgaggaatttgctgcttggaagcgctatccagagaccttcttcgggcgaatacgtcaaggaccgggtccgatcaatgattcaattgaactttatgaccggctgaaatctacttatgtccgcacctcaaaggaaacgctgcttcagttcatgggggaacatggcgatagatttgccgcgctcacgcagcctgagctgttggaagtttatctgcagggcttgattaaatctgtgatggatcggacagaaccgcaagaagtcccgttgcacatccaaagaatgaagccgcctccgaaccgggcttcttag

SEQ ID NO: 530453 - DNA, 231 bp, Stenotrophomonas maltophilia
gtgctgtggctggagaatcgcccagagcacgtgctgatgcagacgtcgctggatgcggagcagcgggcgcccgaagttctgcagttgcgggggtttcttcaatggcagttgcagccaatggactatctggaacaggtgctgattagcgtgccggagcctgttctgatggatcgggtgctggggaagctcgctggtgtagtgcccgatggggcgcgatgtgcggcggagtag

SEQ ID NO: 530454 - DNA, 492 bp, Stenotrophomonas maltophilia
atgcacaacggcgggtacctggcctcctcgagcgaggcggccctgcaggaactgcttgcggactgccagacactgctggcccgctatccggacaaccgcgccgcgctggatgccatcctggcatctgcacaggccgacaccatcggcattgcggcgtatgagcgcaccggtacgcagtttgttgcagggtcgctgacgtactcggaaagcctttacgatctcattgtctttctggccgtggcacgcggcgccgccgacttcctgcaggtgggcgaccacggcgtggcactggtccacgactttctctgggcccaggagggcgagcgcgagaccgtggctgcgattgcgctggccgggcagggggaatcccggttcctgccctccagcgacctggctgccgccatcgaaccgttcgaggcacgggtcgaggccatgctggacggggaggatgatccggagtttcatccgcgctatcagcttgctcgtatctga

SEQ ID NO: 530455 - DNA, 558 bp, Stenotrophomonas maltophilia
atgcactccaccgccagccctcccggtttcatgacggacacccggccctctggctgggtgcagaacggtgagcgctggaacctgtggtggaacggccgctgcgtggccagcatcgtgccgcatgccgtattcggcgtccgcttgttcctggatgcgcggaaaacctcccagaccatggtggtggctgccgcgaatgcgcggcaggccaagcgctacgccgaacgatggtgcgccgccaggctctgcccgcaattgcggctgcgcgatgcggtggcgcggctggtagataccggtactccatcacctccggcgtccacgcgggaacagcggcagcaggcccgccgcctggccgaggccgggtcgcgcgagatggggcggatcaaggaggcgttggcgccgcggcgctcagagatgctggccaagcatgaggtgccggggcggggtggggcctggccgataccagctcaggctccgtcaacccgacggccggatgcgagtgcgttcccggcgaaggctatgccgaaagttcttcccgcacgatcctggccccttcgctga

SEQ ID NO: 530456 - DNA, 501 bp, Stenotrophomonas maltophilia
atgcagaatttcaagaatgccttggcgttgctcgtggccgccggttgctgcgcggccccagacatggcgcacgcgttccagctggtcagagaagaggcagatgtcaggcttgtggatggcgcacccgcgatctgcatcccgaaaaaagcgaagggttcgttcccagtggccaacttgctactgttggagtactacacgctcgaatccgaaagctgggccatcagtctgaaggacgacgccaaaccaacgaagctaaagcctggcaattgcatttcatacggctcaacaccagacggctacgagcgggacgggcccgacgacaacagggagaattttcaactgaaattgaacacaacctattactttcaagcaacccgatacatttcaaatctctggcacctgcgtaccgcaatctatgaagccacattctgtctcaagacggaagccgatggagccctcagcattcacaagaaatcagcatgccccgacttcaacagatga

SEQ ID NO: 530457 - DNA, 702 bp, Stenotrophomonas maltophilia
gtggtcgatgtaaccatcaaagtccccacagagctcgaagcgatggaaatgcaagtcgtgtaccgatcaaagacttgcaccttcaccgactacactgcttccggaattccctatgatcgagacggctatcagcagatggacttgaagcccatccagcgggagcagagcagactgttcgaggctaaagtgccggtgaatggaggtggcacctgcaactggcaacttagcaatatcaccttcggcgcggagtacaaagacaccaccgcgtttggcgagggaattaaatccggctttcccgccggcatgattgtcatttttgatgacaaccgttcgcccaacggcagctgggatttcaaagttgacggggatctgaaagttgtacgggactactatccctggctcagtgagtcgttccttggaggccataggaggtcaatcagcctgaccacgaacgggcatttttaccttatttaccaggcacttcatgcccgcaacgtctatttcgaacccattcttcactcgaatttcttgacccggtcagttcatcccaaggtcaagcaaccgggcaaccgaaccgtcttccattaccccgatggcagtagttcgttcgaaacttacaccagtccgaatcacgcgaaattgcaggcaatccggatggctgccgaagcgcagcgccaggccccggccgattccgaagggtga

SEQ ID NO: 530458 - DNA, 639 bp, Stenotrophomonas maltophilia
atgctgaaatccctctcaacccttcctcatgttgcgttgatcgctttggtcacactagccgctgcgggctgcaacaaggaacgctcatacccggtctatcgggagaatcctgcgcccaaggatgcgctgccgattgtgattcgggtccacgatgcacccgtggacgtcccaactcccacgataaccgtcttgtacgagatcgactcgctttgcctccctccgatcaacaactacgagggcgtgcattacgaacccaaatggcattcagtcgagttcaaagcacagcgaataagcgacaccgagttcaccaccaccgtgttcaaagacgggatggcggtcgctgactattacggacgcggcccatgcaactggttaccaaacactctggaagcatcgtttccattgactattgatggacgcacaatctacgcaacagtcggcgcctctttccagagaattgaagacacgggaggttctacgacatacgtagagaaggaactaaaacctctcatcccagggcagacacctgaacgagcctggacgctgtccaagacgatgtttgacaagcgcccactcgcagaccgcccaaagtacttccccatagagatctccgcacggactgaaggagatgccccatga

SEQ ID NO: 530459 - DNA, 1242 bp, Stenotrophomonas maltophilia
gtggacagggaaatttggcgaatggggcgcaaggttgcgcgggagaaggggcgtcgctacaagaactgggagctggactttgtccgcggcctgcaccaggggcgggcattgagtagccttgccgctgatctgacgatttccacggggattcccgttcgccttatgtccatctggttggacaagaatgcttgggtgacgtggaaagattcggctggacatttggtgagccgtcgtgagctcgccgaccttgcggtggtagtgcgacagcccatggggggaaaggtcgcgcaatggatgtggcttctgcaggcaaagcggacgatgcatctcctcgattcatacgtcggcagcagcagtctccatgaactggacctgctgcatcgcatgcctgacttttcattgctggaaggcgatgggaaaacccgtcggctcattgctagcaatattgcgctggcgaacgagtttgcgattgggaagacgcctgccggcgtgtcgccttggccatgtccgggcgtggtgccctggacgtttttggatttcgatagcgacgtgaaggatgcaagctcggccgctcgcaatcatttcagcccggtgtcggctcgatggttgggaacgccgtctgctccagcgggaagttgggcagaacagtggttgagggctgggggcggcgccagtccgttgctggcgtcctacacggcctgcctgcttggcatcatctctgggcaacaggtggcctggcgccatccaggccatgcaagcgcgtgccgcaccttcgctccaggcgcaccgctggatccgtcggtctaccctcaatggcaccgcttgtataccgcgctgatgacgcgttccgtaggaggggtttcgggtcacgctaagtcgtcaggcaacccctccggctctgttcttcagttcagccagttgatggcccaagaagcatcgagcgtgcgctggttggactccgggttcgggttcccggactacaggcccgtgggatggctctctggggctcagtcctcgttcagcggccaatgggcgatcgcgggccttccagaacaagaggctcgagaatcactgcgaatgttcgatggcctggagacgtcgtcatggccggaagagatgctcgcgtccgagcaaaacaacgatggaggcgagcctcccgagatgagcgagtcggactcggatgatgggtacaacggcggaatgcaggtcttgttcgtcgatttgttgaggccgccaagatga

SEQ ID NO: 530460 - DNA, 591 bp, Stenotrophomonas maltophilia
atgagaatcatcctgtgcggggcagctgttggactgaccgccctgctgctgggcggcgcgatgtggtacggccgatggattccgtttgcccagcaatggccgctctttgaggcactgcgaacgaccgcggccatcatcttcgcggtcgttggcgcctggctagccattgtttacccagaccgcttgcggctttcgttgggagaaagcaagaaggctggcgaagaaagcggtgaacgctttcgcaggctgttcaccccgatcgcccactcgacaatgatcctcggcatagttctcgtcgccgggatcatcgtgcccatggcccggcaggtcccactggtgctgaggcatgtggaggcatcaagaacgatctctttcgtcattctggtcgccctgacgctatggcaggtgtggacggtgatcttgacgctggtgcttacggacatgatcaagtcccaggcggaccgcgagttcgcgcagaccacctccatgtcagctttgcgaggattggccagtaccgaaacgcctatcgacacagacgacgacacagacccctctccctcgttcggaaaggactccgatcaccctgcctga

SEQ ID NO: 530461 - DNA, 726 bp, Stenotrophomonas maltophilia
atgcatcttaacgacgtcaaagtgtgcaccattcccggctttcccaccttcttctggcagttgcctggcaatgaacttctcgcgaccctacgcatcgacagcccggtcaccgcacagggccccttccaggcctactgcgaacagttcctgaccacgcagtccacacaggcggtgcaactgccgcccgatcccgcagatcctgacgcaattaccgtctttggatatcgcaaggtcaaaacggacgagccaagctctcagttccatccccgtttcagaaccgctctctacagcaaaccgggtatcaacgatatcgtcgtcaagcgctacgatgatattcgaaaggtccatcggcggaccacgatcgagttcaagacggtcgagcagcgcagcgtttggcaaaagggacttggcctcatggggatgggtgcccccaagcaggcgccgcgaacggcaaaggtcaattccagtttgagcatgcggctgacaaagaaggaggttcaggagctcgtcgataattggggacagcgagcccaagacttggattgggacgactacggtttccagttcaaaggcgagagccgagtgaactggctcagcggggcgacggcgcgcggcgaggtccgcctggacggcatccgtagccaggatggatccatcaacacgaagacgctcttggagaagctcatgaggcggcgcacagctctactgaaagaactcctcgaatga

SEQ ID NO: 530462 - DNA, 2256 bp, Stenotrophomonas maltophilia
atgcaggacgacgatgccggcgccgaagtgttgttgagcgaggccaacgtcggaacacatccagaggccctggccatgctggcctgggtcttgggcggctcttctgggcagcgaatacgcgggggactcggaaattccgacgtggcgcaacgcgtggccgcacgtcgggcgcgagtcgaggcgctgctcaccgcagcgctcgcgccagagcgccccccaatgtttgccttcaacgcgttcttccaagtgatcggtacctacgcggaggcggtggtgccggaggctgctcgtgcacgcgagttgtaccccaattgggcactgccgcacgcgatcgttgcgaccaagcagcgcctagccggaaaattcgaccccaaactcctagacgacctgattcgtacgcttccgggagcacgccaggagaaggtcttccatgaggcctatgtccatgcgatgcacctggcgcagtggggggacgtagagcttgtgatggaaaagcttgaacagttggtgggccgcgatatgcagatcgatgatcgcaaccgcgcctcccttgcagagatgcgcgcaatgatggccctgcatcgagcgcgtactggcgagacagacgcctacgagactgtcttgaatcagcttgccgcgttcttacctggagtctcgccgacgaccgtcggccatgaccctaccgtagttgcgaagtttctcctgcaggtagcgctggagacgggtcagcaggatcgacttcgtgatgccgccgcgacgctagtctcgcttgcctgggacaggcacggtgaaagcggcgaggacctcgattgctggagtccctggatttctgcgcccggtctcgacggcgttttgcggttcgggcacttcggcttcgactttgtccggcgctggcacgagattgaggcccacctggacggccctgtgcgcgaacactggcgactgctgttggccgcagacgcgacgctacatctcgagcctgagcccgagcagatcgagtacctgcgcgcgactcccgcgcacggattgccatggtggatcagtcgagctatctacctggcacatgcagcccactcggatgacctgaccggagctggggcagtgctcgccgaactcgcggaaagggccgctgacgtcccgccagccgaagacgatcgatacaccacgcccttggaatcgctctacatcgatgtcgaaagcctcgaagacccgatagccctctttaacggagcactgggctggctgcgtgcgacaccaggcgcaacaggccagatgctcctggaacaatggggggcggaccttgcggagattgacggcggtaggactgttctagccagcatcgccacactctcgctgtcgcgtgccgattcacccatcgcacgtcagatgaaggaccttgccgagattccggatacgcccgagggaaagctggcagcagtactggcaggctatccacaaccggaatccacgcgcattcgtcctgaggagctgactctgcttgaagcggcgaccctgatcgcgctattgcgcgcgagtccgctcgatcacgtccgctggacgctggcacctctggctgaatctggtcagaggttcgaaccgaccaacaagttcattgggacgttctttggtttgatgaagaaaggggtactcgccccggacgcatcgacgcctgctggcgtcatgggtttcgacgagagcggtcgcctgaccgcatacctgacacgcgtggtgtggcgaatctccccgaacactctcgcattgcagcgtggtatccgcgacctgcctcaagcgcagtggccagaagcatggcgcgaccacgctgccgtcctcgctcgtgatctcggtgtcgaggagatggtgacataccttgaacatgtcctcaccgaccgcgacttgccgtccccgaacatggacgatgctcgcagcctgttccgcatgcagctggagcatctatcccttgcacagtgctactacctggcgcacaagacgatgcgggaggcgctggactatcaagcgcgctatcggcctggacgtgcacagctggaaacccgaataatcaatctgctgcgcggcaatggcgaacgtgcaatcgcgctccgctgggacacgcgctatgaccgcattcgcgagctgccctcgtcactactgtcggaagccctacacgatgtcctcacccgttggggacttgctgccttcaacgagccggtgatgacactagcgcttggtaataccgagatccctccgatacgccactga

SEQ ID NO: 530463 - DNA, 732 bp, Stenotrophomonas maltophilia
atgcggacgcaacaacggctgccgctggctcgtgccagcgacattcacgagcttcggcggctcatctcgcaactggacatcgaagtgcccctacgcacagagggacgacggtccgagcatgtggaacgctacgccatcgtccaattgctgctttcgatccctgcgtcacgctttcagtttcctctcttagtcgatcacggcgaccgtccggacttcctcatcactgatggccaaaaacgcatcgccatcgaacatgtcgaagccataacgaccaatgaggcgaagaagtcggcgtttcgcgagcagggcgatgacagccgcggacattttgtttcgcacgccaccccgggcgaacgggaaagatcgaccaagcgcctcttgaaggaaatcgaagccgacgaacctggcgatggatgggtcggtgatagccccgagcgagggtgggccgacgcgatggcctacttcgcccttgggaaggccgggtcggtcacccttcccggttatgacagaggtgatgaaacctggctcctgatctacgacaactggcctgttcctcacgtcgtccccgataccgccgcccgatacttcctaacggattcacggctgccagccatctttgccgtgttcggtcgtgtctacgtcctgaacggagtccggatgtgggagttcactgcggaccactatgaacatcacccgctgcactgccccaacgaagatggcagcactcgatag

SEQ ID NO: 530464 - DNA, 558 bp, Stenotrophomonas maltophilia
gtgagttcacagacaatcgacgagatgatccagaggtacgttgcctcaaccagtttcgcaatcaagttactgttcgatcagaagcttctgcatcactcgctcgtgatcatgtactccgcgatcgacacatgtggcctacttgatgcgcctgtcacgcaaacggaagcaacgggaacctcgttcaaagagtgggtcaagaagtacgtcctcgcagaatcggctcttgagttcaatgacgtagatctctgggccgcgcgctgcgcggttcttcacaccttcacgcccaaatcaaagctttctcaggcaggtggcgcacgtcagctgcactactacactggcgacgattcggatgcccatatccaaaagttcaccagcgagattagagccctcgataatgggaaacatctccctgtccattacggcgacctcgcgcaagccatcctgctaggcatgggaaaattcatgcttgacctagcagcgctgtgtgaagcagacgcaggctatgcggatcgtgtacgtgacatcattcaggtatacgagcggacgctcgccccttaa

SEQ ID NO: 530465 - DNA, 315 bp, Stenotrophomonas maltophilia
gtgctgccttcgccccgccttccggggaggcatctgacctttggggagcactacaaccgctggaagcggctgttaatggccgccggcgtcccgcatgtcggcacacatggcatgcggcaccgctcgacgacggacatcgccaactcgggcgtgccgaccaaggtcggcataaagctaaccggccataagaccgtctctcagttcatgcactacgtccacactgaggacaagccggtgcgggaggcggccgagctggtggcgaatcggcgcaagacgatcatcgaggcccggcggtccaccgtggtgtcggcatga

SEQ ID NO: 530466 - DNA, 1131 bp, Stenotrophomonas maltophilia
atgaagaaggtaggatctattttactgtcagattacgtggcggatacttcatccactgacgtccttggttctggagatttaaatgcggttcttcaggggctgtatggggaggtgggtgggataatggccaccgccaaaaagaatgtaagggatggagttgcgtatccaggatataagagggcggcagaagaagagtttggtgacacgctctggtatcttgctgcgatttgcaggcgcgttcagatccccttggaggagatatttgcggaagcggcgaatcattgcgattttaacagggtcggtgctgcaagcgacatagtcgagggctcgctagcttacattgctgttcccactagagaatcagcatcgttggatgccacgttggttcgtttggggcaatcagctgcctccctcctgggggctacgcccgcccgcgttgatctgatttcatttgcgagggcgtatctgcaggctattcacgctgccggcttggcgttctctgagatagcgcacggtaatataaagaaagtccgcggggcatttttggagccgacagtggaggagcttgctgttctcgatttcgatagtggcttcggaattgaggagcagcttccacgcgagtttaagattcgcgtgaatcagcggggtagtgggaaaagctatcttcagtggcagggtgtgtttattggagaccctctaaccgacaatattgcggatcaggatggctatcgtttccatgatgtattccatttttcctatgtggccatattgcattggtcgccagtaatacgatcattgatcaaacataagcgaaagagcagccccaagtacgatgaagagcaagatagtggtcgagcaatcgtcgtcgaagagggtgttacagcttggattttttcgaaggccaaggagctggatttcttccaggggcaagacaaggtgtcgcttggggtgttaaaatctattggagagttcgtaagtggctatgaagtggagaggtgccccttgaagctttgggaaaaggccattctcgatggctactccgtcttccggaaacttagggaaaacaaaggggggtggattgtaggaaatcgagatcgacgtactatcgaatacttgccacttgagccttag

SEQ ID NO: 530467 - DNA, 663 bp, Stenotrophomonas maltophilia
atgaagatccatcctttcgttgatgcagttgcgtcactgcatttcgaagactgcttcaatccctattcagaccgatgtgaagttcatgatcggcgcgatgcgccccgtcgccgggctgctacattgtcagcaatggtacatcgcgctgccaaggagccagtcgacgcaatatggatcgggagagatcttggttatcgcggaggcaggcgcacgggccttgcgttgactgatgatgtccatatggcacagcacgcaatgcgctggaacattgctcaaatgcctgagcgcccgaccgtgggcggcgcggtggcggagcgaactgcggctgtagtctgggatatgttggaaaatattgaagctcgaatatttctatggaatgtatttccgcttcatccgcacgaatcgggagatccgtttacgaatcgtcagcataatgcacgtgaaaggcgggctggcgaagaaatacttaagcagttgatcgtattgctgcgtcccgctcgtattgtcgcaataggaaatgatgctgctgctgcagttaaccggatcacagaatcggtgcctgtggtttgcgtaaggcatccgagctatggtgggcagactcagtttcagaggcaaatatctgaactttacggccacccaggtcgttcgggatcattgttttaa

SEQ ID NO: 530468 - DNA, 129 bp, Stenotrophomonas maltophilia
atggccgccccatatgatcttatgttcgcggataacagagataaaaagttccctcactgcgcattggatgaggaacgggttggcggtttcgtgataggcagcacgttcaataagtggaacgctagctga

SEQ ID NO: 530469 - DNA, 1194 bp, Stenotrophomonas maltophilia
ttggctcttccagagtcaaccgcgaaaaagagggatacttcaaggaacgttatgcccgctctctatcagctcgcaatgcttggcgcgccaacggatgctcagatccacgatattgaagaaatcgtcgatcaagcggtacgcgccttcaacctacgattggggtatgaagttggctgggaggtacgaccagcacaattcttgccaatccagcaacgctcctcggcagccgcattcttcggtggggctaatcctcctcttgggaatgtagcagaccttctcaaaaatggaataccggtcttaccggtcgctaccgacgtcactaaggtagggtccgagatacctgcggtccttcaaccccttaattgtatcgcctacgatgcgggtggcgcgcaacgcgtcgcgactgccctgcttgaatgtgcaggcctacttccccggcaacggagagtcttcctgagttaccgaagaagtgaagcgcgggaggcggcattgcagttgtatgatgccctttccgcccgcctgtttgacgtttttcttgatacgcatggaatcccgcctgccgaagattttcaaacgatgttatggcaccgcctttgtgattcagatgcgcttcttatgctggacactcccggatattttgagagccgctggacgagtgcagagttcgggcgagcacttgcaaagggcattagcgttttgcgcgttgggtggccggattgcacgccgtcggctcgcaccgctacggccagccgcgcggaactactgcccgaagaagtggattctgacaccggccgccttgcggacagtgcagttgagcgaatttgccttcaactcgaggaagttcgcagtcaaagccacgccgtcagatccgtaaacttgacaagcaatctgagcaacgcgattcagtccattggcgggcaactcaccggagtgggccccaacagagctatctacatccatcttcctgacgatcgtaacgtcgtggtgtaccccactgttggggtacccacatcgactacactgcacgacgcagccacaaactcaccggatcaatcggtcgccgttgtctatgaccacgttggcttacacccacgatggctaggtcacctggactggttaggccagcatattcatgcggcgcgctgggtgaaagccagcgaagccggctggcaatttgcagactgggaagcataa

SEQ ID NO: 530470 - DNA, 411 bp, Stenotrophomonas maltophilia
atgcctgaggcggccgtgtgggtcgtggcggccgttgccgtctatgctgtcggcgtggccatctacgccatcttctgttggccgtggtcccgcgcccagcgcgcgctgcgccgcttgcaaaagcatggggtgcccatccgctccctgcggcgggcggaggcgcgcgccctgcaattgatcgaatacccggcaggggcgccggtattcctgctggaaggtccgtgcgcggcgttcatcatcaggagcaggcatcctcctgcccagcgtgtgcagaccctggcaggcgtgccggtgaagtacccggcgggtctggaacgtgccgtgcgcgcgggcagcaacactgccgaagtggtcccggggcgcgagcacgcgatgatcgtgcggctcaatggggtcacgctggcggcgtag

SEQ ID NO: 530471 - DNA, 126 bp, Stenotrophomonas maltophilia
atgggctggggtattgcgtcctgcaccgtggaggtcgccgttagaggttcgcgtactgcgcgcgttgctagttactactttcctactaatgtgctggagcaaatccgtggcgaagcgaaggagtaa

SEQ ID NO: 530472 - DNA, 162 bp, Stenotrophomonas maltophilia
atggatttcaaagctggtgacgttgtaaagcttaagagtggaagcctgcggatgaccatcgcttgggttgaggacggcgaggcatggtgcgagtggtttgataccaagcacgagccacagggtcgccgatacgcggttgtgcttttgattcatgacaactga

SEQ ID NO: 530473 - DNA, 2415 bp, Stenotrophomonas maltophilia
atgatgggcagtcgaaaaggaaagggccggaagccggctcggaagcgacgggccgtgcccgatgaagtggccgagtttgggccgctccgactcgcgaggtttggaagtgacgtgtacacaactacgtcgtggggggaaggcgaacacgaacggtttctcgcagaccaggcggcagctctaccaagggtagtgggagaaattgacggcgcggttcggcgcgccgcagagattgcgcgaacgattgagcccctggcgctgctccatcgcgcttggtgggagtattcggcggcacatatcggtgtgaacgcggaagacgaaatcggccgcgagcaagtcatcgctactcgcatgatagattacgtgcaaagcctcattgccggggttccgaattactctggctcactggcgctgactgatgagatatgggaggagctgcgggcggctgttacattcattttcaccgcagtaaattccacttacgtgatcagcgaacaggcttcgcgcacccttgccggggagcaaattgatcacgaggccgaggtgatcaagcacatcgcccagctgacctggtgcaacatcagaggccgacagtacccctatcatcaagtcagggccattcgagacttgattgagcctcatgaggctcaaatcacggcagtttggggtgtctctgctaatcagctctgtgaaggtcttggcaacatctgggcgcccctgactacgggactaggcgatgagctcgcccggctcaacggatacagggaaaagtatggggcgcgaattgcaaacggcgtgacagtggatgaggagcacgaaccagagttatacgcttatgtaaaggatctaaaggaactgtttgaaggttacagacttttcgacgtccagtatctggcccagcttcctacggagctccttcgacagctgtcttggttgcccggagaagatcaggagttttttgccgatggggaattcgctggatggccatttcgcagttggccgatcttcaaaaggccattcattggagtagatggacgttactattgctttgactcaacatcgctttttgatcgcatatatagaatccttgagaaaattgtcttcgcgtcaggggcaaagaataagcaggattggatcgacatccgagcgagggttacggaggagttgccgtttcgatacttacttcaattgttacccgctgcgaaggtgtatcggtcggtttactacccgatcggacagggcgaaaagagccttgcagagctggatggcctgctcgcatgggacgaccatctattcttggtggaggtcaagtcggggtcctttacgccgacgtcgccgtaccttgaccctgtcgcattcactgaatcactgaaaactcttgtcggaaagccggcggaacaggggcgaagacttctaagctaccttcagagcaacagtgaatccccactattcgatagttcgcgccagcagatcggtgcactcagactgagtgactatcgtcatgtgtccatcctcgctgttagtctggactcgttcaccgaaattgctgcccaggcgaggcgtgcagcgtcccttggtgtaaatcttgggtcagatccgctttgggcgctctcgatcgacgatttgcgcgtatacgccgatgtttttagcgcgccggtcgagttcctgcacttcgttgagcagcgagctcttgcctcgcagtgtccatctcttgagctcaacgatgagttggatcacttgggactgtacctggagttcaatcactattcgacctacgccagccgaatggcagcgggcggggctagcctaatgttcagcggttacaggcacaacgtcgataagtacttcaacgcgctgctttgggaccccgacgccccgaatccgcttcgccagaagatgccggatcgactgcgtgagctgatagatcatgtgtcgccgaatgaactgccaggagtggctcgcatggtggcggcattgctagacctatcaggagaggctaggcagcaactgctcgaatacgttgatacggcgctagaggattggtcgcgagcccgaccgttctcgataggcggcgatgggtgcattaccctcagcgtgtggaagcacgactggaccgaagcggatctacaccaggctcttttggttgcacgcgccaattccctaatcgggagaagccgtggcaggttgtgcttgtgcttgcggtactcggcagagtctgctcttgtcgaagctcggtggagctttgttgatgaatcgcctgaagaactggaaagcgatcaagatacggcggaattggctgcgcacttcgtagatcgaagagtcggccaagcgagaggctcaggcaaaattggacgcaatgacctttgcccatgcggtagcggagataagtacaagaagtgttgtcttggaaggccttga

SEQ ID NO: 530474 - DNA, 378 bp, Stenotrophomonas maltophilia
atggcaaagccaagaacccccaccaagaaggcccgcgtatcgggcgccaccatcaaagatccaggccgttacaagaaccgttcggagccagccaatcccgcccccatcggccccccctacaagggcatgaccgcggctcaaatgcgcgtgtggaaggaatgcgccaccaacatgccttggcttaacgcggcacaccgcctgattctgcgccaggtgtgcatcttggctgcccgcatggacacgggcgaagacctcagcgtgtcatccacacacgcgctcagcgcgatgctctccaaactcggggccacgccgaccgatgagtcaaaggtcagtcacccgcaagatgaacatgaccacgatgagcgcttctttcactga

SEQ ID NO: 530475 - DNA, 216 bp, Stenotrophomonas maltophilia
gtgagcgcaatcatcatccccttcccgaatcgcagccggccgaagggttggcccgatggcgagctcgggctggcattggacggtttggctgacctgctgctgactatcggcaaccgcagtccaggaccccgagtgaccttggcgaaggcgcgcgaagcggcattgatcgcctaccgcgaacacgaatccatccaacagcggagcgactgcccatga

SEQ ID NO: 530476 - DNA, 360 bp, Stenotrophomonas maltophilia
atgacgcccatcgtacaccaaccactgccggccgcaatcgggcatttccccgctgcactgccggatttctctgacaccgcgcgctgggcccaggtgctggtgcaggacaacctcaatgccccgcgcttccagattggcgacgtgttgcacgtcgacctggcccgcgaccgcttctgcggcgacagccactacgcaatcgagataggcgggcagcagatggtccgtatcgttcaggcccgccccggtgggttgtggatcttccccgtgggccacccttccaccgcgtatcccgttgctcgggagctgctgaccatcctcggcgaagtgatgtacgccaccaccacacggagggtcggatga

SEQ ID NO: 530477 - DNA, 183 bp, Stenotrophomonas maltophilia
atgagtgctgcagggcgcggtgcgatgtattgcaatcgctggctgttgccaccgatgttttcccctcctttcgtactcgtggtcctcacagggcggaaggaagagcagatcaaggagatgcggcaggtacagggtgaggacgacgccccgtggcccgtcctcatgcaggcgagcgggccctga

SEQ ID NO: 530478 - DNA, 321 bp, Stenotrophomonas maltophilia
atggctgaccagctgctcaccgctgcacaggaccaatccgagccggtcgagtgcccctactaccacggccctgtgtgggacgcgttcgggctcacccgcgccgcctacctggtcgtcccgcgccggaccctgcagtccatgccgctggattggcagcagcgcttcgtcgcgctgatggacgaatcccacgcccacctgcctgccgaggctttccccgaatacaccgtgcggcgtctggacaacggcaaattcgtcgccgatccgctgcgtgactaccgccacaccggccccatcgctcccaaggattcctccaatggctga

SEQ ID NO: 530479 - DNA, 894 bp, Stenotrophomonas maltophilia
atgactgaaccttcgatcatcggccagacgccctcgcatgccccatgcaccaccgagctgcgacgtaatgcgcatgtgttggtactgcaggagctgcgcgcccgtttcacagatgccggcagcccgtcgcgcacagcggcactcgacgctgctatcgccgccctctccgcccagccctccccgggtggtcagggggatgcgcttctgagcatcatccagcaatgcgagtgggccgagaaccacaagcgcatgacggactactggcgaccccaattcgcagtaattcgacatgctgcggaagcggccctcgccgcccgccagccggtggaggctgtgccgcaaggctgcgatgcatgcgatcagactggcatccgccagaacgatgaaggccgcaacatctgctgcccggattgcgacttgggcaggtcctgcgctggcgatacccgccagccggagggggagacggtgggcgatgatgcggccagcgaggcgttcggcgagttcgccgacgactacctgacggacggcaacggctatgcgccggcatccacctatgcggcttgcagcaaggcattcactgcggcatggccggatcgtgccgccgctaccgccgcagcgcgagccgaactgaagcgcctgcacggggatgaccgcacagtgggcgcgcgccgcgccgaggctctgaatcgtgctgccgcacgcgacgatgccgaagacgacgccgccccgcccgcccagggcgtggacctggacgaactccgcgaaatgctggtcggctggaagaacagcaactacccgttctcctatgaggggcagtgcgcacagcgagcgctgaacgcgtgcatcgcagacctgaagggctggctcgacagccaggcggtgggcaatggctga

SEQ ID NO: 530480 - DNA, 504 bp, Stenotrophomonas maltophilia
atgaaacagcctcagcacagtgtcgccccacctgaaaccaccattcccgacagtgcggtcgaagctttccgtggtgcatatgctacccacggcacccagaagggctacgccgatgccatccgtgccggcctggccgctgcagcgccgctgatcagccaggacgcgatgctctcgcttgaacaagatgcgcagggatacctggtgcgccagctggacctggcgctgaatggtgaaaccgctgcagcgcgcacgccccagctggctgatcttctgagccagtgccagtgcgaggcgcgtcgcaggaacggcccagtactgacgaccataccgggcagcgctgtggcccacgtgcgcaggatctacatggaactggctgacagcgcgcgcacgctcagcgaatcggcgatggccatgagcgacaagacggtccgcgaactggtggctgcgaagctttccgcaggcatccgcgagcgcgcatccgagaaggtagccggccatgactga

SEQ ID NO: 530481 - DNA, 426 bp, Stenotrophomonas maltophilia
atgaaactgccaattgtcctcgtcgcccttatagctactgcccctgctgcgcatgccaaatctctcaaggatgatgcgttctttcaggccgcgcgcaaggcgaccttttactgcgaactcgcgtcaagcgatcttgcgttcgcaaagcagtacaacgctgtccctccagccgaagatcggcaaaaggtccttgattgtctgaccgatgctcgtcagaacctgctttccgcgcttaaggcgattcccaccgatacaggctcaaacgcactcagggaggctgccaagcgggtgtactcaacctgggacccatacagttctttcctggtgcgaggcgtcggttcacgagaggtcgaacgttcggcccccgcgcaggagtatcgacaggcattggcctcctatcagaccgaagttgagctagctgaataa

SEQ ID NO: 530482 - DNA, 345 bp, Stenotrophomonas maltophilia
atgagcgcgccgacccgccgtggaaccatggaagagctgcgcagcaggttggacctgctgcgcggccagcaacttgctcttgaagaggcctcggaaaagtgcccgattgagcgagcgcgtaagcaagcggagtcaagacatgcgctgatgaagggggcacagatcaattcttcgaccacgacaaccgctgacgatgcggacggcgaaatcgcgtcggctgctgcctcggcggagcagagcgtcgaaagtctgttgctcaggatcgccgaggcacttgagcggatcgacgcacgccaagccgcagcatgccgccccgactttaagtcgctgagtactcgtcgatga

SEQ ID NO: 530483 - DNA, 225 bp, Stenotrophomonas maltophilia
atggaaactcagttgctaagggacattcgagcgcttttgatttcgaagcgagcaagggaactgcaggcgtatccagatctcgccaaggtggaaggcgatgtgcaggtgaccgtcggcttcgatggtcgcgaagtgcgcacgctgacgttggatgcagcattgcggctggccgtcatcgagatggagaacgcgcgcgaagtcatcgacgagtactcagcgacttaa

SEQ ID NO: 530484 - DNA, 327 bp, Stenotrophomonas maltophilia
atgagcggcggtgcaatggtgagctgggcaatcgcggttgtcggcgagttcgacagtgccggtcgtcggatccccgagagtgtggtgccgctgctgcccatggttgaggtggtcctctgggccaaagaacaagcgcagccgctacgcgttgatgcgctgcaggagcgattcggtctgtcgcgcgcaaccgcgtatcgctggctgctcgcgctgcaggacctgaacgatccggcgtcagcgaagcggcggcttcccagccttcggcagctgagcactgcgctgggacgtgaggttcccgcatcgggccacgcggaggttgcaggatga

SEQ ID NO: 530485 - DNA, 387 bp, Stenotrophomonas maltophilia
atgagcatcagtccgaccctcggcctgcgctgtggctccgcgcgatgcgcgtcaccagccgagcgtgaagcagccgtagtgcccgttgccgccgtgtcggcgggaaaggtgtcacggcgcagcgcgccgcagcacgcccttgctggctacaacaccaccaggatcgtaatggagttcatgcgctgggtagtcgagcgccgtgagtttccgaccgtggaagccatagtgcggcacttcggcgtgagccgcgccacggcgtaccgctggcgcaacagcctgggcgaaacgtaccggctggagacgctgccgcccaacgagcatgacctgatcagatatggcagtccaggcacggcgtcatgcggcaagcacggtgccggggaaccctga

SEQ ID NO: 530486 - DNA, 1005 bp, Stenotrophomonas maltophilia
atgatctatttcgagatgtaccccggcgactacctaaaggacaccacccggctgtccctgaccgaccacggcgtctacttcaagctgatgctggcctactactcagaagagcaggcactgccagagagcttgcccgagctgtacgtcatcgccggcgctatcactacgggcgaaaaagccgcagtaaagaaggtcgccgagcgctacttccccttggctgaggatggcctgcgtcacagcaagcgctgtgatgagcagatcgcaacggcccaagcccgcattgctgacggacaggggcgcagggaagacaggaaggccgccgaggcggaaaggcaggcgcgcacgcgcgcgcgacggacgatgctgttcgaagacctgcgcaacgttggtgtcgtgccgagcggcatggccaccatggcggaattgaaggcgttgcacgtcacgcacgtgaccggagacgaaggcgtgacattggacaagctgtcacgcgtgacaagtcacggagagtcacgcgtggcagggggtgtgaacacaggtgtgaacacgggtaaccagaccccagaccccacttcttctactccagatacatcacagcactctcaaggatctctgagcggtgtgaccgacgcggggcgtgcgtgcctgctgatgcggaagggcggttgccattcgaccaacccaagccatcccgaccttctggcggcgctggccgagggcgtgaccccggagacactggggcatacggccgctgaaggattggcgcgatcgccaccggtttcgaacccgttctcttgggcgatcaggaccgcccgcaaccgacacgcagccggcgcagcgccgacgaacaccaccaatcccggaggccccaatgcaaaccctcaactcggttctgccgaacacgtcgcagagcagcggcgactccacgaacagcgcgcggcagctggcagctttggcggaccaggcggcgatgtcatcgacggcgaattccacttcgtccagcactga

SEQ ID NO: 530487 - DNA, 492 bp, Stenotrophomonas maltophilia
atgggcgagaaagcgcatggcggggtgtacgactgcaatggtcgctgggccctcgggcgatgctacgtgtatgtgctgatggcccgcgacgcgcaaggccctatgtacgtgaagataggagtaagcgacgatccctactcacggatcggcgctatccagacggggtgtccaatcccgttggtcaaggcggccatggtcaagtgcatgagccgcgcccaggccaggttgatagagaaggaactccacgtagaactggcgccgtttggttccaacggggagtggttccgtttcgattgggctgatgtggcgcacaagcaggcacttaacgtcgccatcgaggcacatatgtccagaatcaaggactgggcgcttgaggatgtggacctgcagaaggtcttcgccatgaagcgtcttatcgaggcgcatcggaagaatgcgtatcgcgagaaacgccggcgcgcgacagctgttagggcagcagtcggaatctga

SEQ ID NO: 530488 - DNA, 2796 bp, Stenotrophomonas maltophilia
atggctgagccatctgccaacctgcgggtccgtatcagcgcggacttggccgacattcgtcagggtctgggcgtgctgaccaggcagctacgcgaagtgcgcggcgaggccagccggccgttgccgacgaagaacccaatttctgacctcgggatctctgcgggccagacggcacaggccatgcgtcagcttccggcgcagttcaccgacatcttcaccagcctgcagggcggcatgcccttcttcaccgtgctggtgcagcaaggcggccagatcaaggacagcttcggcggtgtggagccggcattgaagggggtgtcgtcagcgctgcttggaatggtgaacccgtacacagtcgcggcggcagctgtcggtctggtggtctatgcgtggtatgacgcggaacagcaggcccaagcctacacaaaggccctggtgctatcgcgcaatgaagcggcagcaaccactctgacgctggtcgatatggcaagaaagaccagtgacgcgctgcaagtatcagctggcgcaggagcagaggcggcacaggcggttggatcgaacggaaagatcgcagcgaagaaccttcaggatgtagccaacgcggcggttgccatgagggaggtcagcggccaggcgctggaagacaccatcgccctctatgcgaagctggccgaagacccggtcaagggagcgcagaagctcaacgaacaggtcaatttcatgaccgtggcgctttacgagcaggtgaaagcgctgcaagagcagggtcgaaaccaggatgcagtgaccgtaatcacccgtgctgctgccgatgagacggtgatggccatggttaaggtgcgcgccagccaaaatcaggtaattcgtggtttcaaggatctgtgggccgaagccaccaaggcctggtctgctatgcaggcgaacgtaggcctcgggccggcagcagcccagatgcagcacctgcttgccgagaatcagcgagagctggcgaagctgaacgatctggccaacggcacacagcgaggcctgcccttggcgaggaacccgatcgcgctcgcggcgatggagaagtcgatcaaggatcgatcggacaagatcaaggcgcttgccacagacctgatcaaggagcgcaaggacgccgaggtgaaggctgcagaagatgcaagcgttgaattcctgcaacgcagtgatgccatcatcgattcacaggcaagcaaggagcagaagaagaaagacgagatcgctcgaattaatggagaggcggagaaggctcgtctccaggccgaagctgctggcctgatcgaacaggtcaatctgatcgaggggcgcagagcggaagccgttgcggcgatcgagaaaaagtacaaggagaagaccaagtcgggtaacggttccgctgcacgcatcgcaggccttcaggggtataaggatgacctggtgcaagagcaggccaccattgcggccagcacccagactcttcgtgcacagtatgccgcgcggcagatcactgccgaggcctactacagccgcatgcgggagctgacccaggccggcaccgacgccgatgtccgctctcttgaggctcagatttctttcctgagccggcagaacgtggccggcaaggaggggatcaccgtcaagcgccagctgggagagcttgaggcaaggctggccaaggtgcgcactgagggggcagcaaagctgcaggtgctgacgactgaggaagagcgtgcgacgaagacacgcaaagctgcgatcgacgcatacaccgacgcacttgaggccagcaacgtggccctccggcgccacctggaaacacgcgttgcccaggtcggcatgggagatcgcgagtatgagattcagcagcgcatcaacgacgcctatgacgacaaggccgaaaagctgaggcagctcacgctgcagcgcaatgcggatcagatcgacgattccaccttcgaagaagagaaggcgatcctgctggccaagacattggatcgcgtgcaggccattcgcgatggatatgtagagcttcagtctgccgagagcaactggctgctcggtgctgccagtgcatgggagaactaccgccagcaggccagcaacgccgcgcagcagatgggcggcgttgtcggatcggtgttcagtggcctcgaagacgtgtgggtgaagttcacgcagaccggaaaggtcagcttctcggacttgacccgctcggttttggccgacctggcacgtatccagctccgacaggccctgaccggtatgggcggatcgtggatgagtggggtactcggcgcgctcagcggtgggctgaacactactggcaatgcggccgtgacaatgggtaccagcagcatcaacgatgagttgttccagaagatgcgaggcttcacgccgcggggcttcaccgtcggtggctacaccggcccaggtggcgtgaatgagcctgccgggatcgtgcacaagggcgaggtggtctggtcgcaagctgacattgcacgtgcgggcggcctaggcgtggttgaggccatgcggcgcgggctgcgtggctatgcggagggcgggctggtcggagctatgggcactggcggcccgattggtggagcagtgaacatcaaagtgtctaacgcccccgcaggcaccacagctactgcctcgcgcaatggcagcggagggctcgacattgacgtgttgctgggtcaggtcgaccagttcattggtgggcggattgctggtggcacgggatcctcgtactcggcaatcaagggccgcttcggtttgggggattcgatctga

SEQ ID NO: 530489 - DNA, 7467 bp, Stenotrophomonas maltophilia
atgggcctgatgctcccgtccaccgatcccggccgtctgatcatcaccccgcatccggtgatgctcgatggccagcagaacctggaagcggacctgcgcccgggtgagagcctgtatggcttccttgcgcgccacgtgcatgggctggacgggcaggcgtggctcgtcaccatcggcggccggcccgtggagcggcacctgtggtgccacgtctatccgaagcacggccaggtaatcgagatccggggcttggtcggcaggagtgcgatccgccttgtggccatgatcgcgctgacctacttcacgctgggtggcgcggctattgccggtttcagcatcggcacgtccaccgtgctcggcacggccatcgcgcgcgtggcggtctacgtggccggcagcatcctgatcaacaaggtgctggggccgaaactgcccaaggctgccgagatcacccccgccgataccgtcttctccctgtcggccccgcgcaaccggtcgcgcgcctacgaacccctgccgctgctcttcggcagcgtgcgtattgcgcctgacgtggccagcaagccctacatgaactatgagggcgatgagcagtacctgtcgctgctgctgacccctgggctcaacgtgggccgcgtcgaagcgatctacaacggtgatgcgctgctgagcagctacgagggcgtgcaggtctggtacaacggcttcccgggcatgcccaaccaagccatcccgctctacagcaacgccggaagtgtcgacggcggcgtgatctatgacaccagcagcgatccgaagcacaccccgagcaagtgggtgcagcgcaccagctcgccgggcgcaatccgtctgcaggtgaacatcgacttccggatcttcgacgccgactcgaagggccgcgagtacgaaaatcgcgagcagatccagatccagtaccgtgccgtgggccagagcgcttggcgcccgtttggcacctacgccgtgtccggccggacgcagaagtcgcgtcgggccacctacgggctggacgtggccccgggccagtacgaggtgcaggtgcgcaccatgggccagaacaccgacggcaacaatgcgcaggccagcttcacctggaccaacctggtcagcgtgctgccggataccgccagttacgacggcattccgcgcatcggcatccgcatgaaggcgtccggacagctcaacggcagtccggacgaggtgcgcactgtagcgcatgcgcagccgatcccggtgtggaagggtgacgccattggctgggtcaccgaagagagcagcaaccccggtgcacagatcctggcctacgcccgcggcatcaagtcgccggcgggcgtccgcatcgccggcatgggcctgcccgacagccagatagacgtggaggcgctgaaagccttcatgctgcactgtgcggccaatggcttcacctacgattatctggttaccgacaagcgcaatcaccaggcggtgatggatgcgatcgcgctggctgggttcggccagatcgcctggccgaagggccggctggccgtgacgtgggccgccgacgagcagccgctgtcgggcgtggtcaacatggccaccatcaagaaggggcagttccaggtcgagtacacgctggccaacggtgccgacggcatcgagtacagctacctggaccgcgccacgtgggaggccaggaccctgcgcgttccggcgccgggcgtgaccaccatgctcaatccggcgcaggtgaccggcgagggcgtgaccagcgaggcgcatgcggccacgcttgcgcgctggcacctggcgcagagcctgtaccagtacaagtcgatcagctacagcaccgatatcgagcacctggcctatgggcgcatgtcggtgctggcgctgcagcacgatctgacgcagtggggctttggtggccaggtgctgtcggccaccatggggccggggcgcgccgtgacgctgcaactcgacgtgccggtgccaggccgtgcgcaggccagcgcctacatcggcctgcgcatccccggtgaacgggtgtaccgcgtgctgaaggtggtgccgttcaccggcgaaagcgatcagctgcagctggccgatccgtggccggccgacgccgcgctgccgggggacagcgacggaaatcccgcgtgggacaccatctggatctacgacttcaagcagacgccgggctaccgcgtccgcgtggtgtccgtccagccggagaatgacctcaagggcgccgcggtcgacgtggtggccgaggggccggagttctggcactacgtcaaaaccggtcagtacattccgccggagaacggctcgcagctggccacccggccggtggccagcaatctgcgtatcaccgagcgccaggtggtgcagggcgatacggtgttctccgagctgcaggcctcgttcgatatcaccggtccggtgggcgagatccgcgtgctgtcggacctggaccagaacgctgagctggagcaggtggcgtccaccactgcacgctcggcgagctggcgcattccccgtgccggcgtgtacccgatcaccgtgcgcccctacagcccggagggccaggccggcgtggcggcgaccgtgacgtatgccacgcagggtgccgacgtgccgccggtgctggtggacatgttcgacgtggaggaacgcagcggcggtatccggctctatacctggggctggctgggcgatacgacgcggtcggccgacttcgccggcgtcgagatccgctacatgcccgggaaggtggccgcccccgactggaacgcgatgacgccagtgggggagacggggtatcacaccgcgcccttcgaggctgtcatccccaagtccggcgactggaccttcgcctgccgcagcgtgaacacctcgggcgagctgtccgtcgacgcgcggattgtgatgcgctcgcttggcaccaatctcggcgaggtgatcggcgagatcggcgagagccttgaggagcagactcggcggcaggtggaacagcagcggcagatcgaccaggagaagctcgaccggatcaacgcagacgcggccgaagcgcaggcgcgtgccgccgccattgcccaggaaaccgcgttccgtgtggcggccgtgcagcaggtcgccgacgatctggtagtgaccaacaacgcgttgggtcaggagaagatcgaacgcgccaacgcgatcttgaacgagaagcttgaacgagaggcgtcggtcgagaacttggcgaccaccacgcagacgcagttcgagtcggtggcacagcagatcggtagcgttgctgcaggcagtggcacgcagttcgacagcgcaaaaatctggctgttcaacacgaccgtcgaaggttggaccagcaacggcacgccgactgtcgttgacggtatgctgcgcccggccaacagtaccaccgcttacgcacagtcgcctgcagggctggctatcgatagcaacgcctatcgcttcatcaagacgcgcatcaagagagttggcacgccgccgtggcgtggtctggtgcgctggatcaccgatgctgatcagacctgggatgacaccaaatctttgctcattgccgagcccagcttcgatgccaacggcatcgccactgtcgatatttccgacattccctggaatggttcctcgccaatccgcgctgttcgcatggccttggtcattgtgcagacggctgcaagttacctgctgtacgactacgtagcggttggccggccgtcgccgggcgcgtcggtggcgctggtgcaggaagtgcagaccgcgctgcagcaggctgaccaggttatcgccaggagcgtcaccacgctgggcgtgcagatgcgagggcagtacaccggcaccgatccggcacagctgaccagcggcctgatgtatcaggagatgcaggcgcgggtgactgccgacctggcacaggtgcagcgtatcttcgccatggaatcgcggatgccgaccggaagcggccagctggcttctgaggcgcgcgtcaatgcgctgcaggaagcgacgaccagcacgaccaatgccctggcgcagtcgatcaccaccatcaacgccaatctcccggcgatgatcgcgcagggcagcaacatggttctgaacggtggctgggatcagggtgacaacgttggttggtcctacagcaacttggcaggcgtgagcatcgttgccgaaggccgcagcggcaagtgtttgaaggtcgacgctcccagcggtagccgtagcgttatcgccaatggtgctgctgatcgaaacatgtcggtcatcgtcgggaaaaagtaccgcgtcagtgcgtactacaagaccgatgcggcgtacaacggcaccagcgataacgggaaggtgcgtatcgccaatcaaaatgatggattgatcgctgggcttggattccttgctaaccgtaccgactggacgcgtctggaaaccgtacttaccgcaaccacgatcagcgctctgcgcgtttacatcaataccaaccacaccgcaggaactctgtgggtggatgacgtgacggttgaggaagtcaccgatgttctggccaacgccgaaggactgcaggcgctgaccaccaccgttaacaaccaaggagggcagatcagcagccaagctgggttgatcagcgcgctgcgcaccgatgtggacggcaaggcaagcaacgccgcgctgcagtcgctgcagtcgcaggtgacgctacagggcaacgacatcaccagccttggcacagcgatgaccaatgtcaccgcatcgttgggcaacgtgggatctgacaaccagctggccaacagcagctttgaggtcgaaacgccaagccctgctgctgtgccaggctggtcgaacaatagcggcggtatgacgggtcaggtcagccgtcgcctttgggcagcctccacactgccgggttccacccgcgcgtggcgatgggaactggacaatgtacccaccacgtcctatctggaagccgtcagcaacggagcgttgaaaaccgccaaggttgtgccgggtcagaagcacacgttgtccacctacgtgcgcggtacgccaggtgcgcggtacttcctgcagattgcatgggttgacgccggtggcagcaccatctcctacaccggcctgggtggtattcagacactgagtagtgagacttgggagcgcaagaccttcaccagttcggcagcggcaccttccaacgctgtgcgtgccaacgcgtatctgcgcatctacggcaacaacaccatgggccagtacgttgagtgggacaacgtgcagctggaagtcggtgacgttgcaagcgggtatagggcgtccatggaggaggtgcagctgcagacggctgccaacgcggcagccaccagcacgctgaccggcactgtcaccaatctgcagggcaccgtcactgcgctcggtcagtcggttaccacggtcaatgccaaccttgagcaggccaatcgcgctggcagcaacatgttcattgatggcagctttgaagctgcagcagtgggcaagacctttggtagctacgccaaggttgtcggggacggtcgcacgggttcacgttcgttgagcatgacgctcgatgggggtggaactcgctcggcacctctgcagacgttcgacgtaacgcctgggcgtgtctattacgctgaaacgtgggtcaggcgcgtaggtacaaacacggccggtagtgtgcagctgcgaatggctcaaagcttgaacaacaccaacctgagctatcccaattttgctacatcgagcgtcgccaacattccgtctgactcttacgtcaagatcagcggttacctgaccatccctgccgacaagaatcaggcggtgttgcaggtggctgtggtgagcagtgccaacaacggtacgtcgatccagtttgatgacatcgtgctgcaggatgtgacggaggcatataacgctacgcaaaccgccaatgctgcggccaatggcgtgagcgccatgcaggccactgtcacccagcaagggcaggacatcactgcacaggccagcaagctcgatagcgttcaatccttgattgaaggtaaggcagacgcatcggctatgattgaactcgcaaccagggtcgccaatcaaagcggggctggcaacaagctgtccgcgtccacctttgcggatgctgtgggcggtactacgactggctggttcctcgaagccgacacttctggcgcacagcaaaagagcggctatatccagggtgactccgatgctggcgtgcctaccgggatgcgcgccctgatcatcaccaagggaggtacgtcaaacggtacgggcgcgcttatctggcgcaacacaggtgacatccccgttgagcctggcaagacctacatcgcatccgtctatgccagcggaaccagcggtgtggcttttgtatgggtcaccggtggcggcatggaggcggcatcgggttatgccagtaagggcggtggcaacaagctcagtgactatgatcgcgtgttcgtcaagttcactgcgcctgcgaacgtccgagctgtcgggttccgtctggcgatgaatccaaaagctgcggctggccaacagttcgcacgcttcgttcgcccgatgtttgaagaagtgtcgccagaccagaatgagccgtctccatggtctgcaggtggccaggagtcatttgctgggatctcgatgttcactaatgttgatggtcacatcagcggtatccagaacaagaacaacggttcgacttcggaactcaacttcctggccagcgcggtgaacatcctcacgcccggcggtgctgacgggtttgagctgaccaagggctacctgcgcgtgtggtcgggcaattcccagcgaatcatcgggaacaacttcggtgccgatggcctggtggattacttcggccccaacgtgggtgctgccaatgccaacaagaccaacgccaccatgtggatggatcgggacggcaatgcttactggggcggtgctattgccgccggcatccttcgcaatgcggcgcagtccacgaccacgcaaaccatcggtaacagcgtgctggtgggaccgttcgataccaacgggcgcaacaagcaggtggtggtcggctacaaccgacgccacacgcgcatcagcaacgcgattggccctgacggtttcgttgcaggtgcaggtagcaacagcggcgtgattaacctgtatcgccagttgaacggccagaacgagacgttgtggcagcagatcccaatcagcgggcgagtggatatcttcaacgagcctgacaccagcgatcgagccgtctcgtactggtcggcatcggtcacgctcaacgacagcagtgacggagccacgcgccgcagctatcgcgctgagatcgtgagctactccgagcaaagtgtcactcaccagtccgggtcattcaccagccagacgatcacccagagtttgtcgatcgtgtctatcgagcagtag

SEQ ID NO: 530490 - DNA, 876 bp, Stenotrophomonas maltophilia
ttggcgagcaaacacctctacatcgcagtggcagccgccacatccatcgcaatcgtcgcgttcgcaattgcctacccgccgaacagcgaggtctcatcgaagggcgaagttgaacacgaagccccggtacccgctctccccttccagcggaacggcagcgagggccctggccacaatgctgcagcgtcacagattccattggggcgcaaggcgttccggattgagatgacgcaacccgatttcaacggcgatgccgtggatttcatcgacgcacagttgtcgaactcgaaagcgggagatgggcacgccagctatcagatacattcgcgggtttccagctgcaagcaagcgctcgaccctggcgatgacgaagagtacagagcgtatgcgtcaatcggcctcggcgagggattctccagacgagttgaacgggaaatagaggactgccggggcctgaccgcgagaaaggacatcctggatgtgaactggctcgcattggcagccgcgcagggatcgatcgaagggcggctcgtttacgcacagaacccgcgcgcggtcattggcactttgggtgacgttctctcagaccctgaaaggttggtcgagtatcgccagaacgcagtgagctacctggaggactctgcgtcgcgcggcaacgtcgattccattgaagccctcgcgaacatctacgcgagaggaatcatcgccgggagatccacagagaagagcctcgcctactggatggccctgcatcgagcaaaccctactgaatactcgacggaatccgtaaacaggttgtccacgggcatggacgcagaccaatttgcccgctcgcagaacctatccaatgcgatctaccagtcatgctgcgaatga

SEQ ID NO: 530491 - DNA, 813 bp, Stenotrophomonas maltophilia
atgagtaaccgaccgctcagggtactgctcactgggggaacccgcgggctaggcaggtgcatggcggatgttcttctgcggcagggatatcaggtgacgatctgctcacggtcggcatgcgccgagcatggacgtaggtttaagggctaccgcgtggacctttcaagccgggcttccattgatcgcatgctgagctcttggcaagaaggcgcattcgatgtgctgatcaacaacgcgggcgccatgttctgggaagccggaagtagcgatgagggcatggaacggaccgtggcactgaactatcttggtccggtgtacctgactctgaggcttcttcagcagaagcattcgttgagggtcatcaacataggatctgcgctgatgcgccaagagccgctgccagagcgatggtggcaactaaccacgcactacgacatggcagagcgctatgctctctccaaagcgctacttgcatcgtttacggcgaccctactggataggggtgctgccgcgcgctgcgtggatccaggcttgctgcggaccgatctcgggggaggaagtggtgtgctgtccacggttggtcgagcgctcacgtcattgttcggtcaattgcctgaggccgtagccgaggccgtgattgaggctggtttggaactcggcaacgaagattgcggctttcgcgcaatctcgcgacgctgtactcgtttgccgatgattgtcaaggaccgcaatcagagggctgcattgttcgcaacgacccggtcgctgctccataggtccatgctgcctccgggtgaaagtacacaatgttga

SEQ ID NO: 530492 - DNA, 840 bp, Stenotrophomonas maltophilia
atgtttcagcatatcgcccgatattgggccgcgggcttcttcctgctgaacctgatgctgcttggcgcaaggatcgcgcagatcattgatgcggcgttccattacgcggcaatggcattgctgctatcagccagtgtggtggttcgcaagcgagcgtcgggattgtccttcatacactttgtcatgcgctggttggctgacagcggtcgcttgctgctcggcctggtgcagctggagcggcgcgtgcactgctcgctcctgggcaggttcgcttggatggagtcggcatctgatggggatgatcaggtattcggcttcatcacggccgtggactatcacgggacctttgtgctgatggttctcgtggtcctgatagaggcgccctttgctcatctgctcgtgtacgtctttatcgagggcgaaagaggcttcgttcttcactttgtccttgcgtatatcaatttctacggactgatatggatggtagcggaccgtcgtgctgtcggacgctcgtcacatcgcctttcaggcaggaggttgcacgtgcagatgggatggaggtccagcatcgaaattcgaactgaggatatacgcggtgcagccctgctgcagtcgaacctccgaaactgggcgagatcaagaatggttgatcgacaggatctggcagttatttctccattggacgcaccgaacatcgtgctggaggtggagagcggcgatacctaccaaggtctcctgtgcagcaaaccgattccccgctatctggcacttttcgttgacaagccgcagctgttgaaatctgcggttgaaagcacaatgagtgtggcgcgacatgagtaa

SEQ ID NO: 530493 - DNA, 891 bp, Stenotrophomonas maltophilia
atggcgctgacaatacatgaagaaagttgtcaaaaaatagaaatgcaggagtttgtcgaagtatgtaattcgcagatggatccggatgatgaggatagtgtcattgcgatggcttcttggttgaggaagctctccaacaacaagtctattctgattgatcacatcaacacgaatctccgcgattccacttgggcagatcgattgggaggctatagctcgcaatccttcgtgttggaaacaatggcgaatgcattcattcgcgtcaacgtatgggaaaagtcaagggagtacgatggcgataccttctgggaagacgctctgtactcctatgggttgtcgcacaatcataatttccaactgctgactgcaggttattgggggccgggataccgtaccgaaattcacgagatcgatccggagggaatcgttggctatgccggtgaaagagtgtgcatcagatttctggagcataccggtctacccgaggggaaagtgatgtactaccgacgcagccgggatgtacacaaccagattgccccagaagagttctccatctcgctgaacctgatgcctgcggatcgcctcattgcaacaaccgagcagttcgagtttgatgtacgcaacggtcgaatcaagggaatcatcggcaaccaagtggaagccaccgtaagtctgttgaccgtggcgaagaacattggggaccacagaacggcggatctatgtgtgcgattggccgcagtttcgcccaatccacgggcccggctagccgcagtggacgcgagtgctgcgctgcttcccagcgaggcttgcggtctctggcagggtgcgctcaaggatgccagtgagttggtgaggctgcacgccagggcgatggttgagacgatttgctga

SEQ ID NO: 530494 - DNA, 876 bp, Stenotrophomonas maltophilia
atggaaatcattgggaagcgcagcgccgctcagctgccacaattctcgcaattgcttgaggttatggagaatgatcatattgattcgaatgaatcatttgatatttccctatatataggtgattttgagcgcgcagtgaagtcgggcgaaatcgtcagcatcttcaacgatgaactggtcaagatgtgtcgttctcctggtcaaggaccggaagcggtttccggtagcgtatttgcggtggcggagtcaagtaattttgtgatttcgctggccgtacttggcagacaagtctgccgaagtgaacagatcttcaccctgccgaatgatgcactggtgagcaatctcggtcattcagactttacggggcgcctgcatacgctgccggctgacttcaaatgggactgcttcgataaaggggcgcgattctccgcctgccaagagtttacgttgggaagttcccatgtcgctgcatgggaaagttcaaagcatgctgttgagtacacctcaccacatgaaatagttctactgaaacttaaccgaaaaagatcgcagtccattcagtggtgctttgatcgaaaaaccctgaagcctttgctggctgcggcttgcgcgacattgcccagtcgtctgcaggtggcagcgagagtgatgatggagatggagccggcgatgtgtctccagcagaaggagcgctgcgtcgaaggtctccgtcgccttctttcccacgaattgcacttcgtccggtgggcaatgatgcagtcattgttctcgctcagtgacgttacacctctgagcgagttgcagcgaatggctttggatgatcctcatccacatgtccgagaggcggcaaggcacgtgcttgaggcagcggaatga

SEQ ID NO: 530495 - DNA, 186 bp, Stenotrophomonas maltophilia
atgatcctgtcgattctggatgctgcggcaagtcctgcagatctggccatgccagggctgcgactgcacccgctgcgtggaatgctgaagggatactggtccgtctgggtcaatggaaactggcgcattactttccgctttgtcggtagtcatgtggaactgctcaactatctggactatcactga

SEQ ID NO: 530496 - DNA, 543 bp, Stenotrophomonas maltophilia
atggatcgttcttcactgctgcttgctgtactcgttgcctcggtcatcccgatggcctacgccgcagaaccggccgctcgacagagcttcgacgcaccacagccactgcgtcttgatgcaatcccgccggtcattcaccttgaccgcctgggcaaggactcgttcatcgacgcccgggcgcaggaagacgccgcgctgcgacgtgcagcgggcaggatcgtgcagatgatcgacgcgcgtcgcaccgctgaagtgggcgaaggtgccttggccagcgtgtccggggccgacgcaccgactgatttcgcccgccagctggacagcacgcgcagccaggccggcgagctgctcaggcgtggtgatgcccgtgtgacccgtatggcgcaggcgggcgacggcgcacaggctgacgttgtggaagtgatcttccctgcgcgcttcgccaacatggagggggccgtcgatgaaacggtggccttccgcctggacgagaaccaggtctggcgggtgacggactacaacctcgcactggccgcccgctga

SEQ ID NO: 530497 - DNA, 435 bp, Stenotrophomonas maltophilia
atgaagaaccagaagggcttcaccctgatcgaactgatgatcgtcgttgcgatcatcgcgatcctggccgccattgccatcccgcagtacaacgattacaccgcgcgagctcagttgaccgaggctttcaccttggctagcggcctgaagactccgattgccgaagcttatgctcaggacaatactgcggccaattcttgtgtcgtgccgacgggttcggtaatcgccggtaagtacgtcaaggaagtgaaggcgactgcgagtggatctagctgtgcggtcgtagcagaaatgaatgcagctggcgtgaacgataaggtcaagagtgccaccattaccttgacctataccccggcggacggaaagtgggcctgcaagagtagtgttgattccgcgattactcctaaggcatgcgaagcaactgctgccaagtga

SEQ ID NO: 530498 - DNA, 915 bp, Stenotrophomonas maltophilia
atgaacgggatcgggattgatgtcagcaagcgccagctggatatcggcacgacggacggagagaccctgcaggtcagcaataaccgctcgggcttttctgaattggatgtttggctgagaaagcacccggccatccagattgtgctggaagccaccggcggctatgaacagccagtgctggacttcctgcacaaggccggccacccggtggtccgtgccaatgccttgcgcgcccggaaactggctcaggggttgggtcagattgccaaaaccgaccgtttggatgcctacgcgttggcgcagatggctgccctggtgaagctgcctccctatcagccgctgcagccttggcagcagaagatgcgggaattcgttcgggcacgtcggcaggcgatggacgccctgaccatcgcgcggcagcagcaggaaatggtgcttgatcgtgaactgcgccgactactgcagggcaacatcacccgcctacaaacgttggttgagcgtctgggcaagcagattgccgagcaggttgcccagcagcctcaactggctgtcctgaagtcgatgaagggcgctggcccgggcttgcaggcggtactggccagctatctgcccgaactgggcaggatcagtggcaagcgcatcgccagcctggtcggtgtggccccgatggcccacgacagcggcacgatgcgaggcaaacgaagtatcaagggcggcagagcagaaatccgccaggtgctctacatggcggcgatgtcggccatgcgccatgagcctcgattgcgggacttttatcagtcactacgggcccgtggcaaggaaggcaaagtggccatcgtggcggtgatgcggaaaatgctggtgatcctcaacgcccgcgtgcgcgacgctgaaagcggaccgatccccgcctga

SEQ ID NO: 530499 - DNA, 510 bp, Stenotrophomonas maltophilia
atgaacctgttcaaccgaattgccgtttgcgccgctctgctggccgccgccccggtggccttggccgacagcgccactctcaccatcaccgggcgcgtgttgcccggcacctgcacgctcaccgatgcaacgatcgacctggatccggtgaaggccagtgacctgaccccgggcaccgacgcccagatcaaggccggtgcgctggaattcaccggctgcgtcggcgtaagcaaggccgtgctgtccttcgccggtaccgccgccgacggcgatgccacgcgctggaagaacaccgccgcaagcgatgccgccgacggcgtgtcgatctcgctgctgtcaggcaccacgggcaacacctacctgaaggatggcgataccggcatcgacgtgccagtgaccggcgccaccgcgcgatacgacctgcgtgcggcgtaccacgcgcccaccggtgccgcgctgagcgccggcgaagtgtccaccgagattgtggttactgccgactacgagtga

SEQ ID NO: 530500 - DNA, 1005 bp, Stenotrophomonas maltophilia
atgaagttctttccgtgggattggatcccagggcgccgcgctttcaggttgggctgcactattgcaggagtgatttgcgtgggttcggcatggggatgcacgatcaccagtcactctgacgttgcagacggcaagggaagcaccgactattttgaaacgcccgacatctaccgcggcgctgttctgggagcgggttcacgctttgagaactgtgcgccgctgaccagtgttcgcgtccgctttcagtcctctctgtccggcgtgaagtacgttagaactttggtgcgaaacggtgcttcaacgccgctctatgagtttcaccccaactcacccttggtctatttcagtattgatattcgaccggacaacgattctctcttcgtccagatgccagtggacaatggcgcgcccttggaggttgatgtgcccatcggccgcaatgggctggctgatatcaggctgacggcgggcttctacacccggggtggccccatgtcgtcagcagatagcaggtttatcggcaccgtggtcaccagcctgcccgacttccccgccgcgggggagattcttcatgaaatgactaccggaattgatgtgatacagcgttcgtgcgcgctctcggacgtctcgatggcactggacgatgtttcgatgaacgaactgatgaatccagatgatgtagcaatggaaaagagaattgacgtttccatgaactgtccaatgggtggcgtgcccgtgaaactaacgctgaccgacaatcacgacgctggtaatacgggtagtcaactgtctccagcaccaggaaccgttgctcagggagtccgcatcgaactgcttcgtaatggcacaccggtgcaattcggggctcgctgggatcatggacactccatgcccggcggcggtagcgagccggttgcgttcagcgcgaggtatcaccgcggtgctggtgcgctggtgccggggagtatcgtaggagaggccgtgctgatcgcagattacgagtag

SEQ ID NO: 530501 - DNA, 180 bp, Stenotrophomonas maltophilia
atgaagcgtgatggagcacgcagttcggaataccgcgggcacgaaaaacccgccaatcctgaagccgtgaggggagggaacaaacggcagccgaagcgattggcgggttgctcgcgattgtcagtcaaaatttattgcattgcaacaatggccggtcagggcacgctgccgggcgactga

SEQ ID NO: 530502 - DNA, 642 bp, Stenotrophomonas maltophilia
atgagctcactggaacgtcagcgcgcacagaatgcacgcaacctcagtcagcttcggcttggcatggcagatgtcgccgagcagatgctggctgcgaaggcagtccatgcgcgacagcttgccacgctcgaccaagagcgcatcgagaatgacgctaggggctcgcttgaaatacttgctcctatatcaggaactgtctccctccagggggcaaagctgggccagagcatccaggccggtcagcatttgctaagcctcatcccgcagggcgacgttcttgaggcagagttttatgtgccaagccgagcgatcggattcatatcagaaggcgacatcgtacacctgcgttacttggcgttcccttatcagaagttcgggcatcaacttggtagggtgtctcggatcagcgccagcgcttcaacgcctgacaatcgccagtcgatgatcaacgggaacgacgcagatgcaaagtatcgcgttgttgttgagccacactcacaagtcgtgtccgtgtatggaaggaacgaatcccttcgcgcgggcatgctgatcgaagcagatgtaataggtgaaaaaagaacactgggtgaatggctttttgagcctctcatttcagtcaagggggcgctttcaggctcctag

SEQ ID NO: 530503 - DNA, 147 bp, Stenotrophomonas maltophilia
atgttggagatgaattcggaacaggtcgagctggttgacggcggagcaatgtccaccgagagcaaaatcgtaattgcagccggatggctcgtgtcgccggtgcttggcttcggtatgaccgtcggctactacgtaaacgcaaagtaa

SEQ ID NO: 530504 - DNA, 138 bp, Stenotrophomonas maltophilia
atgaaggaaatgacgaacgaagacgtggcaatggtcgaaggtggcttcgtgcagttcctggccccggccatgggcgcatatttcatggctggatacaacatcggtaaggatctcgctgcgcgcgataacgcgcgctga

SEQ ID NO: 530505 - DNA, 2127 bp, Stenotrophomonas maltophilia
atgaaaaagaaaatacaagttgtacttcaatccgaggcggcggaatgcggtatcgcatgcgtggttatgcttgcatcatactttggccacgggatcgggctctctgaggccaggcggcgatttcgagtatccctcaagggcgccaagctgagccaactaattgccatggcgcagaatctcgggatgtctgccagacccgtcagacttgaaatggaacatgttccggaccttaaacttccctgcatcattcactggaggcttaatcacttcgtcgtgcttacgagcgtatccggaaaaaacatgacgatcattgatccggcgattggtgaaagacgcgtttcgatcagtgagtttagcgatagctttaccggcgtggctctagaggccacaccagcgttcggcttcaagaagaagaaaaggccgcctcctgtctctctatctgagcttaccgggccagttcatggcttacgtacctcactcgcgcagattgccttcctctcaattggcctacaggtccttttggccattgcacccttctatatgcagtgggtcgtggatcatgcgcttgtgtcagctgacacgaacctccttgccgtattgggattggccttcggcgtagcgctactactgcaagtggtcatcggattctttaggggatgggcggtcattcacctatctgcactgttgggggtacagtggctcgcaaacgtctttgcgcacgcgattcgtctgccgatggacttctttgagaggcgtcacctgggcgacatcacttcgcgcctatcttccctgcaagcaattcagaaaacgctgacaacgagcttcgtggaggcgctaatcgatggcctgatgacggcggtagcgctgattcttatgttcgtttacagctggaagctcgcactaatcagcgtcggtgccatggcagcctatctggccactagggcatgtttgttccagcaccttagagatcgtaccgagcagcaactagtagccgcggccaatcaagagacgcatctcttggaatccattcggggaattcaaagtatcaaggtgtcgggcaaagagattggcagggagacgacattcttgaatttgatccatacaagcatggataaggaagtgcggctatcgcgcatttctctgagcttcttttcaataagtcaaatgatttttggaatcgagcgcgtcgctgcgatctggattggtgcgtggctaactattcaggggatattttcggttggaatgttgatcgcatatctggcgtacaaggatcagttttccacaagggtggggtccttggttgacaagtggattgaactccgaatgctccgccttcatggtgagcgcctaggggatatcgtcctggaggattcagagaaccaagtgccgacgcttgcgacgcccgacaccaagttcggcgacattgccgttgctggcgttggattcaggtactcagagagcgagccctggatcatcagagattgcagcttcacgatccagcaaggcgagtcagtcgcaatcgtcggcgcgtcaggcggaggaaagacaacgatgttgaagttaatccttgggctgctgaatccgtcagaaggctcagttcaaatagatggtattgacatccgcacgattggcgcagcgagggtaaggagtcgcattgggaccgtcatgcaggacgaccagctgtttgccggcagcatcgctgagaacatttcattctttgatccagagatggatactgatcgagtgagatgggcggcgactcttgcctgcgtccacgacgatattgtcagcatggcccttggatatgatggccttataggcgacatgggaagttcgctttctggcggacaaaagcaaagaattgttctcgcgcgcgcgctttacagaaagccggatatccttgttctggacgaggccacgagccacctggacgtcatgcgagagcaagccgttagcattgcggtgagagaactcaacctcacccgcatcatagtcgcccaccggccagagacaatcgcctctgcggatcgcgttctggttctcgaaggaggacgagtcgttcaggagtttcccagcagcgccatgggcttgccacggagcaatggagagaactctgcttcatgctaa

SEQ ID NO: 530506 - DNA, 1104 bp, Stenotrophomonas maltophilia
atgccgcgggcatccgtgctgatcggtctggcagtcctgttgatgatggtcctcgcggccgttaccgaatgggcaacacgcgtccgcacacgcttggcttcactgcgccggagcagcaccctgcggacgctcgacgccgacgaacactgcgcactggcagcgctgcgcgcgctgaccggctgcgactacgacgaccaggtgaaacggctgcgtggggtgttcaccggcggggcgtgctggaacaacttcccggtcggcgacggcctgatgggtggagttcccgtcctggtcccaaggcgggcgtggccctacctctcggaagaaaatgaagccgaagtggtgctggacaaacgcgtggcggtggtggtgcgtctcaatggcttcagtattgctgctgcacggccggatgcagccaccagccgcgtctgtggcgagcgcctggagacgcccgaggaagtttcgatgcgacgaggtcccggcctgcgcccttccccactggtgattgccgcactggcgctgtgggccgccaccggcgtcccgggcctgctcgccatgccgttgctcgccatcgccggtcttgcggcctggctgggcttccctcgccgcaacggccctgcgacagcgcagcgcgtgctgcgggtacgcgggcgcctgcgcgtgtaccagcgtactgcccagacgtcacgggtgtggttgctgggcaatgaccggcgtgtgcagcttccagagaaatgggagcatgctgcggcattctcccgcgggcgctcgatgctgctggaagtgcgcacctgcgatggaggggtactcggcgcgggcacggcatggtgcctggccagcgaccgacagcgctgtccgcccacgggagggttctggcaactggcgtggctgggccttctgttgtgcgtgctggtcttcggcgccgcctggatgccgttgtcgcagcgcctggagctgggctggccgcctgcgtctggctggcgggcggcggcattgctggcgttgggctggcacgcggtgctgtttgtaatctgcatggtgcagttccaccgccgcaacgaggcgcttgacgctgacatcgcgcagcgtccggacccgtggcactga

SEQ ID NO: 530507 - DNA, 204 bp, Stenotrophomonas maltophilia
atgacgcaaccgaccaagctgcttttgcttttgatcttctttttcttcttcgtgggtgaacgcgcccgccccacacatgacccgcgttacgcgaccacccacgaggggctgcgccgttggctggaaaccctatcccccgtgtacgggccggtgcccacgtacggccatcaccagtccgatgccggccagcagcgagaccgctga

SEQ ID NO: 530508 - DNA, 576 bp, Stenotrophomonas maltophilia
atgctgggtatccatcgcgggctgcgtgccggcctgatcttcacgctggcgggcgcacttggtgcctgttccgggggtgatcccatcccacccgagccactggacctggcgcagccgatcgctgtggatcagacgggccaagtggtgaatttcgagttcgagatgaacgctcgaaactacattccacatcgcacctatgcagtggagttggagttgcagcgccaggagacccaaaggcccgacgggcctgacgtgggcacattgagggtcccgttcgaggtgagcctgcaacaatggggcgctgacgtctggaaggatgttcccacctacgacagctaccaagccggggtgatcaatgcaggtgagccgcttccagaatggcacgcatccagcgaatggcggtatacgtcaccgcacatggggagcgatggccagtacacgctgagcctggttgctctgccagtggagcctgatacccgctaccgcttgcaggttcgtactgtagaggcgacgccggagttgcagcactactcggctcagttgcgggtacatgcagcccgaccgccaggcaagtag

SEQ ID NO: 530509 - DNA, 723 bp, Stenotrophomonas maltophilia
atgtcgaaaatgaaggctcctaaagtaccgtcactgcagcatcttgcccgcacttgggatcctgatcccgagaaagttagaagtacactggtggcattggctaaaaatagcccgacttttagctatcaattgatgtatgagttagttcaggacctggttcatgccaaaattccatatgagcaaattgaattcgcaataaggtctcgcgtagggcgggagagtgtcagaaataactttttagaaattcttccgctggttcgtgaaggtatggaaggaattcgtccgtcattcgtccacagggtcgtacctcggcactatcctctcgggcgaggcctatatgtcccgttctctccgccattcgtctacggtgcgagtggcgctcttcatatgccctggtttagtttttggcgaagcaatcccctttcgggtgtcaggctcagcctatttgcgacaatcatcgatgaaattgtcgagcaagatccagatctcgagtgtgcagaggtaacgattcttgactttagtgcatcaggcgccgcgtccccgcgcgaacttaagaaaattaagctgaaagaaattgagcgtgttgatcgagataatttggtcgagatgctcagagtttacgtatctggttatgaggcggcgtgccgtgatttggaggcgaatgatttttcgtcgctggagactgagtcggagaatgatgcgcagttcttgttgttcgattag

SEQ ID NO: 530510 - DNA, 1581 bp, Stenotrophomonas maltophilia
atgaacgccgcgatcgcacctgtgggcaagaatgccccagcagccagtaatgcgctctctaaagatgcgagcgatgagattcgctccaggcattccaaagaactaataatcgggctgagcggcccggttggctgtggtctagagcacgtaaagcgcgtgctaaggcagcaacttgagctgcatggatatgatgtggttgacataaaagtgtcggcccaattcgcggaactggcgagaagatttggtttgccggagccgcctagttcatttgcgaatgagtacgaacgaatcagtgctttccaggacttagggaattcgctgaggagtcgcgttggtggagacttggctgcgcagcttgcagtaagcatgattgcccaggatcgaacggctaagaatcctggaatgcctgttcaggatatcaaaccgggcagagttgcctacataatcgatcaactaaagaatcctagtgaagccatactgcttcgggaaatttacggaaatatcttctatctaattggcatcctaaccggatatgaaaagaggaagtcttatctatccgctttgatgggaggtgctaatgccgaacagctcattgaacgggatagggctgaatctggaagttctggtcagcaattggaaaagacacttaaacttgctgactattttgtcagaaatgatagtgacaatactccagagctcgaggcgccaatacgtcgatttgttaagcttctgcatggagcgccaggtataactccaacacttcttgagcgaggaatgcactctgcatacagtgcatcgcttcgctctgcctgtttgtcgagacaggttggtgcagcaatcctggattcggatggaattctaatctcaaccggttgcaacgacgttccgaaggccggcggtgggctttacgacgaaagcggaaatgatcagcgttgcgtgtttcgagagggtggaatttgctttaatgataagcacaaggatcgcctcagagatgagattgaacaacttctgattaatcgtggtgttgcgaaaagtcaggcaagtttgctggcgcgcgagattcgatcgggaacgcggcttaaggatcttattgagttctcacgcgcggtccatgctgagatggacgcgataatttcggctgcaagaagagggggtagcgctattcaagggtgcctgcttttcacaacgacctacccttgccacaattgtgcccgtcatatcgtcgcggcgggtattagcgctgtgtactttattgagccctacggaaaaagtctcgccagtgaactgcatgatgacgcgatcagtcacgcaccttcctcgtctgcagcctcagcgactgggaaagtcgccttcctgcactttgaaggagtcgctcctgcacgattctcgagtcttttcttttctttggactcgaggaaggattcagctggaaaggccaggtttgttcgtgaagagcaatctgaaaagagagcgcctgaacttcttgataattacagggagcttgaagcgaaaattaatgaaaggctcaagaagaaggttgatgaagcggagagcgctttcattcctgatggtgttgcctaa

SEQ ID NO: 530511 - DNA, 216 bp, Stenotrophomonas maltophilia
atgaagactcagatcttcgaatgccatcgacataaggacatgatttccgctaacggagatttccaacagctggagttggatttcgaggccgctacacgcgttagcgcaaaaattctgtgcttttcagaacatagagcacgggttcacgcattgagtgaaggtgatgatgcgtcccgccgtttgctcgaatttgccgcgaccctccctgactggtaa

SEQ ID NO: 530512 - DNA, 2766 bp, Stenotrophomonas maltophilia
atgcccatgaattccacccgcctgcgcgccagcatgctggccgccgccctcgttgccaccccggtgttcgcccagaccacaccagtgccgccagcagcacctgccacaaccccgtcgctgggcagcgcactgagcagcttcgccgccgaacacggtgtcgccctgtccttcgatccggcgctgacccgcggccgccaggcagcgccggtggcggaaggactcgatgtggatgccggctttggcgcactgctgcagggcagcggcctgcacgcggttcgccgcgaagacggcagctacaccctgcgccgtgccaccatcacccgccagacccagccgctgcgcgtgggtggcaccgatggccgggttgccttgccgcaggccatgccctacggacagggcgtgacgatggacgccgatgcgctggatgcccaggtaaagggcaacggtgatatcgccacggccctgcgcagcaacccggccgtgcagttcagcgattccaacagcagcagccgcaatatgggcgagatccggccggacgatttcagcatcaacggcgcgccctactaccagaacctgttcctgctcgatggcgcgaccatcaacaacgacatcgacccggcgttcaacgtctccggtaccggcaaccccaacaacgcagtggacgtgcccagttccgcacagggtatcgccgtggatgtggacctgctggaatcgctgacggtctatgacgccaacgtgccagcggcgtacggcggcttcaccggcggcgtggtcgatgcacgcagccgcaaggccaacgatggcctgcatggcaaggtgtggatgcgcatggcgcgctcggcctgggaccagatcatcgccaacgacgcgcaggctgaaacctacgcggagtcggccacctatgcctaccagccgcagtacgacaagtaccgcgtgggcgcacgcctggagggccgcacatcgttcggcctgggcatcatcggcacggtcacgcgtacccactcggacattccgctgcgcgcctactccgccggccgcgactctgctggcgacgacgtcaaccagaagacccagacgcgcgagaacaccagcgccagcgtcgccctggactggcagaacgacgatggcctgcagttgggggccagcttttcctatgcgcccacggatgaccgctactacatcatgaacggccgtgactcctggttcgacatcaaatccggcgggcccactgccaccctgcgtgcgaactggacccacggcgcctggaccctgcgcaatacggtcaactacagcaacgtggaatcctcacgccgcagcgacctggactacatgcgcaactgggccagttccgaggaattcaactggagcccgaccggcatcagctccgagggcagcttcggcaatgtcgaccagaatgaccgccgcatcggctaccgggcggtggtggaccgggacatgttcacgatcgggcgcagcgagcactccctgcagttcggcctgggcgtgcagcaccgtgacggcagctatgagcgcctgaacgatcatgcggtgtacctgtctacaggcgtgaccagcagctgcaggctttccgacggcaccatcgatacgttctcgtgttcgctctcgccgctgcgtgccggtggcgccggacagtacttcaagcagcagcagctttaccacgccggcacgttcgaggtcagcggcgaggaatacgaggcgtggctgcaggacgacatccgggtgagccactggaacatccgcccgggcctgcgcctggaccgcaacaacgtctggagccagaccaacctgtccccgcgagtggccatttcctgggatgtactgggcgaccagcgcacggtcatcaatgccggcgtgaaccgctactacggccgcagcttctacagctacctgctgcgcgatggccgtgaacgcctgcgcgagacgctggtgcgtaccaaggcatccaccccttgggcggaagccacccgtaccaccaatgtggcgaccaaccgcctgcgtgacgttgattcaccctataccgatgagtggaccctgggcgtggaccagcgggtcgcagggctggtcttcaacctgaagtatgtcaaccgtgccacgcgcaaggacatcctgcgccgcaaggtcgaaggccccgatcgcaccctctacaacctcaacaccttcgaatacaccaacgaaggccgcagcgatgcggagatctggaccctgtcgatcgcttcgcagcggccctgggacgtgctcggcacacgcaacagcttccagctttcgactgactacaccgacgtcaagcgcaactacaacagctacgaagacagcgacgacatgttcgagctggtacgcctggatggcaagctgatgtatcgctacgagctgccggccacccagttcctgcgcccgtggagtgcacgcctgagcacccgcaccgagattcccgcgctgggcctgagctggaacaacttcttccgctaccgcgccggcttcgaaggtttttccaccggagcgtcgcagaccatcgatggcatcaccgcccccaacctcaccagccgaaagtatgccggcacctggacctgggatgccaacctggaatatcgcctttcatttccgcgcgaccaggaagcttacgcacgcattgaagtgcagaacgtgctgaaccgcagcaacctgaccaccgccagtggcaccgcggccaccacaatgtactacgagcccggccgcagtttctggctggaaatgggctactccttctga

SEQ ID NO: 530513 - DNA, 969 bp, Stenotrophomonas maltophilia
atgccggctgagaccgccaccgcaccggccctaccgccacgtgtgctggagcaggccgccgactggctgatgcgcctgcacgaagacggcagcgcggcgcagcgcgcgcggtggcagcgctggcacgatgccgatcctgagcatgcacgcgcgtggcaacgcgcggaacgcttgctggcgctgagcgggcaggttccaccgccattggcccacagcgcactgcagcgcgtgccctcgccgggccggcgtgcgctgctgcgcagcgtcgccgcactgctggtcgccccgctgggtggctggctggcctggcgcatgtacgacgaggccgcatgggatgccagcgcacgcacggccgtgggcgagcgcctgcgccatgtactggacgacggcagcgtgctgctcctggacaccgataccgccgtggacatcgcctttgatgaccagcagcgcctgctgcggctgcggcacgggcaggtacaggtggcgacctcgcccgatccgcaacggccgacccggccgttccgggtcgcgacgccacagggcatcctgcaagccctcggtacccgcttcagcgtgcgcctgttcgccgaggacgcacttctggtggtgcaggaaggtgcagttcgcatcgatacaggcgcgctgtatcgccgggttgatgcagggatgcaactgcgctggaaccggcagtccctgccacagccgcagcccgccaacgccggcgcagatgcttggacccacggcatgctggtggccgacgccttgccactgcagcagttggtgcaggaactggggcgctatcaccgccactggctgcgtgtggatccggcgatcgccgcactgcccgtgtccggtgcctacccgctggatgacctggaccgcagcctgtcgatgctcgcagcaacctacgccgtgcaggtccagcggggcctgtggacccagctgcggccggccgacacacgagggtga

SEQ ID NO: 530514 - DNA, 252 bp, Stenotrophomonas maltophilia
atgatccaacgcatcctcatcgccaccgcgctcagccttggcctggccggcaccgtccaggccgccgaattcaactgctacgccaagatcgggccggcaagctcccagaacaacggcaccctgatggggggcgttagtgccgccaacctgcaggcggccgaggccgagtacttcaagcgcacctcggcgtcgaagcctgtcgcctctggccgatgggtgatccacgagctgtactgcgtgccgcgctcataa

SEQ ID NO: 530515 - DNA, 306 bp, Stenotrophomonas maltophilia
atgcaaagtctggcctgggggcgtcgattcgcgttgaccgcattgacctccgtgtcgttcggcgtcgccatgttcagcaacggcgtcttcaccaggtgcagcccgctgcacggcatatacgccatcggcatcttctcgatcctgaccccgctgctgttccaggtagggatgggtgccggcgcgtccgcgcgtatggcctgggtgacgctggcgacgtcgctgatgggcatggcctacctgtggctgatgatgtccggactgttacgctggctccagcacagaaatggcagcaggcacgcgacatga

SEQ ID NO: 530516 - DNA, 522 bp, Stenotrophomonas maltophilia
atgatcatccggccactgaccgaaggcgatgcggatattctctgggtggcccgtctgcaggcgttgcgcgagtcgcccgctgcattcctgtccacgctggcggaggccgccggtgataccgcacaggtgatgcggatgcagctaaccgatccgcatatccgttacttcggtgcgtttgaccaggcacaactggcgggcttcctgcgctatgtgcgtccggcgcggttggcgcggcggcacacggcggagatccacagcgtccatgttgacgcagcccatcgtggacacggcatcgcccgtcaactgttccttgcggcattcgcggcggcacgcgcggatggcatcgagtcgctcacgctcacggtgctggcagacaacgccgccgcgcgtggactgtacgaatcgttgggatttaccgaatttggcatcgagccgcgcgcggtgaagcgcgacggccgctatgtggacatggtgtcgtacgggatttcagtgaccagccacccatcatcgccggcaccttga

SEQ ID NO: 530517 - DNA, 1890 bp, Stenotrophomonas maltophilia
atgaatccgtccttccatcgttacgacgtcatcgtcatcggcggtggccacgctggcaccgaagccgcgctggccgcggcccgcaccggcgtgcgcaccctgctgctgacccacaacatcgaaacggtgggcgcgatgagctgcaacccggccatcggcggcatcggcaagggccacctggtcaaggagatcgacgccctgggcggtgcgatggcgcatgccgccgaccgcgccggcatccagtggcgcaccctcaacgcctccaagggtccggccgtgcgcgcgacccgctgccaggccgaccgcaacctgtaccgcatggcgatccgcgccatcgtcgaaagccaggccaacctgaccgtgttccaagcggcggtggacgatctggtgatcgaaggcgacgccgtgcgcggggtgatcacccagaccggcctgcgcttcgatgccgaggccgtggtgctgaccgccggcaccttcctggccggcaagatccacgtcggcccgacccagtacgccgccggccgcatgggcgacccgccggccaccacgctggccgcgcgcctgcgcgagcgtccgttccaggtcgaccgcctgaagaccggcacgccgccgcgcatcgacggccgctcgctggactacagcgtgatggacgagcagcccggcgattcgccgcggccggtgatgtccttcctcggctcggtggacgagcatccgcagcaggtcagctgctggatcacccacaccaccgaacagacccaccagatcatccgcgacgcgctgcaccgttcgccgctgtacagcggccagatcgaaggcatcggcccgcgctactgcccgtccatcgaggacaaggtggtgcgcttcgccgagaaggccagccaccagatcttcgtcgaacccgaaggcctgggcatcgtcgagatctatcccaacggcatctccacctcgctgccgttcgacgtgcagctggagatggtgcgcagcatccgtggcttcgagaacgcacacatcacccgccccggctacgcgatcgagtacgacttcttcgacccgcgcgggctgaaggcctcgctggagaccaagctggtcaacggcctgttcttcgccggccagatcaacggcaccaccggctatgaagaagccgccgcgcagggcctgctggccggcctcaacgccgcacgccaggtgcgcgggctggacggctggtgcccgcgtcgcgacgaggcctacctgggcgtgctggtggatgacctgatcacccacggcaccaacgagccgtaccgcatgttcaccagccgcgccgagtaccgcctgcagctgcgcgaggacaatgccgaccagcgcctgaccccgaccggccgcgaaatgggcctggtggatgatcgccgctggagcgcgttcgagaccaagcaggccgccgtcgctgccgagcgcgcacgcctgggtgcgctgtgggcaaccccggccaatgcgctgggccgcgaagtgcaggacacgctgggcgtggcggtcagtcgcgagaccaacgtgctggacctgatcaagcgccccgagctggattacgccaagctgatgcaggtgccctcgctgggcccggcggtggctgatggcaaggtcgccgagcaggtggagatcggcgtgaagtacgccggctacctggaccgccagcgcgaggagatcgagcgccagcagcggcatgaagccacgccgatcgctgaagccttcgattatgcgacggtgcgcgggctgtcggccgaagcgctgcagaagctggagcgcgtacgcccgcagaccatcggccaggcgcagcgcatcccgggcatgaccccggccgcgatctcactgctgctggtgcacctggagcgcgcacgccgcggccgcgtggcgtaa

SEQ ID NO: 530518 - DNA, 531 bp, Stenotrophomonas maltophilia
atgaacccgctgcgccccttccgcgacaagatgcccgtcctcggccagcgcgtgtacgtcgatccggcctgcaccatcatcggcgacgtggagctggccgatgacgtgtcggtatggccgggcacggtcatccgcggtgacgtcaaccatgtgcgcatcggtgcacgcaccaacgtgcaggacggcaccatcatccacgtcagccaccacagcccgtacaacaaggccggctacccgaccctgatcggcgaaggcgtgaccgtcggccacggctgcatcatccatgcctgcacgatcggcgattacagcctgatcgggatgggcgcctgcatcctcgacggtgcccgcgtggagcgccatggcttcgtcggcgccggtgcggtgatcggccccggcaaggtggtgggcgaaggcgagctctgggtcggcaaccctgcccggccagcacgcacgctgagtgacaaggagatcgaggcgctgcattactcggccgaccactacgtgcggctgaaggacgaataccggagctga

SEQ ID NO: 530519 - DNA, 690 bp, Stenotrophomonas maltophilia
atggccgcaccgatgctcgatacctaccgcgaggtggtgacgccagagggtgtgccgctgcagttgcctgccgccggcccggtaccgcgggcgatggcctggctggtcgatctcggcgtgcgcatcgcggcactggtgctggtgtccattccgctggcgctgctggacaagttcggctccggcctctacctggtgctgatgttcctggtctactgggcctacccgatcgtctgcgaagcgttgtgggggcgcacgctgggcaagcgtgcgctggggctgcgcgtgctgtcccgcgatggcgcgccggtaggctggatggcgtcgatcacccgtaacctgctgcgtacagtggacatgctgccgttcggctatgcattgggcctgatcagcagcctgttcgatccgcatggccgtcgccttggcgacctggtggcgggcaccgtggtggtgcacgcacccgcgctgtacctgccaccgccgccgaccatcgacagcgtactggccccgccgcagccgctgcgaccagaggaacaggctgcgctgatggccttcgccgagcgcgcgccacggttgtcggcggcacgccagcaggagctggccggtattgccgagccactgaccggcacccatggccaggtcggcgtgctgcgcctgtatgcgatggccaactggctgctggggcggcgatga

SEQ ID NO: 530520 - DNA, 1371 bp, Stenotrophomonas maltophilia
atgcgaacgtatgcaatcaggaccatggtagcgctgacagtgtttgcgctgctttcgatttcccccggcatggctgccgaacccttcgtggaggtgctcccggacgcaccattggcaggagcagaacagcagctgcgcagagctggcgatgatgtggactgggtacgccgggttcgcgtgaatgaggtcgccctggctgctgatgagatcaccgtcgatctccacgacatggttcttcaccttgtgcgcgatccttccgaacccctgttcgagagcgtccagagtgtgatctaccgacctgcgggtgacgaaggagcacaacgggaggtgcgctctatcccaggcatgcagtgggtgggcagggtgaagaccgtttcgctggatgttgaagggaagcctgggccgcccccgtacgtgcgaatctggtcggacgcttcaggagcacatgcgagattcagccaagggttctggcgttacgcgctggacggcgatcgactggtaaagcgtgatgtgcgtcgcgctctacgggacgagcgtgacgatgtgagggaccggcgaccagaccggcccgctccagaccttcccccaggaattgccgctggagggaacggcgaaggtcgcgatgtgatccgggttgcgtacggctttgcggtcggcgcgttggcagatgcgctggatccggcaatcgagcaggtcagggctgcggtgatcgaggccaatgtcggctttgcagcaagtggtattgaactggagctgcagacggcggccaacgcacttccggggtaccgcgaaaccacgcttgatcagactctcgatgacatcgcaaagggcaggcaagggcccctctggctgctgcacgttgcgcgggaaggcgagcgagccgacgtaatggtgatgatcatcgatacacattcgggcgctcccgcatgcggattggcccagcaggtcctggcgacccgggaaacagcctttcttgccgtcgagcgcagatgtctggaccaccacacccttgcgcatgagatgggccatctgctgggagcagatcatgatcccgagaacgcggcacttgatcctccaagattcgcatacgggcatggctatcaattcaacgcggaagacgcgcctggctggcgtaccgtcatggccttggagtgcggcgaccgggcctgcccacgggtgaacatctggtcatctccgcacatccagcatgagggtgtgccaaccggatccgttgatcttcacgacaacgcaagagtcctgcgcgaaacgaagggcatcgtagccagcttccatccggatccgccattgcatgatcccgatgtcccaaatgcggtcgccgtgacctccagccgattgtcgccatcgccgtga

SEQ ID NO: 530521 - DNA, 687 bp, Stenotrophomonas maltophilia
atggcccatctcgatctggccaacctgcgcacctgcctgctggacgacacccagctggccgctgtggccctgcatcgcaccttcgccgggcacctgccggtcagcagtgggcatctggtggtctgcgatccgctggtccaggccgaggcgcccgcgctggccgactacaccgccccgctgggccggcatccggtcgagatcatcgtgcacagcggccgcccggcgctggccgtggtctggttcaagccgcgcgaagccctcactgtgtctgccctgcactggcagatggcgcgatggaccacgcaggacctcactggactggatgaggacagcttcattggctatccggtcgacgccggtatcggttgcttcatggacaccgacacccagcaggcgctgctggccctgatcgaacaggccgatggcgacgaagagagtgaatggtcggaggcactggtcgaccacgatggcctggatgaaggcgccgagtaccgtccttggggggaggactcgccgcacggcctggtggtgttcaccagcggctggtgttcaggggtgagatatatcagagggggctgcgagatatctagccggaagaccccggaagaaggctggcaatggcggatcaagatgaaaagccattgcgcctggtgcaatcagggtgctgtgcggaacagactcatctga

SEQ ID NO: 530522 - DNA, 471 bp, Stenotrophomonas maltophilia
gtggatgagaccgtgtacgaagccgcatggcgggcctacaaggcagcgccccgagctctggccaacggcccgtcacgctcagctgtccgagcggccgtggatgcggtgcttagctatttgatgtcggccggttcgacgccggcgttcttcgccgaccgcgaactgcggcgggcagtcgcggcagatctcatggagttgggccgtgaaagccagaacggccattggccggtaatgcgggcgacctacaccatcccgcttttcatgctcccgctgccgatcaacgccctgaactggcatcaatgtgtgccgccgatgtggttgagcgaacagattggagggccttttgacgacctgacacccggtcaggcatggcgcgacggcttcaacgagtgccgcacgcggacgctgttactgatccagcaggaactgaccgaaaccggcagcgaggaggagaccgctgatgcgccgtga

SEQ ID NO: 530523 - DNA, 507 bp, Stenotrophomonas maltophilia
atgccgaagatccgagacacctgcaccttccgcttcgacggcgttcgcggcgcactgaatgccagcaccttggcgctggcagtgactatcgccgaccaagctgcgcgagccaacgtggagatccatgctccatcaattgagctggatggcgtgcgcggctacgactcgacttgcggctctgtaagcgggccagttcgcggcagcgtccaactggccttgcagtacatcgaggcccgaggcgacggttttccctggcgactgaagcgccacatctcgcagccgaccctgctgttcttcgaggagcgtactgacgttggggtggccacctccggtccgcgccacgcgtgcgtcaactgcgacatgcccaccggcatgccgtcgtcgcccatgtgtggcccctgcgcccagcaggcagtgactgagatggccgccgcactggctgcggccaaccaacgcctggatctgatccgccagattcagaaagccatctgcgaggtgcaatcgtga

SEQ ID NO: 530524 - DNA, 1278 bp, Stenotrophomonas maltophilia
atggctggcgttgcctacgctcaactgccgttccaggagcagatcgagttcttccgtcgcaagaagaacgtgctcaccgagagctacctggacgtatgggaggccgagcacgacaccagcttcatggtggctggcgccaaccgcgacgcactgctggccgacttccggcaatccatcgaccgtgtcatcgccgaaggccgcacgctggagcagttccgcgaagacttcgaccggatcgtggccacgcatggctgggactacaacggcggtcggaactggcgctcgcgggtgatctacgagaccaacctgcgccagagctacaacgccgggcgctgggcccagctgcagcagctgatcaaggtgcggccattctggcgttacaaccacaacgatgccgtcgagcaccctcggccgctgcacgtgtcctggaatggcctggtgctgcgccatgacgatccgtggtggcgctaccactatccggccaacggctggggctgccagtgctatgtcgatgcgctcaatgagcgcgacctgcgccgcttgggcaaggacggtcccgacgcggcccctgagatcgtgatgcagtcggtgatggtcgggcagcgcagtcccggtgggccgcgcacggtgttgacgccggcaggtgtcgatcctggcttcggctacgcgccaggtgctacggccgatcactggcccagtggccgtggtggtccggcaacaccgccatcgctgaccgggcaactgacctccgccttgcagaatgcactagagacgggcacgcggctgccagcagcgcccgctgcggccagtgccgcccaggcattggcgcggccacgcgccagggacgcactgcatgccggctacgccagctggctggccagcattgacgctgatgccgcgcacgctgctcgctacctggccggcgcactgtctcccgggctggtgtcgcagctgcagcgcgctgccgtccggccagcgacggcggccttcgcggtgttggccgagcaacttcccatcacgcgacctggcgcggtggccatcgccgcggccgagctaccgattcgcctgctcgatgcagtggccatccttctggacgtggccgcaggccacctgcgctatgtccttgcggtggggcgcccggccttcatggtggtcgacgtggccatctcggaaacgggcgtcagcaccatccagccccagctgcagatgctgatgccttctgatctcaggcgcagcgtcgccgatggcacgctgcagctgctgcagggagcgctctga

SEQ ID NO: 530525 - DNA, 495 bp, Stenotrophomonas maltophilia
gtggccaagccccgcactgcaccgcccagcgcacccaagaccgtccagaacgacaagccggccgacgtgccagccgtcacggaagagaaggcggccgacgcgtcgccggcaaaggacggttcggtgccggaggaagaccgcggcgaatcagagtccgcctcgtcggcggtttccgcagccgatggagctgcattggaccagccccagggcgatcagtctgcggccgaccaggatgctgtcgccgaggagggtacgccttcgggtgacgcccctgcctctctcgatactgttgtgacggacgagcatttgacggatccggcgctctcgaacggtctctggctgtccgcctgcttcgaagtactcagcccgttcaagcacaacggcgaggtcgtcaagccgccggcatggatcgagatgggctgggaagaagcgcaggactaccaggatgccggcgtcctcggtgacgaaccggccaccccggaagagctggagtaa

SEQ ID NO: 530526 - DNA, 165 bp, Stenotrophomonas maltophilia
gtgaaccttgagatcaagccgatcctgcggcgctactggtttgggcacccgatcttctacgaggcgcaccgtcaggggttcggctaccgccgttgctggctctgggtcgacctggtcgtggatttccgctatttcgtggatggccgcgaggtggcgccgtggtga

SEQ ID NO: 530527 - DNA, 657 bp, Stenotrophomonas maltophilia
atggtgggtacaccaccaaataacgcagccacgcagggcgcggctctactgcggtggtgggtgccaaccttggttggcacggatggcgcatccacgcatggcgtggatctactgcacggggttcgaaccatccacgcatggcgtggatctactgcacggggttcgaaccatccacgcatggcgtggatctactgcacggggttcgaaccatccacgcatggcgtggatctactgcacggggttcgaaccatccacgcatggcgtggatctactgcacggggttcgaaccatccacgcatggcgtggatctactgcacggggttcgaaccatccatgcatggcgtggatctgctgcatggggtacgaaccatccatgcatggcgtggatctacagtagagctaccctatgggtggctgcgcacaatgtccaaagggaggggcgccacgcatggcgtggcgctatcggatcagttgagtttggccagcaccgcgtcggtggctgcggcggtgctcaccgcctggcccttggcggccaggtcggcggtgaatacgccatcgtccagcaccgcatgcacggccgcctccaccgcggcggcttctgcttccagccccagcgaatggcgcagcagcatcgccgcgctgaagatcgtcgcgtag

SEQ ID NO: 530528 - DNA, 618 bp, Stenotrophomonas maltophilia
atgctggaagctctctacctggcggccgcaaaggcggcgccggcgaccactgcaggggcgagtgctggtggcgactggaagtggctggtgccggtggctacgctgattctgggcttcggactgaagtggctccaggactacctcaccgaaaaggggcgaaggcgtcacgagagggacctgcgccgggagcagcgttacgaccagctccggatgaggcgcctcgacgctgagcgggccaatctcatcttgctgcagccagcagcggtgcgatttgttcgcgccgccactgtcgtggctatcgagaagcgaaaggcttttgagctaggtcggccttggagcgaagcagaggcaacaccagcggctgacgaagagctacgtaagagcgcgttcgaactgatccctttgcacgcgcgaatccataccgaggtagtgtcagttgttctcaacaacgtcatcaacctgatcacgagcgcaatgcaggccaacaatgcagtcgctttcgaagatcagtgggagttcgttaacaaggagaacaacgaactgcatcgcgtgatgggcgtagctatcaagcagctcgaggacgagaaccagcagctcggggatccaccggcgcggtga

SEQ ID NO: 530529 - DNA, 342 bp, Stenotrophomonas maltophilia
atgggccccgtcgcgatcgcacggctctccctcgctgcctaccgtcaggtggccaaggacgtgcgtgcaatgcggccgcggcctctggatctcggcaagcccgccgatcgctggcgccttcgcctggtgatctatgacgcggcgcacgagctggtgtggccggagcggcgccagccgttcgccggcctggccaagtccgccaagatgcgcaagggcaactacatcaaggctcacaagtgtgccagcgctgtcctgcaggaagcgccgcatggcggcgcgggttccggcacgcgatgtggtgaacaagaaagactggtcaatcagtgtttaagggacagatga

SEQ ID NO: 530530 - DNA, 4308 bp, Stenotrophomonas maltophilia
gtggccattggctatggcgccaaagcatatgcgacgagctctgtcgcgttgggcattgggtcacaaacggtagatgcgaataccgtttcagtgggtagtgcttcggtcaagcgccgtattgtcaatgtccagcctgggtccttgatatcaggcagtacggatgcagtgacaggcgaccagttgtacaacacgaatcaacatgtcatttcagttcgcacaattgcgaataccgcgaaaaccaacgcggacactgcactgggcaaggcaaatctccttgaagggcttttgagccaggcctcgggatcgggcaatattcgtgtgggcggtggcaacagcggtaatcttattgatgtccgcaacagcgcgatcgccaatcgcaagattacgggcgtcgcagacgccacgctcagtaccaccagcactgacgctgtgacgggtaagcagcttaatgccacaaataccaagctgggagtcgttgagaagaccgcagatgctgcgaaagtggacgtggcagcggtaagggtcattgcccaggcggccgagaatcggatcgacgcttcgattctggccctgggtaagggtgctaccgcagagaacggtagttatggcatcagcaccgcacttggcaacaacgcaaaagcgtacaacggccgcagcgtagcgctgggtgatgacgcgcgcgctggtgtggatgcggacggcaacaaggtggccaaccaaaacgcaggcgtctcgattggcgccggaacccgtagcgccaacggcgccgttgcaaccggcttccgtgcaaacgcaagcggcaacttctccattgccgtaggcggtgatgccaaggccgaggccgagcatgctacggccgttggcaatctgagcaaggccagtgccagtcaggccaccgcactggggcgtggcagcgaggcgacggcgcagttcgccagcgcgctgggcaatctggccaaggccacgaacaccagctccgtggcgctgggtgaccgcgctcgggcctcgcatgagaatgctgttgcgctgggtgcaggtgcagtgaccgcctcggccaattcggtatcggtaggcagcgccagcaggaagcggaagatccagtacatcgccgatggcgtagtgggtgcaggtagcaccgatgccatcaccggcaaccagcttcataccaccaaccaggccgtgaccaaggcccagacagcagctgacggggcgacgaccactgccaatgccgcaaaggtggaatcgggcaaggcactggccgagacgttggtgctgggtggcctggtcaaccaggccgctgtcgatggcagtgttcgtctgggtgagaagaacagtggtacgcagctggatgtgcgcaacagcgcgaatgcgaaccgcaggattctgggcgtcgccgacggggacatcagcgcgaccagcaacgaggccgtgaccggcaagcagctccatgaaaccaacgcgaacgtgaattcggcacagacgacagccagcgcagcgaaggtcagcgcggataaggcgttggctgaagccggtgtgctgagtggacttgtcggtcaagtcgctgccaacggcaacgttcgtgttggcgagaagaacagcggcaccgtgctggatgtgcgcaacagtgcgaatgcgaatcggaagctgaccggcgtggccgatggtacggtcagcgccagcagctatgaggccgtcaacggcaggcagctcaacgcgaccaatgacaagatggcgacggtggagggcattgccaggtctgcgggcacggaagctgccgtggcaaagagggatgcagccacggcgctgggcgagacagcagtgctgggcgggctggttgcgcaggtatccgcgactggcaatgtgcgcctgggtgagaagaacagcggaatgaccttggatgtgcgcaatagcgccaatgccaatcgaaggatcagtggcgttgcagatggggcggttagtgccgatagcgctgaggccgtttcaggtagccaactccacgcgacgaacagtcgaatctcggatttggagagcaccaatcagtatgtgagtgtgggtgttgactcactcagtgagcgcgcagaagcggcgttgcttggggtggctattggtgattcagcgaaggccggagctgagggaggcaccgccttgggcgccttcgcaacagctcttggaaagaactcggtggcggttggccgtggtgcaggggtctcgggcgtcgcatctggtgggtttgcaatgggagctggggctcaagtgcacgcaatcaatggtgttgcgatcggggcgggctctattgttggagactcggccgcgggctcattggcaatgggggcggggtcctttgcagacgaagcaggtactgcatcatttggtaacgctacagatcaacgtcgtatcaccaacatcgccaagggcattgccgagcacaacgccaccaccgtctcccagctcaaggattccctcgccacgctcggcggcgccgcaggcatggatgccaatggcaacatcatcgccccagcctacacggtgcagggcggaacgcagaacactgtcgaagatgcgctgatggcactcgatggcgccgtcatcaccgccggccgtcgcgcggacaaggtggaaggtcagctcagctcgatcttccaggattcaccttcggcgcgtaccgatggcatgagccagatcgcgctgaatggcgttaacggcatggtgctgaccaatcttgccgacggccgagtggccccaggaagccgtgatgccgtaacaggcaaccagctgtacgccgcagagcagaagatctcgcagaatcggaatgatctggaggcgatgcgcaaggagcgggagatggggcagcaggcaatgcgtgggttggatgcgagcgtcatcgactacggtggtgcgcgtttgactggtgtggctgatggctccatttcggcagatagtcgagacgtcgttaccggccgtcagctgtttggtgttgatgaccgggtatccaagatcgaaaatcaaaggcgctttttcaaagttgatgtcgatcagcaaagtcaggacgccgtggcgggattcttgggggtggcaattggcgactcggcacgtacgcgggaagaaggtggaactgccgttggagccttctcttccgctctcgcgaggaattctgttgctttgggaagaggctctaccgttgaagagcctgcaatggagggcttcgctgtaggagttggggcgcgggttagcgcgcggaatggcattgcaataggcacgaatagcagtattggaatcaatgcggctggttccatttctatcggagcttcgtctgaggcgacggagtcgagcactgtgtcattcggcaactcagttaataaacgccgtctcgtaaacatcgccaacggcaccgccaaccacaacgccgccaccgtcggccagctgcgcggtgcgctttccgctatcggcggcgaggtggatgccaacggcaacattgtcggcccgcgtttcaacgtccagggccaggcgcagtccacgttgaatggcgcacttgaagcgctggatggcgcggtcgtcaccagcacctcgcgcgtggacaaggtcgaaacccagctccgctccgttttccaggacgccccctcggtccgcgccgacggcgtcaaccagctcaccctcgctggtgccaacggcatggtcatctccaacgtggccaacggcctgatcgcggccggcagccgcgacgcagtcaacggtggccagctgcattcgatgcagcagcagctcaacggccgcatggatgggctggagcagcgcatcgacgatgccccggcaccgcgcgcactggcgtcgtcctcggtgccgaagccgcagactgaggaaactcctgtggtgccggaaggcaaggactcccagcaggtcgcttcggtaggcgaaggtgacaagcccacaccgcagccgaaggccaacaaggacgactcacccaagccgcaggtggacaccgctgagctggagaagatgctggcccgcgccaacgagtacaccgatggcgcgatcagcaacttcgagcgccgcctggacaagatggacaagcgcttcaaccgcatggcggcgatgagcagcgcgcagacggcgatggcgatgaacaccgccggcctggccacctacaaccgccttggtgcgggcgtgggttacagcgagggtgagtcggcgatggcggtgggttaccagcgcgtgctcaacgagaagggctcagccaccttcagcctcaatggtgcgttcaccaacagcggtgagcgcagcatgggcgtcggtgtgggcatcggctggtaa

SEQ ID NO: 530531 - DNA, 627 bp, Stenotrophomonas maltophilia
atgtcgcatcgggaaaaacctatgccaagcagcatgaggattactacgatgccaactatccttggtgactttgtgaaggattcagtgaaatcgttgctgaccttgccaatgattgttccggtcgccgctgttgcggcgacctcgccccctcaagcatggagccccgccgcaagggcttcgcagcttgcggcgctggactacatcgagaggctggaggtggcgcgaagtgcagggcggcaggccgcagtaaatgtgttggaaatcgataatggctctcacgcggaccgcgcttcggcttccggcatctcccggaacttcggtggcattacgctggttaccgaacttgaacagctatcgggccaggtgacgattgtagtgagggcatcaggcggctgtatcgagcgggatgttgccaaggccagactgctgctcggaaagatcgtatgggcgccgttggccgattcccctgcaccggtgtttggttatgcacactttcagggcggctctgcatcgacagtatttttcgatgcaacaggctccaagtgcttgaccggcgtcaggatcgaagatccagcgagattgaagggggccattgaggaggcttacaaggaaggcgcgtcgaactag

SEQ ID NO: 530532 - DNA, 585 bp, Stenotrophomonas maltophilia
atgaagaaacgcggccttgccgctgcggcggtgtgcatcgctttgatcggcgcggtatgggcggagtggcccgagccagcgggcgatcaggtgtgggcctaccagaagctgcagccagtcgactaccggctgctgcacagtgatgcgcgcggcttcgtgaccgcgaaggctgatgagggttttgaactgcacgcgcgccatgcccaggcgacgtccttcgagatccgatgcaagggcgtgctggtgatggacgtggagaacgcgccctcgcgcgtgctgatccggatgcctgccgatgcactgtggcgggcgccggatatcgaacgcctgcgcagcagctgcgagcgttggctggatctgcgccagagccaggggcggttgctggtcgaaagtgcggggccttcgtgggttgaggcgcggtttgggcgctccactgggttggtgcctgaagagcagcggtgtttgcttggggccccaggccaccgccaggctgacgcctctagtggcgctgcgtctgcaccgcaaggggccacccgatgctcgatcatcgggggcgacgccaacatcatggatggtctgcactga

SEQ ID NO: 530533 - DNA, 486 bp, Stenotrophomonas maltophilia
atgaaagcgcttgttgtgattgatatccagaatgactactttgctggcggccgcttcccgctggaaggcgcagaggaagcactccagaacgcgctggtactgatccagaccgcgcacgacaacaacgatctggtcgtggtagtacagcatcaggcacccgctggcgcgcccttcttcgagaccggcagcgtcggcgccgatctgcatccgtccattcaatcggcgatgcggaactcccctttggtggtcaagcatgaggcggatagctttctgcgaaccaacctcgccgagctgctccggcagtacaaggtggacaccatcgatctggtcggcatgatgacccagcattgcgtcactcacacagccctttcaccggaggcagtgggctacccggtgacgatccacgctgacgcgtgcgccgccccaacccgtgcactgagtgcgttggccctgagcgggctgaaggcccgccactcggtcgtctga

SEQ ID NO: 530534 - DNA, 870 bp, Stenotrophomonas maltophilia
atgagcaagccacttcccgtcgcactgggcctgatgctggccatgggtgccccactccacgcattcggtgccgaggccagccccaaggtctcgatccagcagatccgcaatgccaccatcaaggtgacgtatggcggccaggtcttcctggtcgatccgatgcttgcacgcaagggaacctacccgggttttgccggcacttaccgcagccacctgcgcaacccgctcgtggagcttccggaatccgttgagtccgtgctggccggtgtcgacgcagtgctggtcagccacacccacctcgaccactgggacaacgctgcccagaaagaaatccccaagtcgctgcccatgttcgtccagaacgatgcggatgcggccctgctgcgcaagcaagggttcaaggatgttcgaattcttgacgccaacaccgtattcaacggcgtcaggatcagcaaggccggcgcccgtcacggttcaaaggagatgtacgccattcccgaggtagccaaggggctcggtgcgaccatgggctttgttttccagcaggcgggtttgaagacggtgtatgttgccggcgataccgtctgggaagccgaggtccgcagcacgctggaggccttcaagcctgacgtggtggttctcaacacgggcgatgcgcggctcgatggatttaataccggcatcatcatgggcaaggaagatacgttgcgcgttcaccagatgtctcccaacgccaggatcgtggcggtgcacatggatgcggtcaatcacatgagcgtcagccgctatgacctgcaggactacgtcatcgaaaatggcatcgagagcagtgtcgtcattccgcaggatggcgaagtcatcgacttctaa

SEQ ID NO: 530535 - DNA, 966 bp, Stenotrophomonas maltophilia
atgaccatccactcagactctgttcgtacgaccgaggtcgtcctgctggcacagccgggcgtcagcgcgtttcacctgtcggtcccgctggcgatcttcggcatgtgttttgaggggcgaacagagttccgggtgcgggtcgccgttgagggcagcggcgggccgacttcgcactgcttgatgatcaggggggacggcggactggagctcctcgacgaggccgacgtcgttgtgatcgcaggttggccggagctggggcaggcgcccgccgaggcgcttcagcatggactgcgcgccgcccatgagcgcggcgcatacgtcgttggcctctgctatggcacctacgcactggcctattcaggccttctggatggaaagcgcgccgcgacccactgggcaggcgaatctgacttccagggtagattcccaaacgtaaagctggacgtggacgcactctatgtagacgaggacaggctcgtcacttcggccggcaccggcgcaggactggactgctgcatctacctggtgcgaaagctctatggatcgaaagaggccaatcgcgtggcgcgggtgatggtgctgccgccgcaccgggagggtgggcaggcccagtacattgatcaacccgtcccagacaactcgcgggatgccgccctcagtagtctgatggacgaggtccggcgcaacctcggtgacgatcattccatcgacagtctggcgtcaaaagtggcgatgagccggagaaccttcactcgcaggtttgcaaaggtcaccggcatgaccgttggtgactgggttcaggcggaacgacttcgccgtgcgaaggagctgcttgagagttcagcgctggcgatcgatgtggtggcggagaaggccggatttcagagcgcggtttcatttcgtcagagtttcaagcgggcaatgcacgtgagtccctcggattggagaaagactttcgggcagtga

SEQ ID NO: 530536 - DNA, 249 bp, Stenotrophomonas maltophilia
atgtcccacgacagcggaaccatgcgtggcaaacgaagcatccatggcggcagggccgagatccgtcaggtgctttacatggccagtatgtcggccatgcggcatgaacctcgactgcgcgatttctaccagtcgctgcgagcccggggcaaggaaggaaaagtagccatcgtggcggtgatgcggaagatgctggtgattctcaacgcccgcgtgcgtgacgctgaaagcgggctagtccctgcctga

SEQ ID NO: 530537 - DNA, 222 bp, Stenotrophomonas maltophilia
atgcagcacgagccgggcagggaccgcgaagacggcaacggaaacaccggccgcagcggcacgatgcgcgtgcacgttactgaatgcaatgtcacggttctgttaatacagaaacagcggatccacgccgtgcgtggatgggacagcccggagctgcagtgcgttctatgctctaatgcacaccaagaagcgggggtaccgcggccatgtggccacggttga

SEQ ID NO: 530538 - DNA, 297 bp, Stenotrophomonas maltophilia
atgagcgaggctggattcaatggaatcgtggtgcaggacatgaccccaggcaaccgggcgatcgaaagtgcgaggttgtgcctgcggcctttcacggcggcggatgctggtgaggcattcgcagcgatcacgccggggctgacgcgctacatggccttcgaaccgccgccgtcggaggaggccttcactgcggtctggcaggcgtggttgccgaccatcgccgaggggacggacatcacctttgtcatccgccgacgtgacgatggcgccttccctggtctggccggcccgcattga

SEQ ID NO: 530539 - DNA, 954 bp, Stenotrophomonas maltophilia
atgaccgagccgttacccacccaatctcaatacaagaccgaacttctcgccgagctggccgatggctgggaccccacggaagtcctggacgactttggaaagagaaccatcctccaggtggcgctttctccagaactcgaatttagccccgacgaggcgctgacgttgggtcaagtgctgatggagcatgggatacacccggacgcgagcggaataaccccggaggatcgccgttattaccactggccaacgcccttgggcatggcgatcaccggctatcacggcttcaaccgcgacgacttagacctagagctggtcaagctgtttcttcaacacggggcggatcccaatctggccgttaaagatgttggtgagacgcgccgtgtttccagccccttgctcttggctgcacgccggggcaatccagcgatgtgctccgccttgctggaacacggggcggatccgaaccgacttcaagaagctcgtttttatggctcattccccgcccaggacaagcgcgaagagctgggctttaaggggcaaatcaacgactacgagggttggcttgatggttggggggtttcgcccttgcacctggccgctgtccgtgggcattccgccgtttgccaggtgttgttggaacacggggctgacccgctgaaaaccgccaccgtcagcgtggagagcagcggtagtgaatgcagcggtggtgaatgcgtcggtgtctggacagaaaccccagcacaggccgcagatcgctcaggtcacccggaaacggccgggcttatccgctcgttcgtaaaacaaaaagccctcgcggctcacttgacgaacgttgaggcggagaacgctcagctgcgcagtgagcgtgaccagctgaaaaacgccctggcgggtgtgttgggtagcagcgaccccgcgccagcaacgcctgagcgcaagcaccgattgtaa

SEQ ID NO: 530540 - DNA, 1863 bp, Stenotrophomonas maltophilia
atgagcatttcgccaaacggcgcccccttggggacgcaaggcatcacagacctggcagacacccccagctggcgttcgccgactgaatacgtggacccgctgacggggaagtcctggcgcgcggacacgcttcacgacttgctggcgctgctggaagaaaacgatgttcgcttgtttgacaatgcggaaatggaccgccttggcaaaaccctgggaaacggcaaggctcccaagtttgacccctcccagcagtgggaacggttgctgatccggctggaccattacaaagagcccatcgacgaggtgcgccgcatcattgtcgaagccttggccaacccgaacgtgaccattgtcgaaagcaaggggcagggaagggttcgtgagttcgacttcaaaggacgccgtgccgtcatcgctcacgaagtgcattacgaccaggaccgtggaccgcatttcatggcccaggtgcatgtgtcgggactggacgcccacggcaacgtgttgccgcgtgcctctttccgaaaagcggaacatcaggaagtcatggttaagcagatcaacgaagcgttggcctcacacggcctggctccgttggtgttttccgcacgtggagccgactacggaacaaccgtggccgagcaaaaggcacagctgacgccgaagcaggccgaggaataccgcgaagccgcagagaagggcgaactgccgccgttgcaggaagaagacgaagcgttggccgacgccgaggcgatgccggcatcgtctcgcaaggaaatgctgcgccaagccgcacagcaggctggggcagaagcggcaaccctgtttgcccaagccgcacaacggcagaagcaaaacgcgatgtatcgcactgcgctgcgcgccctggagaacgaagaacagcacttggcacgcattggcacgctgacggccaagctgcaggaagccacggcgaacgccgaacaggccgaaacccagcatgccgccacggtggccgagcaggcggcggtgatcgagcagacccaagtccgggccaccgaactggccgagcagctggaaaccacggcgggccagctgtcggaaaccgccgcagtgcttgaaaccacggaagccgatttggccgatgctcaagccagcttggcagcagccaccgccgccaagggcgagctggaaacgtcgttggccggtgtgcgcgatgaactggccaccgccacggcggaaatcgagcagttggaaaaccggttggagaacagccagaccgcattggctcaagcgaaggaacagaacacgcagctggtgcgtgccctggacaccgagcgtttggagcgcaagaacgaagcccaggcggccgaagctgagctggccgaggtgcgccaagagctggcatcggagcgcaaggcgcgggagaagctggaaagccagctggaaaccacccgttccggcctggccgacgaacgcaccgcgcacaacgccgtcaaggtggagttgcaggccgaaacccgccgcgccgaggccgaggccaagcgtgcgggcaccgccgaaaccgccgctgccaaggctcaaagcgaactggccgccctgcgggaacagttggccagcgtccaagcccaggccaaggcccaagccgccgacctggagcgggaacgcctggcacgtgagcaagccgagcaggccgcccgtgtggccctgtcggcccaggccacggccgaagcccagcgcgacgcccggcccacgcagtcggacctgcaggcggccctgtcggcccaggccaaggccgaggcacagcgtgacgccctggctgaccgcttggaacagctgaccaagccgcaggatccggcaccgggcagcaacggaccggcggcgtaa

SEQ ID NO: 530541 - DNA, 135 bp, Stenotrophomonas maltophilia
atgaaccgctcaactcgccgccgtcgtcgtcgtaacgccaacctgtctttcctggtgctgctgccgctcgctgcggtgggcggtcccatccttgccgcgttcgctttcctgttcgctggtgccactttcttttga

SEQ ID NO: 530542 - DNA, 861 bp, Stenotrophomonas maltophilia
atggctggcgatcgccaccacgccacgcaccgcgcttgccgccaccttccgccagcaggcctggctgttcgtgccgctgggcatcctgctggcggccgccggcgccggcctggtgatctggctgtcgcggcggcgcctgtcactgcgtggcgagctggccaccgccatccgtcgccgcgagctgtacctgcattaccagccgatcatcgagctggacaccggcatctgcgttggcgccgaggcgttgatccgctggcagcgcccggacggcacccaggtgcggccggacctgttcattccactggccgaagaggccggcatgatcgccgcggtcaccgacctggtgatcgagaacgtggtgcgcgacatgcgcgaactgctggtggccgaccgcagcgcacacatcgcgatcaacctggccgccgaggacatcagcagcggccgtgccttgcagatgatctccaagcacatggccggcagcggcatcctgccgcagcagatctggatggaggccaccgaacgcggcttcctcgacctggaccgcgcacgcacgatgctggcgcaggcacgccgtgcaggtcacagcgtggccatcgacgatttcggcgtgggcttctccagcctgcagtacctggaacaactgccactggatgcgctgaagatcgacaaatcgttcatcgatgcgatcggcaccgagagcgcaacgagcccggtgacaccgcacatcatcgacatggccaaggaactgggcctgtgggtggtggccgagggcgtggagaccgaggcgcagctggcctacctgcacagccggcacgtggagttcgggcagggctggctgttttcgcgcccgctgccccgtga

SEQ ID NO: 530543 - DNA, 1230 bp, Stenotrophomonas maltophilia
atgcagcttgaagtatgggctggcgccgatgaaaacgacgtcagcccgttgcccacgcgtagtactgagatatcatcgaagagcactctcctacggagggtggagcctaaaattgcggagctaggggggggtatgtcgtttagcaggaatctttctcaatggcttgagcgtgacttgtctggccgtcgattggcaagcattcccggtgccaaggtctgcattgcgtcagacgttggattggtccgagaggaaaatcaggaccgtgcagtggcaatgtggatgacatgtccggcgcatggggaagtgtttgtatcggtagtctccgatggcatggggggaatgcgcgacggaggtcgttgcgccactattgcgataactagttttttatactttatttcgcacttttcaagcaaggatctactaagtgatattattgagtcgattcagtattcaaactcggaagtaaatagaatttacggtggtcgaggtggtgccacgctttccgtcctggcgctgactgttctcggtgagagattcgttgcaaacgtgggggatagtcgcgtctattcttttggtacgccaaggggagttaggcggtggacagtagatgactcgctcgcggaagtggtcggaggtagtgggcgagagctggttcagtttgtggggatggggctggggataaggccttcggccgtggaactggttggtgatgactattgctttgctattacatcggacggcgtccactctttggatgagtcgacgctctttgatgtgatgaagaattcgtcatcagtagcccagctgacagagcgactggttgctatttctcgatggtgcggagggcgcgataactcttcgtgtatcgttctagatgtatccggtgtcgatttgacaacgatggggtttaactctgggtttgtgcgaatttgggattctgcgggtgagctttctatcgccttggatgaaattgccttgggtgattcgtattcgtcgccacgagaagaggcgcgggtggggcatatctctggagtttcaggtgatggtgcgagggtgggggcagaagaagctccagctgatgccattgagcgaggtggtttggctgttgaaaagcagaaaagaaagcctagaaaggtgacgaaaaagtccgctaaaaagaggaagtctgcggatgatgattccattcagttaagtattgagattggatctcaaaaaaattcggggggctga

SEQ ID NO: 530544 - DNA, 999 bp, Stenotrophomonas maltophilia
atgtcctctgtgatgttttgcatggacacacatctgaatcgacgggttgcagtaaagtttttgcaggctggtgttgatggcggaagattacttgacgaacagagagcgttgctaaagctccgttcaaaacacgttgttcaacttttcgacattgttgaggttcccgggcctgctggcgcattcccatcattagtgcttgagtttattgatgggcaagaccttcagcctgaatcattcactttcagtgacagctatcttcacactctttggcaggtggcctgcgggcttgccgatgtccaccaggagggcgtcgtccacagggatgtgaagcttaacaacgttcgtgtagataaagagggtgtagtaaaaatacttgacttcgggctgtctcgcggagctgacacggcgtcaacgcgcagtgtcatcgggagccctccatttatggctcccgagctttgggctagcgcaacgattagcttcagctctgctgttgatgtctacgcatttggcatacttgcagttgcgcttatatccacaaatctgccggctgcacttctttctcatcctccccaaagctgttgccgagcagaaatttcttctgctttgcaaggagtttcttcggaggtgattgatttgctcagtagttgtttgagctacagggcggaggacaggcccacaatgcaggctgtgcgtgaacgcttggagcgaagtctgcttaaggggaagcatcgagctaatgtcgtgctgggcgggaagttgcacgttttgaatcaggtaaacaattcgattcatctaaaggcgaatgttggtgaaattgaaattggctatgatggctgcgacttcagggttctgaaagtaagtggtagtgtttttgtgaataatggtcatgcgctagttaacatgattatacctgggtgttgtgtgcttacattcggttctatcggaggggtgagaaaattcgtaacctttgatgtgtcgagcccggaggtgctgtcgtga

SEQ ID NO: 530545 - DNA, 1011 bp, Stenotrophomonas maltophilia
atgcaggatgtttacagggcgggcgatactgttctgggtgttgacgtggcagtcaaggttccgcaagcgggccagtcgcagaagaagtttaggagtagtgcggtaattgcggcgagaattaatcatcataatgttgcgaaaaccctggactatatagaagatgatgaggggcgctgcttggtagaggagctggttgagggggatgggctagatcgccaaatttcccgattcggtgcggttgatcctcatcttgcggctagggtcttcttgagtattgccaaggggttggcggcatcccatcacgcaggggtggttcaccgggacttgaagcctagtaatatcatcgtctcgagtggagtgaatattaatcgcttgaagatcaccgactttggcattgcaacccttgctcaggaagtatttgatgaggctgccgaggttggagatctcactagatctacttccggtacaattcgcggtgcgctgccttatatggctccagagatgatgttccgaaagccgggagagcatcctggtcgtccctgcgacatttggtctctcggagcgctgatgttccaagtgctttctgggaaggtgccatttggattctatctggacgcagctgtcaacgtaaaaactaacaagcgcgagccttggccagggtttatggtgagcaatatccaatatgctgatttggcaaggcagttgcagcatctggttgaaatttgtttgatatacgaccccgaaggtcggcctgatgcagatgatttggtggcgaagatacaggagctttgctacatcagtgttgatcgtgaggagggtgatatcacgaattttatccaaaatggattcagtgggttcgtggattctgattctggtgggacttctttctttagtatggagagcgtctacggttcccggcggccaactgctgggtctaatagacgaatctgctacagttctttccccggaaatcccaaggctcgggctcaccccatagtcgtactcgattaa

SEQ ID NO: 530546 - DNA, 2196 bp, Stenotrophomonas maltophilia
atgtcccccactcccgcgcgcaccccacaccggttccgccgatggcgcgtcgctggctacatcctgctgggcgtgtacgttctctacctgctggccggcaacatctttctcaataccccgctgttcgaccaggtcaccaaccgcaagccgcacaagttcgtgatgaccaccggcccggccatcacgctgctgcccggccacgtcattgcctggaacgtgcatatgcgcggccacgtcaaccacaccgtctacgtgctgcatgccgagcgtgccagcgctcgattggccgtgctgcccttgttccgccgcgaagtgcgggtcccccgattgcaggccactggcgtgtctgccgagatcagtcgtgtcgaggacgccattccgtcaccgccgcgtagcgaccagggctggaccctgcgtttcgacgccatccacagcgacagcattcgcagtgcccggctcggcaagctgctgatcatcggcaagggccagggcaccgtcgggttcctcaagcagctgcgcggcggcccgtccgaactgttcgattccgaggtctcgttcagcaaggcagacaccagctatgacggcgtgcagctgctgggcgacatgaatctgaccgcgcgtttcagctatccgcgccactatcgcgaccaggcgcccggcctggccaagctgaagctgctgcatgcgcaacttgaggtggatgcgcgcagccagggcctgcgcatggatacggacgcgcagacgccgcgcatctccagcgcgccggtgcccggccgactgcaactggcagttcatatgatcgatggccagctgcaacccggtgaccaggtgctctggcaggtgccgctcttcctcggcgacggcgcgcccgatcgcggcgtgctggccctgcagctcaatgtggccaacgacctgcgcctgcaggcccgcctgccgccacgcccggattcggccgctggcatcgatgccgacctgcacatcaccgggcgcgagatcccgttccagcaccctgcccagctgctggaacgcagctccggtaccgtgcgtggcgaatgggccttcacctcgctcaactggatccctgccttgttcgtgcgcaaaccgtggctgcagctggacggcggcggcacgctgaaggcggatctgcgcctgcgcaatggcgaactgatcgaaggcagtaccgtggacattccctcggcctcagccgtggccgaagtggccggcgtgcgcctggccggcacggccagcgcgcatggtgagctgaagaccggcacccccactcaggcacagctggcgatccggctgccccgcttcaccgcgcgccccagcgatgcgaaggacgtacggctgttcgacgggcgcgacttggctgtggacctcaccggcgatggacgcctgcaggaactgcgcaagggcgttcgcgcacggttgcgtttcagcgaggcgaccatccctgacctggccgcttacaaccgctaccttggctctcaacaggtgcgcctgctgcgtggcaccggcagcctcagcggcgacgccacgctcgacaccgatggccgcgtcggccacggcaccgcgcgcctgcaggggcgcaacgccagcgcgaaggttgcaggcctggacatgggcggcgatgtcgacgtgaacgcgacgcttcgccgcggggacttcaaccagcgccacttcgatctgtccggcaccaccgtggaactgcgcaatgtgcaggtggccggcaccgattccagcagcacttggaaaggccgtgcagttttcaagcggggccgcatcgacgcgcagtccccgttccaggtggacgccaccaccgatctgaccttgagcgatgcacgccccttgctggcggtgttcgccaaacgcaccgactacccgcgctggacgctgtcgctgctcgactccggccagatcgatgcacaggccacgctgcgctggcgcccgggtcatctgctgatcgacggcctgcgggccgagaatgatcgcctgtcggtacgtgcgcggctggatcttctggagcagcgcaagcgtggcgatctctacctgcgctgggggctgctgggcgccggcatcgagcttgatggcgaacagcgccagtggcatctggccaaggcgcgcgaatggttcgatcagcgcccttcgctgttgccggctgggcaaagtggaagcgccgcgggctcttcagactga

SEQ ID NO: 530547 - DNA, 177 bp, Stenotrophomonas maltophilia
atgagcaggtttccctcattcgccgagctggcggagttagatatgggccttttcgcatgcgcggcgctgattgtcgtcagcctcggcgccgcaatggcttcaatcgtgattgagcgggcatggcttgcgcttcgccgcctgtggaagctttggaagggccgcaccaatggccggtga

SEQ ID NO: 530548 - DNA, 345 bp, Stenotrophomonas maltophilia
atgaccagtcatccgttcaacgaatcgcagaaccaccaatcgcccgccgggcagcgcctggaccagcgccatcgcgaacagctgtcggccctggtcgatggcgagctgggcgccgacgaagcgcgcttcctgctgcgccggatggagcacgaccccgagctggccggctgccaggaacgctggcagctgctgggcgacgtgatgcgcgggcaggcctcggcgctggcgccggccggcttcagcgcggccgtggccgccgccatcgctgccgaaccggcgccccaggcccgccaaccgccgcgccgcgaggtgcgccgcagcggttcatgggcggcgagaagctga

SEQ ID NO: 530549 - DNA, 1305 bp, Stenotrophomonas maltophilia
atgcctgagcaagtgaatgtcttctacgagggttggggagagcgatggctctggggaacgctggtctcaaccaccgccctgaccggccgcccgctgatcgcgttcgagtacagcaacgaggccaggcaaagggggctggagctgtcttcgtacaagctgccgctggccggccctccgttgcggcgggattttccggaccatcaactgcaactgcccgggcccgtgtatgacgccttgccagacggctggggcatgctgctgatggaccgcatgttcaggcgccgaaggatcagcacagcacgcatcggcccgctgcagcgtttggcctgcatcggtggcaacgcgatgggggccatgacgtttgaacctgtggcgcccgagggcgaggcgccgcaggtccacatcccgctggagcagcttgccgccgaagtgcaggaggtgctccggggagaaggtggcgaatttctgcagaccttgctgctggtgggcggctcaccccaaggtgcaaggcccaaggcacttgtctatcgcgatccgcagttcggtggcttcaccacagccgccgagccagggttcgaagcctggctggtcaagttcccggccagagaagagcatgccgaggtgtgcgccattgaaatggtctacgccgagtgcttgcgcaggtgcggcatcgagaccccggacacgcagtacttcagcctgcctaatgggctggccgcgttcgccagcaagcgctttgatcgccacgatgggttgcgtgtacccatgcagagtcttgccgcattcacgggcgccaactaccagacggcggggtcgttggactatgtcaacttcctgcgtgcgacccagctgtgtaccaatgacgtgcggcaaatggccgtggccttcgagcgtgcggtcttcaacgtcgccttcaacaaccgggacgaccatccgaagaattttgcctacatcatgtcgccggatgggcaatggcgcttggccccggcctacgacgtgaccttctgcgagggacccaacggatatcaccagatggacgtcatgggggaggcactggcgatttcccgtgctgacatgcttcggcttgccgaggaagcagaagtgcagcagggtgacgccagtctggcgattgacagcatttgcgaggtggccagccaattcaccgaaatcgccaacagcatgtcttcaaacgttattgctcaagacaccttgagcatgatccaaggacgcatcaacgagaacgtagctctgctgcggcaagtccggcgtggcctgcggacccgaggcccgggcgcaggggcctga

SEQ ID NO: 530550 - DNA, 318 bp, Stenotrophomonas maltophilia
atgttggatttggggttcagcaagcccggcgaggtcgtcaagcgactctgcgagcgcttgcgcacagagcgcatggcgttgggcatgacacagtcggatctggccgggcgtgccggcatcgggaccaacaccgtgtccaacctggaggccgggcgcaatgttggcttcgaggcggtggtccgcgtggcgatggtccttgggcggatcaacgaactcgaaggcctgttccagccaaagctggacagcatcgaagacattcggcgctacgaagaggccgcgaatcgcctgcggacgaagaggaagccccgcaatgcctga

SEQ ID NO: 530551 - DNA, 1671 bp, Stenotrophomonas maltophilia
atgaaggtctacgggcactttcaccctgagaagagtgtcatcgcgttcgcacagagccttgcagcaattgatgtggcggcgtctgtaggggctattgcccccgaagagagatcgcgatggcgtgctcacgtggaacagctgtctccatccgatctcgactccacagccgccgcgttcactgacctggcagtggagcggctgacgttctccagttcctacactgatatcgcgcgacacagatcaggcgaaaaatacgttgttctgatcgatctcacggatctgacaggcgttccttcgcagacgctgctctggtatgcagagagacgccaagaggaacgccgcaccaaatggaaggcctttgcatccatcccgggggttaccgccattccctacccgcactgggaaaccgagctgatcactgagaggaaccccagcaagaagttctcagcagaggtgcaggcgctggcggcaagcttcccagcgggccccgaagcttcaatggatgtcatctcaaatctgttcaactcaatcgacgagcccccggtgcagcacatcgccccccgcgcgcctgtggatggcgcgacgatgatgctgcgatggctcccaatccaggggattcaacccggcagcgactctggccagattcgttcgctgccccagaatcagttccatctgacgtcaggcgccgacggttcatttggttatatcgttgcgaggagggatgagggcgtggaggccctgcagatggacgaaagccagcgggtcatcgagacgaaggtggaccggaagggacgcctatgggctctgacagcagccgcgccgagcccgacgcagcagattctcacgtcctgtccagtacggatcagcggtgattccgccgcggcgatccgaagcgatcactgcatgcagagcaccatgcctccccggtggcaacttgatatcgatggcaactcctatctctacgcagagtctcatatggcgacggaggaccgcttccctgagcggatcatggacacaggatcaggaaacgccattgagatgaaggagctttgggaagacagaaccaacctgacacggcgcgtcttcggctacatgcaatcctgctacccaggcccggcaccggatctgggtgacggacttttctggtttacaagttgcggcctggtgggtgttgcacctgcatcaggcgatgtggccaagagctttccagtcacgtccggagacagtggacgcctggtattgggaagcgccgcgggtgactgggtcgccgaagaggctcgtgattcaacagagcaaagggacgttcttcgcgttcatcgtctttccaccggggaagcggcatttgaggtggaacgaaaagccggtccccaggcactggcacgcacggcgcatggcaggctgctcgcgatgacggctacaggcgcttcgccgggccgttacatcgatgtctggcgcacggattccggcagacatgtgtcacgtctcggcgttcctgaaggaatcgcattgaaatcccttgcattcaatcgagcggggactgagttatggatttacgcgcatcgactcgaaggggaggaagccggcgtacttatctggtccgtgccggaatcattgcaggaccgtgctgacgacaactggatccctgacgaggccgtattgaaaaaacactag

SEQ ID NO: 530552 - DNA, 213 bp, Stenotrophomonas maltophilia
atgcagcgcatccagtgccttttgctcgtagccgccactggcctcgagcacgacctgcttggctggccactgctgcaaccaccggatcaggctattccagccacgtttgctgttcttgaactggcgaaaggcctgttcatggacggcaacatccagattctcaccactgacatcgatcccgatcccaaacatgaggtaactccgctaggctga

SEQ ID NO: 530553 - DNA, 426 bp, Stenotrophomonas maltophilia
atgcacgacatgatcagcaagaccgaccacaccagggcaaatacggaggtttccggcaccggaccaggggcgaaggctatcacgagtgacggactgtgtggatttgaccccggcgacgccaagggctgcagcgcaaccctgacaatgcacatcacccataacaaggtgatcgtcaccgcacagttggatatgggaggcaacaagaccgcccagcaggtgcttgagcgccgccggggcaacgcggccggctgggtgcagaccagtggcagcgaggacttcgccgtcgaggcagagtggatctccgctgagctagccgagctggccaaccgcctgccattccccttcgaggtggccaacatgctgccgagcgccaaggccagccacagcgccgtggccgctgccgcgcaggaggtggcccatggctaa

SEQ ID NO: 530554 - DNA, 1815 bp, Stenotrophomonas maltophilia
atgcgatatgctcaattatggacgcacgtagccacaaggggccctatggcaagtcatttcacaaccgtcaagtttcgaaattacaaggctttcggatcctactcgctcagccttacccagttcaacatcatggtaggcgcaaataacgccggaaagtccacggtcataggtgcctttcggatacttgcagagggtatccggagagcacattcgcgcaatgctgactacagcgaggctacggcgacaaaaggttggggctatccaattaacttaagcgacctgccagtttccaccgagaatgtcttcacgaactatgatgactctgagcctgcgataattgagttctggctatccaacgggaacaagcttcgactcgtatttcctgagaacgatgtttgcgttctgttatgtgaaacaactggcaaggatgtacggacgcccaccgactttaagagagcatttgatgcatcagtgcactttgtgccggtgctcggacctgtggagcacaatgagactctcaaccaaaaggagactgcgcgtcgcgcacttctgactcatagagcgtcgcgaaattttcgcaacatctggtaccacttcccggacggatttgaggtctttcgagatttaattcgtcaaacgtggccaggaatggacatcgacaaaccagagttgagcagaagcagcgattccgccaagctccacatgttctgtccggaagaacgaatgccacgcgaactgtactgggccggatttggatttcaagtgtggtgccagatgcttacctttattgcgaaggcccctccggaatcgttactaataatcgatgagccggacgtctatctgcattccgatctccagcggcaactagtccacctattgcggtcgcatagcggcgatgtgctgattgcaacacacgcaactgagatcattgcagaggccgattctggggagatccttgtactcaacaagaaatccaagaatgctcagcgcataaagaatccctcgcagcttcaaggcctcttcggctcacttggctcgaacttaaaccctacgttaacacagcttgcaaagaccaaacgagcgctgttcgtggaaggcgaggacttcgcgcttctctccgcatttgcgaggaaattcaactacacttcactagcgaacagatcctccttcgcagtagttgctgcaaaggggttcaacccgtctcgagttaaagatttctccgacggaatggaggcaactctgggaatttcgatcaaacgcggcatcatatttgatcgggattaccgcacctccaaggcagttgacgaccttaggctagcccttcaatcttcgtgtgagcttgtttggattcacgaccgaaaggagctggagaattttctcctcgtgccatcagcaattgagcgcgcggtggctgcacggattctagaccgccaagctcggacagggaagaggacgcaccttgaagtagacatcgcatctcaacttggcagacttgctgattgcatgaagagcgaggtctttggccagcttaactcagttggagtgaaagccctgattgatgcgtcgccgggcatggacatatcgaccgcgaccgcaactcttcacaagtccttcgagtcggattggagtgatttcgaccgtcgacttaaggtggtcccaggcaagcttcttctatcccgcttcaacgaatggctacaaaatgggtacggcgtgtctgtgacacccagcgctatcgcttctgcaatgcacatcggcgagattcctgaggagatgcggcgcttgattgaagctctgcaaaaattctccagtagttag

SEQ ID NO: 530555 - DNA, 669 bp, Stenotrophomonas maltophilia
atgaagcgtttcatcctcactctcaccatcgccgcgttgctggctccggggctttcgtttgcccaggacagcaccctgcccgaaccccaaaagaccaacaagctgcgcctgttcaaggccggcgggattggctgcgctgccggtgcaggcatcgctctgctgaccggcaagaaagacaaggccctgacggcgtgcgctgcaggcgcagtcgttggcggggttgcgtcgtatcgcgcgcaggtccaggaagcccaggcggtggccgacgctgcccgcgctgcgggattcgacacccaactgcacaccacgactgttgaggcaaaggacggtcctgcagaagccctggacaagctggtcattcgttacccggccgctgacatgcagccggtgagtgccaagaccgctgccacgctggacaagctggccgcgctcctgaaggcgagcaaggaaaagctgacggtcagcttcagcggtgcggacaccgccgtgtgccaggtgccggtcgttgagctggcaaagcgcggcgcgcttcagaacgccacggtcgatgaccagtgcggcctggacgattacgccgtgggcaaccggcgcggggccgcttgcttggatgaccagtgcggccggggcgattacgccatcacggtttcgccgatccccgacgttcgctaa

SEQ ID NO: 530556 - DNA, 336 bp, Stenotrophomonas maltophilia
atgtatgtgctcccctcggtagacaatgaggcttcgtcgttgaatctcgtgatcaacaacttgggagtgtgcggtattcaggtcagtggtcaggcatcagcagccttggaggcggatgtcatcaaatccttcaaggcgttccgcgtgcccgctccgcagagtcccgcagtccgcgctggtatcttcattccctacggttcgtcgattagtgagcaggacgtccgtaggtatggactgatcaataccatgacatctgacgccaaaagcatttccatggttatatacatcccgccacagcaggccgaagaggtcttggcaaacgctcgtcgacagtag

SEQ ID NO: 530557 - DNA, 834 bp, Stenotrophomonas maltophilia
atggcccgtcagtgtattgatcccatcaatggccgcgggccgcatgtcgaaaagatgcttggccgccatgctgaatcgctggaagtcacccgctctctagcagctgctggtgaactctttgtcgccaagcttgagatttcggccgacgatccgcatcagcttatccctacctgccttctcatcaggcaggtgtcggggcttcgtgcgttggccctcttggcagtgaatgggttctacactgaggcattaggacaccagcggagcttaatggaggcgttagcgcgtctgtcggctttaatagctcgccctgagtggcttcaggactatttgatccaagacgtcttgaaccggaagaagatgttgggcgacatcctcagcttccgccaggactggccggctgagatgattcgcgatccctcggatgaggtgttgcagcagcaaatagcagaggatatgcaacgcttgaccgacttcaaggctcatcagggacgggtggcgcgtgacatcaaaacgtttgactgggctcagacaggtggcgtggatcatctgatgtatggcaggttcgtcatggcctccgaggcgctccatttttctccgaagtcattggaaggcctactagtgacggacggggacgttctggagtcgatacggatcgggccggaagacacggattttgatcaccttttgatgacgtcttgtcgctatgtcttcgtgggtctacagcggctcgcaaaccatctgtgtgttggccttcccgatgaggtggaagatctgtatcaacgcttcaatgcgcttgatgagaggatggctgatgaggcgctgcgcgaagagtga

SEQ ID NO: 530558 - DNA, 693 bp, Stenotrophomonas maltophilia
atgcaatgccgcaatgtccaggggctatcggggccccggcaaagccctgggcagcagttccgcgatccgggcgttcagccggtcaaccgagtgcaaggcgtgcttgtggaagatgacgtggatattgccgttcttaaaccgctcgcccaggaacggcttcagcagttccccacctcgtgcgtcaccaaaaacccttcggagccccgtgtctcagcggatgcagactgctggatggcgcgattggccttcatggccatcgtctcggcccagacacgcaatccgatgtcctgcagaaggatatcttccctctttctcgcggtcgattcgatgatccagtggcggccatacgcgccatgcatcaatggcgcccctggccatcctttccgggcgacggtcatggccagtccggcgatcaaccgaacgtcaaagcatcgcttcgtttcttcctcggatagttccaagcgcggagcaagcaatgcttctcgggccttcgtatcggcctgtatgacccactcaagctctgctggggttggagcctccatgcgcgtccacacgtgcgctggcaggcacgccttgacccagttccaagcgcttgcggtgtcgtcagacggatcagccgggtgcaggatgagccgactttcaaacaatgcctggagagtttccgggtgcctccactggcgaccgtggatgtag

SEQ ID NO: 530559 - DNA, 156 bp, Stenotrophomonas maltophilia
atgtcaggcgacgtccgtttcggatctgacgaagactggctgctaaacgcctaccacggccttcctttgtgcagccaatactgggtcagcagggaagtggtgcgtcggttcgtcgacgtcgacgccaagccaggacctgccccaccactgccgtga

SEQ ID NO: 530560 - DNA, 828 bp, Stenotrophomonas maltophilia
atggtcggggtggccgaactcgcgcgccgggccggcgtcggcggcgcgcggacgctcgtgccagccagcggccagcagctgctcgatcaccacgtcggcgcgcaggtggtggcgctggaaataggcttcgttgtcgccggtgcgcatcagttcgatgaagcgcacgctgaaggggcggccacgcaggtagtccatccactgcggcaactcgtcatcgttcaggccacgcagcagcaccgcgttgagcttgatcgccggcaggcccaacgcctgcgccagggccaggccctgttcgatctccggcaggcggtcgtgcccggtgatggtcttgaagcgttcgcgctgcaggctgtccatgctcacgttcagcgcagtcaggccggcccggtgccaccccggcaggcgccgcggcagcaacgtgccattggtggtgatggccaccttgcggatgcccggcaccgccgccacggtggcgatgatctcgtccagatccttgcgcaggctgggctcgccgccggtcaggcggatcttgctcatacccagcgcggcaaacgcacgcaccagcctcgcgatttcatccacctgcaggaagcgcgggcggccatcggcctggtaaccgtcgggcaggcagtagctgcaacggaagttgcaggcttcggtcaacgacaggcgcaggtacggaaagctgcgtccgaaaccgtcggtgagttggctcatggctggtccaccttgttgctccaccgtcttgcctgtgcccggaacggcccggataccctcgcctgctggaacgattgccagagtacgcggccttcagttccatgggcatga

SEQ ID NO: 530561 - DNA, 273 bp, Stenotrophomonas maltophilia; identical to SEQ ID NO: 498400

SEQ ID NO: 530562 - DNA, 273 bp, Stenotrophomonas maltophilia; identical to SEQ ID NO: 498400

SEQ ID NO: 530563 - DNA, 432 bp, Stenotrophomonas maltophilia
atgcgcaacagccaggcctgtgagattaatcagtacgccccgatggcgaccattcgacacgatatccagacagagcagcagcttggcctgcatctctccgacagtgaaagggtcgctatccactcggcatgcagaatgagcggactcgatctggactcatactatcgatggtatcgacagaaaagcaccatcagctcccaactggcacagcttgaccgccattcacttctcgaaggcatccgttgcattgatcgctccgactattcgtcaatcaatgcaagactcccgagcgacagaggagttgtgatcgcccttccgcatcatggccactacatcctgtctgtgaatcgcccagggttccgtagacacctcgcagccataaactatggcttaggcggaggtggttatgagcacgaagcggtacaccgatga

SEQ ID NO: 530564 - DNA, 216 bp, Stenotrophomonas maltophilia
atgagctggaccaaagacgatgtgcagaggctgaaggccgccatcgccagcggccagttgtccgtccggcatggtgatcgtcagatcacgtatcagtctgtcgaagcaatgttgacagcattggaccgcatggaagctgaggttgccgccacgacggcggggcgacggaagtcggccacacgccgctatcggttcacgacgctaaggggcttctga

SEQ ID NO: 530565 - DNA, 903 bp, Stenotrophomonas maltophilia
atggaaggactccgctcagaaaagccaggcgagcttctagatagattgctttatgcaagcaaagagggcttctacaaacaaatcgttaaactactgaaattctcgccagatctaagcagaataattaaagactacaaaccaggagacgcattcatatcatccctacgggaactcacattactctcaaacatttcaggaatcctaaatagaattgacaatgaaatcgcaagcttcgctggaaatgtcaggtatatagaaccactcagagcaactgcagagcgatattatcgactacaggatcttgctgtagacgaaatcgactcaagaggcgagaacactgcgatgttcttgaattcactgtcatacattgaaacattaagactacgacaatggatgaggaagagccttggatttcacgcccacgtcacttccgaaagcggccatgtacaagtattcattaatgacagcgaaggaaatgataaaaatatcgcagacttgggctttggctactcacaactcttaccaatcatacttcagatatggcgagcgcaatattcacggaatgcaataactgggagaagtcggccgattatagcgattgaacagcctgagcttcacctacatccgcagtttcaagcccaaatggcggacgttattgccggcgttgctcaagccgacgaagaggggccttcaatatttctggaaacccacagcgaacacttaatcaaccgcttgggcgaactcgtcggcatgggccgccttgatagagacgcggttcaagtgctcgtagttgaccaagatgaaaccggcttatcctctgtaacacgcgtcagtttcgataaggacggattccttgacgccaaatggcccagtggattttttgtaccggaattcaacagatga

SEQ ID NO: 530566 - DNA, 273 bp, Stenotrophomonas maltophilia; identical to SEQ ID NO: 498400

SEQ ID NO: 530567 - DNA, 273 bp, Stenotrophomonas maltophilia; identical to SEQ ID NO: 498400

SEQ ID NO: 530568 - DNA, 273 bp, Stenotrophomonas maltophilia; identical to SEQ ID NO: 498400

SEQ ID NO: 530569 - DNA, 273 bp, Stenotrophomonas maltophilia; identical to SEQ ID NO: 498400

SEQ ID NO: 530570 - DNA, 495 bp, Stenotrophomonas maltophilia
atgaacctcttcctcgacacggaatgggccgacccgatcggctccgagctcgtgagcctggcactggtcagtgaggacggcgcacgccagttctacgccgagcgagatccgctgccggcgtcgcccaccgatttcgttcgccatgccgtctacccgctcctgcagggcggcccggccgcgatgtcggacatggccatgaccacggcgctgcgcgccttcctgagcaccaccccgggcgcctgcgtgttggccgactatcccaatgacctgcagctgctgcagtacgtgctggccgggttcgacctgggcgatgaccaggtgcaggcctgcggcccggttcctgaggtggcagtgcagatcctggccagcagctgcatccgcgccggcatcgaggcctggttccaggacaaccctggccagcgcgctcgccggcatcatgcactggtcgatgcgcaggcgctgcgcgccgcgtggatggcttcccgcaagcgataa

SEQ ID NO: 530571 - DNA, 342 bp, Stenotrophomonas maltophilia
atgcggacgttctgcgcgacgcgatatgggctatcccatggcctgccagcagtgattcggtcgctaccggagcaaagggtcatcctcgctgcacatgagtcgacctggatacacacgataacgattgagaaccccagtgggccgtaccacctgttcctaacgatcaagcgcagccccaaggaaaaacgcacttggcaggacatcgatgtgatcgtggaaagcgcctatcccgagacgcgcaatgccccgacgacaacaggtagctggcggcccttcgtgctggtctgcggtgatgcctacttgtccaacccgcagaagcccaagaaaaagcgacggggataa

SEQ ID NO: 530572 - DNA, 246 bp, Stenotrophomonas maltophilia
atgagcaccaccaagcgtaccaacccccagctgatcgtggccgtctgcgccgctatcgagtccatcattccggctgcaggggtatccttgggcgtccttcgggacggccacctgggcaactcccgccggcgtgcgcacgacttcctcctgggcatcgcccaggcatcggtggccatgggcgcgatcgacgaagacggctatttcgcagcggtcgaccagatagaaaggctgaccatccatgcgtag

SEQ ID NO: 530573 - DNA, 357 bp, Stenotrophomonas maltophilia
atggccctgagccagcgagaagcggcccgcgtgtggggagtgagccgggccatgatccagcgggcaatttccgccggagagctaagcgttacgggggataagctgatcgaccccgccgagcttctgcgtgtgtttgggccggccaagagccggtccgctgagccatttgtgccacccaccgagccagccagcccggacccggcccaagtggctcagctggcggctctgcgagccgaaaacacggccctgcgggagctgctggaggccaaggacgccaacctcgcagatctgcgttcccaggtccggctactgacccatgagggcgctccgcgccgtcgctggtggccgttccgatga

SEQ ID NO: 530574 - DNA, 570 bp, Stenotrophomonas maltophilia
atgtccgatgagaagaaagtaaacctgcgcgaattgaactattcgcccacggtaaacccgctcatcgagccgcaggagatccgcgtccaacgtcgctatgtgcgtacccggggtggtggccaagagctggtagatccgcgcaccggtgagctggctgggatggcggtcatccaggtcgttgaggagcgcgacgacgcggagttcgtgaaggtatttgccgagggcgtccgggccgcgtttgagctgactcgaaccggctatcgcgtgttccaggcggtgctggcgatctaccagggcacctcaatgaagggcggctatgccgaggcggtggagctgttctggttcgacaatggcctcaacggccacgccatcgacatgagcgagaagacctttcagcgcggtctcaaggagctgttgagcaagggcttcttggccccgcggatggccagctcgttttgggtgaacccgtccctgttcttcaagggcgaccgggtcgccttcgtacgtgagtaccgccggcgtgcctctggcacggcagccagcctactgaccgaccagacggagacataa

SEQ ID NO: 530575 - DNA, 2067 bp, Stenotrophomonas maltophilia; identical to SEQ ID NO: 500880

SEQ ID NO: 530576 - DNA, 273 bp, Stenotrophomonas maltophilia; identical to SEQ ID NO: 498400

SEQ ID NO: 530577 - DNA, 273 bp, Stenotrophomonas maltophilia; identical to SEQ ID NO: 498400

SEQ ID NO: 530578 - DNA, 942 bp, Stenotrophomonas maltophilia
atgcgtacgctgtaccccgccatcaccccctacgacgtcggcaccctgaaggtcgacgaccgccacacgctgtatttcgaacagtgcggcaacccggacggcaagccggtggtgatgctgcacggtggcccgggcggtggttgcagcgacaagatgcgccagttccatgacccgtccaagtaccgcatcatcctgttcgaccagcgtggtgcgggtcgatccaccccgcacgcggacctggtggacaacaccacctgggacctggtcgccgatatcgagaagctgcgcgagcacctgaaggtcgatcgctggcaggtgttcggtggcagctggggctcgaccctggccctggcctatgccgagacccatccgcagcgcgtgaccgaactggtcctgcgcggcatcttcatgctgcgccgctgggagctggaatggttctaccaggaaggcgccaaccgcctgttcccggatgcgtgggagcattacctgaagccgatcccgtcggtggagcggcatgacctgatctcggccttccaccgccgcctgaccagcgacgacgaaaccacccgcctggaagccgccaaggcgtgggcggtgtgggaaggcgcgaccagtttcctgcacgtcgatgacgacttcatcaacagccacgaagacccgcacttcgccctggccttcgcccgcatcgagaaccactacttcgtcaacggtggcttcttcgaggtggaagaccagctgctgcgcgacgcgcaccgcatcgccgacatcccgggcgtgatcgtgcatggccgctacgacgtggtctgcccgctggccaacgcctgggacctgaccaaggtgtggccgaaggcgaagctggaaatcaccccggcctcgggccattcggcgttcgaagccgagaacgtggacgcgctggtgcgcgccaccgatagcttcgcctga

SEQ ID NO: 530579 - DNA, 258 bp, Stenotrophomonas maltophilia; identical to SEQ ID NO: 510531

SEQ ID NO: 530580 - DNA, 240 bp, Stenotrophomonas maltophilia; identical to SEQ ID NO: 510545

SEQ ID NO: 530581 - DNA, 147 bp, Stenotrophomonas maltophilia
atggaaaaagccgcgctggcagagctgcgctggacggatgcaagcctggcacacctgcgcatcccgatctccctgctcgcccgccatcgcggcgaggtccttgccgagatcgctgccgactccccttccacgcccatcgctgcctga

SEQ ID NO: 530582 - DNA, 1005 bp, Stenotrophomonas maltophilia
atgaccggtgccgttggcttgcgacgcgtaccccgtgcgtttgtcgaaaactatcccgtccgtttgcctcccgaagcagagcagaagcgcatcgcgcagaagctggatccgctgctggcacatgtcgatgacctccagactcgtatcgatgcagtccctgcgctgctccgaaactttcgcgcctccatcctctcagccgcagtttcgggtcgggctacggccaagtctgaccccgcggccgaagtgccgttgccccccctatctcccctcgtcttcttcaagagtgaggaggccactgccccgggcgactggaagtggcggaaacttgtagacgttgccaccttggagtcaggccacacaccgcggaagagtgtgcctgcctactgggaaggtgggactgtgccctggatcagccttcaggacatccgtgctgctgacggcaaggaaatattcttcactaagttcatgcccacagaacttggcattgagaattccagtgctcgccttcttccgaagggaacagtgtgcttctcgcgcgacatttccgttggctttgtcaccatcatgggccgctccatggcaacgactcagcattttgccaattggatctgcggcgatgaactccatccgaagtacttgatgtatgcatttatcgccgcacgcgagcacttgctgaagtctggtcagggatccacggtgaagaccatatatatgcccgctttgaaggagctcaggatcctgcttcctcctcgtgcggagcaagtcgagatcgtgcgccgtgtcgagcagcttttcgctgtagccgatcaactggaggccaaggtcgctgaggccaagcagcgcattgacgccctgacccaaagcatcctcgccaaagccttccgcggtgaactggtgccccaggatcccaacgacgagccggccagcgtactgcttgagcgcatccgcgcccagcgcgctgctgcacccaaacccaagcgtggccgcaaggctgcatccaactga

SEQ ID NO: 530583 - DNA, 1176 bp, Stenotrophomonas maltophilia
atgtgcctgcaactggccgatcgttggcacgaggaagccaaacccacggtcgaggccgatcccgccctggcaaaggcagcgctcgacgccgccttgtccggcatcaaactccccgccgcctgtgacaacggtggcttcgaagagggaaccccggcgtgtgccgccgcactcgaggccgacccggcagtgcaggagcagctggtcaaggccgcgatgacggccgccatgaccgaagccatggtgacgatgacggcgccgaccgtgccggtgatcattccagctgagcggcggcaacagttgttgcggttgtgccgcgaggtagcgcacggcggcttctgcacccgcgtggctgagctgtcctgggacgcgggagatccccagcaggcggtgcaggccctggctgcagcctgcacccccggcaatgacaccgccacctgcgagcgcctgccggcgttgcaggcggtgggcgcatcgctgcgaccgcagcccgcaactgcattaccctgcggcaactaccggtccgacggcggcctgatggacacgctggacttcggcgatgccggcctggttggcgttggctggagcagccatcttcgcgcacgcgtcgaagcgggcgacatccgcatccaccacgaccgggacggcgacttcgtgctgcgcccgctgccgggcgggcagttgctggggctggataactggacccgcttccaggtgttcgtccccaccggcgagggcccgacacgctgcagtgcaccgaagcagttcaaggtgctgccactgccacaggattgcccgctggcactggccaacgagggcggcgccgaagcctgctgcgcgcagggcaagctgcagggctgcaacattctcggcaaccgccttgcgctgtccgggaactggctgcaggccgccgagcactacaccacggtctgccgcgccggcgtgcgcgaagggtgcgagaacctggtcaccgcgcagggcaacggcgcggaactggacgcacgggcaaccctggagcagctgtgcaaggccgaccgcagcggcctgcatgtggcctgcgacgtgctcggcacccagaactgggagctgatcacgctgggtggtgctctgcagaaggcggttgacgaggcggccgtggacgacgctccggcgccgcgcaactccaaccgcaagcgctga

SEQ ID NO: 530584 - DNA, 348 bp, Stenotrophomonas maltophilia
atggccatctgcgcagtgatcgtgcgcgtgtcggcggtgttgccggccttcttcaaggactcaccatggctggtctatgtcctagcgatgcttgtctatgtatcgttttcttcgaactggcttggttctgagcgcaccaagaagatcgctgccgatagcagcgagcacacggtggctgtgactgttgacggaaaggtgcaaggcggcctgatactggcgggtcgctttggtgatagttatgtgttttgggactcagggcagaagcatgcattacttgtgcgtgcggacgatgtcagcagattggaggttgcgcgtggttctttagcgcctgcaaagtcagcccagtag

SEQ ID NO: 530585 - DNA, 2127 bp, Stenotrophomonas maltophilia
atgctgtgcgaggtccaacgcatcatcgaggacttcgatgcactatacccgtcacaagacgtgggtgccgccgtggaggccatcggcatcgcgacgcacggcaaaggcctttcgcagtggtcggaccttatccacaagcgcttgggcgccttgagcgctcccgaccagtacggggtgcgagagcatctccgcgacctcacaaccgaagtcgtatatgcgcacgcgctatttgatcaaccgctcgagccggtattgaaaactttgggggcggctagctcgatctccgcgccgcccgatactcgcaagaccgcggcgccgatcgactggacagccttgatccaggccgcgcgcgtgcagtcgttattgacccagtggtacgctgacaacttggacatgcgctacccgcgcgagtttgcggttgcgcgcgccgcgcgccgcctagctgaccgcggtttcccggtggagcacgagcgcacgcaacttcgtctttcgcagcaaactaacgatcggttgatcgcgcgcttggaggaattgatcggcgatctaggtggactaagcttgctccgagagttgttccgaaaggccattgcaacgtatgacgccgactcggagcggtacatgatcgtcagggatacgagggttgggcgtccgcgtgaaccagacttcccttggggttacctcatcgccttgagcgccaagcacgtctgccgccgcaacagtcgcagacctggcaacgaggcttgggaagagcttatcggcctagcaacggattttgccgcccttcatgacgtccaggactacacaccgccgatctttgcgcagatcccgaccgacaagctcgttgcgacgttgacgagacgagcgctctacgactcaatttacacctttccgcaactacgctcgagcgatgtgctgcgcatgcttcggccgttgctggccgagattcccgctgacagaacttacggtcctggttggacgaaaaatgacgtattctccgtcatcgagcagctataccgggccataggagattgccgcggtccggtctctcttgaccttcggcacatcgccaagaccgttccgggcgtggcgcctgtgctagccaagcacatcctgtttgacgtgctctcgcacccttccacgggcccaaactcgcagttcttccgtcccaccgaccagaccgtgcgcggcgcagatccgctaactggcccaggcaacagcctgtacctgcgcccattgatccggctggatggcaagcgcgctatcgtcatagatcgatccgtggccgggccgggcatggtggaggcagtgctcagtgccgtgcgcgggtacgaaggtgccgacacgttccagggcaaggtgattggcgcaggggccgaggcgctcattcgacttgagttcgcacagcacggtattgcgattcataccggcgactacgacacgccaaaggtccatggcgagtgcgacatcgttatcgacgaggctggcaacctggcattcattgagtccaaggccaaggccctcactcgaaacgccgccaacggcaatgatgtcgacgtactgctctcgctcgccggcagcgtggttgcggcgatggagcagtcttttgggcatgagatgcagttacgaaagcacggcgagcttgagctttacgataaggaaacacggaaggtgaatcacaccttgacctggagaggccagaccgtcgatcgcatcgctttgtccctgtacgactttggttttttccaggatcatactgcgatctcaaagctgatgtggccgatgttgaatgctcgctacggagcgatcgaccctgcaatccagaacaccttcaagggtcagtttaaaaagttgaacgagaaggtgttgccaaagctcaccggacacctgcagatttgggaagagcttggctttcagggggaggaccccttcgcattcggcaactggttcctgagtgccccgcagctttttgggctgctcgatgggatccaagggccggccgaattcttcgagcgactcggttttctaagaaacctgacatatcaaagctacaacttccaccaccaactcaaacatgccttatctctcaaggcggagcgggatgttcgcgccgacggagaaaggccttga

SEQ ID NO: 530586 - DNA, 585 bp, Stenotrophomonas maltophilia
gtggcggaagatttctcgaccagcaatctgaacgaagccaagttccatgcgagcttgatgattcgcacggtggctttctcgacgtcagattcagtgggggcgttaagctcgtatgtgaccgccgcagccggagctgcgtttattgccgccatctccaccggctcctcaatagcagccgcccttggcgcaaacgtccttgccgcatggcttttcacgtgtgttgtcacgatggtgatcgggttcgccgctaagggagcaggtactggcgtccaggctgcgaaggctgcgtatgagatgggagccaaggaaacggaccgccttggcggttcggcttcctacgacatttcccccttaccaattgacgttcaacggctggttcttaaggccgcgccattcggcgagaggtggatcgcgcggaatacgcttgccatggacagatatgaaggcgctctctccattgcactcatgagcaatctgcagaagcggctcgttttcctgcagatatccgtcctgctatttggcggcggttacatttcacggatggtgtggtgggtgttcgagcacggaaagatccccggggtgtag

SEQ ID NO: 530587 - DNA, 324 bp, Stenotrophomonas maltophilia
atgcgtgatagacagctgaccggcccttgggccggttttgcttttaagggtgatcgattggtgacgccagagggccgagaacttcgccccgaggatctggcctggctgtccctgctggccgcgcgagcgcaggaatggcaacggatgatggatgcggccagaacgggccgcaagctgcccacaaggcccgccgaggtggttgaccttgtcgaggccatcaaggaccgcgcgaagcggtctacgggggcgatggctggccctgacgccgagccgcctgcagcagtcctgacagtaccggggccgaaacgccgccagcgcgtgtga

SEQ ID NO: 530588 - DNA, 207 bp, Stenotrophomonas maltophilia
atggaagagaccgttcttgttctgcactgcaaggcatccgacttcgatgctgcaacagggcaatgcgcgtatcccttctatggaccagcgccgatgcttctgccgccgctcgacgttggagagtcccttcttatcagctgctcgatcgccggtatgtggggcctcggtttcatgatccgacaagcacgccgggtcacaggtggctaa

SEQ ID NO: 530589 - DNA, 297 bp, Stenotrophomonas maltophilia
atgagcaagatcatcgttcgtagcaccactgtcactccgcgtgaaatcaccaccaagaacaacaccaagatggtgtttcgtgagcagtccgccgcaatcatgaaggacggtgaagacttcccgcatccattccgtctgacgttggacgatcagcagccgccgtatccggctggcgagtaccaggttgatgccgcgagctacaccgttggccgatttgacaatctcgaaatcggtcgccgcgttgttctggttccgatcattccggcttctgtcgcatccgctaccgccactaagtaa

SEQ ID NO: 530590 - DNA, 978 bp, Stenotrophomonas maltophilia
atgagcggcggcaactgcaaattctgcggcaacgtcagcgtctacctgttcaaaggtggcctctgctacgagtgcagcgaaagcgacgtgcgcgtccctgtgcaggcgatgcctgctgaccgccgctcccccgaactggcatctttcgacgcctacatggcgcgctcccgtggcgctgctcgccgtgccgaactgttcaacgagaagtccgccacgcacggatactcggcggcggccggaggccgccgccttgggcttgtccattcttcaacaagtgacacgcgacgcgtgtcgctcactcttgatccgaatcacatccgggccttgcgcctgaaaaagtcggtcatcactggagcaaggttgcatgaccaagaagcgaaagcaggttcgttccgtggcgcgtggtacatgctcaccacgacttaccgaaacggaagtgacgctggccctcgtgacattagcgagacacttaagcgcatccggggcttcttcaatcgagctgtccgactgcgctaccggggataccgtccgcgtttccgttatctctgggtcggtgaactcactaaagccggtgttccccattaccacgtcttgatctggattccgcgcgggatattcatcccgaaggctgacagggcagggtggtggcctcacggccataccaagatcgagaaggcccgtaacgcggtcggctatctcgcgaagtacgcaagcaagttcgtgcccgacatggctgctgcattccccaagggatttcgcacgcacgccgttggcggcctggacaacgaatcaaagcgcgagctgcgttggtggaaggcacctaaagcagcgcgagacatgctcggcgccatggccgacatacgtaaggccctagggggctacgtggacaagatcaccggcgaattctggccctcgccgtggaaggtcgtttccgacaggggccggatcatcgtatggaaattggagatacccgcatga

SEQ ID NO: 530591 - DNA, 213 bp, Stenotrophomonas maltophilia
atgtttcgtgatcgcagctggtggtggggtcctttctgcctcttcatgctcattggcgtaggtatcggcttctttgtcggcaccgccttctctgacagcgtcaatgcctccatcaccgaacgtagcgatctgcgcaaggcgtgcgttgatggcaatgaccgcgcttgccgcatgtacgaaatcgaataccgccgtcgcgggtttctagaatga

SEQ ID NO: 530592 - DNA, 462 bp, Stenotrophomonas maltophilia
atgcaggccgtaaataaattgcttgacactgttcgcttagtgtgcaaggtcgagtcggatagtgcgcttgcgaagcgcctgcatgtgacccgcgcactggtgagcggctggagacaggaccgctaccacatcagcgacgagaagatcgcggaactgtgcgagatggcagagcttgacgccccgctatgggtggccgagatccacgcggagatggcgacaacaaaggccgagaaggcaatgtggaggaccacgttggacaggctaagcgcggtcgctacggcggtcgcgctcgtactgctactggcaccaggtctcgcgaagtcaaaaagccttgattttcagaaggttgcaaagggtgacgcgcgcgttctgtatattatgttctcccgcatcttggcgtggctgtctcaccagctgagacagtctgccttgcccccactgcatcggaggcagcatgcgtga

SEQ ID NO: 530593 - DNA, 324 bp, Stenotrophomonas maltophilia; identical to SEQ ID NO: 530587

SEQ ID NO: 530594 - DNA, 1170 bp, Stenotrophomonas maltophilia
atggcgctctacctcgttaccggtcagcccggccacggcaaaactgcctacgccctggacaaagcgttcaagttccagaaggagggaagggcgatctacgcccacggcgtcaaagacctcgactatgcaaaagcggggtggacctacctcgatgacccgactcagtgggaggccttgccggatgggtcggttgtggtgctcgatgagtgctacacgatcctgccaaaccgcaaccccggcgcgaaggttccgccgcacattgaggcgatggcacggcatcgtcatcgcggcttcgacttcatcctgatcgcgcagcagggcctacagctggacccgttcctgcgcggcctctatgaagagcatgtgcatgttcgacagacgtcgatcatgcgcagcaagaccaagctcaagcgttggaatcagtatcagagcaacgtgcaagccgtttgcgctgatacggttgattgggtgcgcccgaagtacgtctttgactactacaccagcaccacaatggtgaccactaagcggcagatgcccatgtggctgcgctatctcatccttggtgttgttgtcttgggcatcatcctcttcggaatccggtggtacttcgcatccaagatcgcggaatacggagccgagcggcctgcagcagcacaacccgtagcgcgtgctgccgcaactgccgacagcggagcggcggcgggtgcggcggctccgcgcgtctacgagactaccgcccagtacgcaacggctcacaatccgcgcatcgggaccatgccctggactgcaccgatctacgatcaacgtgcagttaccacggatccccagctgtactgcatcgcaagtggggaagggctggacggcaacgggcaacacaccgaagccacctgcacatgcctgacagagcagggtacacgttacgagctgagtcagccggaatgtcgcacgctggcgcgcaatggcccggtctataacccctacaagacaacgcagcctccagcgcctgcgcaagctccggcgatgccggcagctaccagcccacgggccacggctggcatacagggcgcagtgatcagccgcggcgagcgcgccaacggcagcttcccagagtcggcagcgttcgagtccgatacctatctgaccagcccgaccatccccacaaggctctga

SEQ ID NO: 530595 - DNA, 291 bp, Stenotrophomonas maltophilia
atgccaatgatcattgcagcacttgtgagcatgctgctgcaggcgctgcgtcagtatctgccgggcatcatcgggcgtgtgctgcttgccttcggcatcggccttgttacgcacgaggtggcactccctgccgtcaagagctttattcaaagcaagatttcctcgctcggtcccgttcttgttgcctacttcgattacaccgggttcggcgtggccgtcacgatgatcctatcggcgtgggcggccacctatgcacagaaggccatgcttgccaagctggggtctaactga

SEQ ID NO: 530596 - DNA, 1248 bp, Stenotrophomonas maltophilia
atggcttctggcgcttcaacagtaaaggattatgcgggcggtagctcccggtgcttggacaatggcgcaagggcgtacatctgctccttctctcaccctgccgctaccggcggtggctgggtcaattgtcagcgtgaattctggttcccgtgggataacgcttgtaaggatcgtagggagtacaacggtgcattcccgggcgggcagtacaagcctaagaacggctcactctcttgcgacctcggctgcgaggtcatctggacgcacaatgcagatggcactgttaacggtagtactgcgctcaatcgatcgtgtacgggcgacgacatggacgacgatgacaagtgcaaggccaagctcggccccggggccttcttcaataggcaagtcggcgtgtgcgagctaaatgagcctgagtgccccggtgggaaggcgccaaactcacttgggcaatgcgctcccgagccatgccctgacggcatggcacagcagcaggacggcacctgcaagaagaaggaaaacgagtgtccagcagggcaggtgaggtcgcccgatgggcgctgcttgcccggtgacggccagtgcgcgaagggcgaggtgcgcggcccagacggcacgtgcaagaaggattccgacgatgacggaaagcctgatgagccgggtgagaaggacaccttctcaggtggcgatgattgcagcgtcccaccttcgtgcagcggctcgccaatcctgtgcggtcaggcgcgcatccagtggcggatcgactgcaatacccggaagaaccggaacatcgcaggaggctcatgcgctgcgatgcccgtatgcaccggcgagaagtgcgacgcgatggagtacgcagggcttctgatgcaatggcgcaccgcgtgtgctgcagagaagctcgcaagccagggcaacaataacgggggtgacggcgcacagcccgagtggaccaaggtgggcggtatgtccaccgatccggggctgggagcttctcctgacgatacgaaggttctaaccgtcaagaaactcggggtcgaacagctggatcaatccggcttcggcggcggtggtagctgtatcggattcgccgtcagcggcggcagtggaatcggttcgggctttgcacaggcgatggcgtcgcctccggacttcttctgcaactacatcatcctgattcgcgcggtgatcattctttcagcagcggtcacatgcgccttcattcttaccagcggggggaagaactaa

SEQ ID NO: 530597 - DNA, 210 bp, Stenotrophomonas maltophilia
atgaagaagaacctgcgcaagatcggcctgaaggcagctgccatcgcttccaccgcaatggtggccgcaccggcattcgctggtgaactggctaccgctgccaccgaaggcatggacaagggcgagttgacgctgatcggtgttgcggtcctgacgctgtgcggtgtcgtcgcactgatcaagaagggtcagcgcgcctccggcggctga

SEQ ID NO: 530598 - DNA, 207 bp, Stenotrophomonas maltophilia; identical to SEQ ID NO: 530588

SEQ ID NO: 530599 - DNA, 297 bp, Stenotrophomonas maltophilia; identical to SEQ ID NO: 530589

SEQ ID NO: 530600 - DNA, 978 bp, Stenotrophomonas maltophilia; identical to SEQ ID NO: 530590

SEQ ID NO: 530601 - DNA, 213 bp, Stenotrophomonas maltophilia; identical to SEQ ID NO: 530591

SEQ ID NO: 530602 - DNA, 462 bp, Stenotrophomonas maltophilia
atgcaggccgtaaataaattgcttgacactgttcgcttagtgtgcaaggtcgagtcggatagtgcgcttgcgaagcgcctgcatgtgacccgcgcactggtgagcggctggagacaggaccgctaccacatcagcgacgagaagatcgcggaactgtgcgagatggcagagcttgacgccccgctatgggtggccgagatccacgcggagatggcgacaacaaaggccgagaaggcaatgtggaggaccacgttggacaggctaagcgcggtcgctacggcggtcgcgctcgtactgctactggcaccaggtctcgcgaagtcaaaaagccttgattttcagaaggttgcaaagggtgacgcgcgcgttctgtatattatgttcgcagggtgtgggccagactggcacagagcttgcctcgacccttggccctgctgtggcatggagcctgattgtgcgtga

SEQ ID NO: 530603 - DNA, 2478 bp, Stenotrophomonas maltophilia
atgcaggatgtctcgccgcaccaatgcaaggtggtatccgaacgaaactggtcgctcagcaccttcatggaattctatgagcgcgtgctgagcccacgaatattccgtccttacggaaaattgctggcgcaggagatcgctgcggacatccgtgccgcaccgggtgctgccgacatcctggaggtcgcctgcggaacaggggtaataacggccaacctgtaccaggacctggccaagcctctgggcctcaatctggtcgccacggacctgtcggcgatcgcggtggacgtggcccggagcgtattgagcgccgagcttcaacatgacgtcccactgctttccgacgtcgacatggccgcgctgcccttcgcggacaacagcttcgacatcatcgtgtgtggtttcggcttgatgttccctcccgacaaggcccgggttgcacgcgaattcaggcgcgtacttcgcccaggaggcagggtctacgctacggcgttccactacaaccagttgtttgaactggcacgccagcagtcgcagaggcacttcggcatgccatcgcgattgatggatgcggccctgagtctgaccgatccgtcccccatcacgcgcgccttcgcgatcgaggggctggaccgcagcgacggcgaatgcgccgcgctgcgcccgctcgcgttctcgcttggcgaagctgatgcccgcgagttcctcttcaacgcgtgcatcctgctggaggagttcaatcagtgcgatacccccagccgggaacgctacctcgatgcgatgatggaggcgatccatgtacaggtccccgaccagtgctatcgggtggaggcctggctgatacgcggcacggtgggtccgacgggcgtggccctgccaacggtcattccgcccgctgatttcaggcccttgctcgagttccgcaacctctcgcgcctgacgacgtcaccgtgccctgtgggctcgcaagctccatcctgcgcgcaggccgtggcagccttccacgatgccaaggtgcagttcctcgccgaccatcccgcttatcccgagcaccaggtcgaggcaatgcgccagcaggagtacgcgcggctggatgagcaacaagtgacctacctggatcatgttggcggaacgctgccacctgacagcctgcttgagcaggactaccaggcgctcaagaagaccattctcggtaatccgcacagtggatcgaaggcgtcccatgctgcctaccagaaggcctgcgatgagatctacgccttcttcggatgcacgccggaggagtacgagatcatctttaccgccaatgccagcagtgcgatccggctggtggccgaatcattccccttccagcagggttcgcagctactgctgaccaaggacaaccacacatcggtgcatggcttgcgggagtacgcctcctcaaagggggcgatggtgaagtacatccccctggacgatgacctgctgctgcatgacgggctgatggagcgtgcgttgcaacggctccagcgcggtgcgccgcacctgctggcattccctgcgcagtccaatgcgaccggcgtccgccacgatctggcgtggatagggaaggcccagcagcagggcgcgtgggtgctgtgtgatgcggcggcctgggttccgcaatcacggctggactgcacgatccatcgtcccgactttgtcgtagcgtccttctacaagatcttcggctaccccaccggcgcaggttgcctgctcgcccggcgggccgccctcggcatgctaaagccaccctccttcgcgggcggaggcgtctgctactactcgggaccgtggtcgcccaccgaccgcctgctctaccgcgacgccggccagcgtttcgaagtgggtacgcccaactatgcggccttcccggcgatcgccagaggcttcgagttcatcgccgcgatgggcggcgtagaagcgttggccaagcgctcaagcgccctggcggcgtggacagacgcgcgattgtcatcccttcgccaccgcatcaagggtgacctgccgctgtgccggatctatgggccgcctcccgcgctcaaaggcgcaacactgatgttgaacttcttcgactgctatggctcgatcatgccgcacgcacgcatcaagcgcgccgcagagcgtttcggcataaccctgcgcaacggctgcttctgcaacctcggcgccgtgcagcaggcgacctacgcgactgcaggcgccgaacactgcgaactggacaagaccgggaagatcctcgactgcaagaccttcgacgagaagatcctcgagaagggagattgtggtgcggtcaggatttcattcgggctcggatccaatttcgccgacgcctaccgcttctgcctgttcgccagctgcctgctggatactgatgtctccgggctggaggacccggcagaggagacgccagcggagacggctgacacgctgatcgccggtaccgtaccagcctga

SEQ ID NO: 530604 - DNA, 945 bp, Stenotrophomonas maltophilia
atggagtcgttgtctccagtccccaagccactgtcagggcactcattttcctcagtgacgcacactgactggcggatggacatgaaagcggctcgggcactgctgctgattacagcccgattcaatcgtgtccacagagtccacgtggctgagagctattcactttcacccagtgccaaggacggaatcattcaaagcatccgaccgctggcaactagcgatgttcaggattggaggagttttctggagcagatggctcagtgctccggaattgcaccgttccaacttcgctcggatcgctcctgggtcggggcagcatcgcccttagaggcaagtcttgtttgccccgcaatggcaagagtgccgcaacagatggcggatctagtgtcattcatcgcagatcatctcgacaaccccaatgaggagattgacgaagccgcggcatttcagttcttgacgatccatccgttgcatgacggcaacggcagagtggcccgaaccctcttgatcaaaatggcctccagtaaacttagcttgtatccgctttacattgcgtggcggctcatgttcgacaagattggcctaactagatcatggcgggagcgatccctggacggtggaaccttattcgatgtgaaccactacatccaatggcgtcataccagctctaacatcgggaaggcctatctcgatgcagcagcggcagggtgcgatacccgcgttctggattgtctagcagcctttggacagatttccccagccggcatctgtgcactcaacagtacggtcaaccaagggctttccgcaagaatggtctccaaacacgaggactgccgccacaccaatttctatagcgaaacgcttcgcacccttctccagaagatctgcaaggacagtacttcgggcgaagatttaccccttcaaacgatgaaagcacaaggatga

SEQ ID NO: 530605 - DNA, 489 bp, Stenotrophomonas maltophilia
atgcggatggctcattcgttcgtcaatggcaaggcctattgggaaggaacgccgatccagatggattccctagccatctggttccttcaagtagctttgcaggaacaggtcaacagtttcgcctcaggcgccagccttgtggagaccaatgctcgcatgcggattcagcttggtttgacatgtgacattcagctcgatgcgtcgagtcagtatcgcgtcgggggaacgctgaccaagccggaaaagtattgtatcgagatgctgaaagcattcgatgctgaggccaacgacaatcagaatttcatgatttggttcattgaacatcaacgaaaggttggcgtacccctcgaaaactacgttccgtatgggatcgtcgagctcgttgacacgcgaaactctatcggcgagaaatggcgtgcagtgacggaagacgcatcctgctcaaaatggtggacacaggtccagaaaaacatgtgcggggtaaagtaa

SEQ ID NO: 530606 - DNA, 705 bp, Stenotrophomonas maltophilia
atgcacgcgagatcgattctgtttacggccattttggcagtcatcgccacggcttgttcagaacaacccgccccagacaagggcacagtggcaccggcggcagaaggcgccgagtcgtcccactctgttccgggacagacaccacgcgctaccacgtcccagcactcgacgggtggtgaatcccatagctttgacgcggccgtggttgcgcagcgcttgtgcactggagactgccgtgacgccggccctctgcaagcaagatctcaagaagaggctgaatggctaattcggcatcaatatccttcgcaggctgaactcgagcggcttcgatcagagtcgctggatgtattgcagcaaaaggcgtcagtgggcgactccaccgcagccgcggtgctgggaaaacggattgccttggagaagaacttcatggacggccaagtcatgctccgaaatcaggtgctatcgggcaacttctatgcgctttacgcgatctcagagtcgtatcgcgaatcgaaagtgccaaacgcggtagatggtgcagcatatctccgtctggcttacatcatgggcgaccacaaagcagcgaccgagattgcgaagatgggtctcagctctgcggagctggcggctgccgacaggagagcgtctttgctctacaagggattcgcaggagaccaggtgcctgatccgcgcccacaagggtag

SEQ ID NO: 530607 - DNA, 1803 bp, Stenotrophomonas maltophilia
ttggtcgaagaagccggctatcgcaccgagagcttcaccctgaccgatccgctggatctgggctcggtggccgtgggcgatatcgccctggttggcgcggagatttgccgcgtggatgccattgacgcggctgcgatgaccctcacgctgggccgtgcctgcgccgacacggtgcctcatctgcacgcgccgggcgcccgcgtgctgttcctcaccgactttgcgaccgacaccaccgagtacgtcggcggtgacaccgtccacgccaagctgctcacccgtggcgcgtcggcgctgacggacctggccgacgcgcaggatctggtggtcgagatggaggatcgccaggcccggccgtatccgccggcggacgtgcatattaacggcgagctgtacccagaggacgtcgtcggtgacgctgttttgagctgggcccatcgcgatcgcgtggcgcaggcggaccagctggtggataccggcatggccagcattgggcctgagccaggcaccacctacaccgtaaccgtgtatgacgccgcttccggcgccctggttgtctcctacccggacctggtgggtgcctcgttcactgtgccggccggccagctggtcgagcgcaaccgcgtgctgctcagctcccggcgcgacgggctggatagctggcagtcggtggagctgctgttccgtcgtgtctatcaactggatttcagcatcagcgcctggcgtggtgccaacaactccaccgcctcgctggtgttcaccacggaggccgagggcgtggagtggtcgatcgatcagggcgtgctgcctgcggggatgagcctgaacaccaccgccggtcggatcgaagggattccgctgggtggcgcgccgggctactacccgatccgggtcaagggtcaggatgcggcgggcaatgtgggctttgccgagacggagattgcgctgtcgaccatgcgcagcagcttcccgatgcagaccggctaccaggaggccggtggtcgcacggtggcggtcagctcctccaacctgccggtgctggaccccacgcagtcgccatacgccggcggtgcctcggtgcgtttcaatggcaccggattgcggcaggagctggaggccagtctgggtacggccgacttcagcgtggccatgtggatacgccctgacgcggccccaagcgacacctacgcgcgcctgttccagatcggcccgaacacgaccaatggcggcctctacctgcgccgcgagcagctgaccaacccgatgcaggttggcctggatgtgttcacgggcggcaactacgtgcgcctcttcaatgatgcggtccttgcgctggcggagaaccggctgccgaacagtgcctggtcgcacctgacgatctccaggcgcggcggcgtggcccgtatcttcaaggatggccgcctggtcgatgagagcaccttgcctgcagcagcggtcaacctcagccagacggcattgtcgctggccagcaacacgaccctgaccgccgagcggctgtatgcgggcctggctggcgtcgaggtgcatgccggtgcagccgtgtattgggagcccttcacgccgccggcaaagccctcggacttccccgcacgcctgctggagatgccggcactgccgatcgcgctggttcgcggtcgggcctatggcccgtacagcctgcacttcaagcggggcaccgaggccagcccggtgacctggtcggcaaccggcctgccgccaggggtctcgttggacgtggatcagaccggcagcaactcgaccctgggaggaaccccatcgtga

SEQ ID NO: 530608 - DNA, 2439 bp, Stenotrophomonas maltophilia
atggaatcgattatgcaggcgtacttttcgagacttacaaaagatcttaaaggctgtgaaaatgaagtggagtgcagagctcgcttcatgtcgatctttagaatgttcatacaacagatcgactacgcacttctggagtggttagcagccaaaaatatcgccaaacagattcaaccaagcggcgactacgtgcgccccttgctacaaccagcagacggctctctcatcgatgctttggaagcattgctaatagccgcagagcaagcaggttggtccggcgcctcgagagtgcttatccttccaataggagcacgcgccgccggcaggctggtcggggaagagaattcaaccctgataagcctaatgcggagcatagttgcacgccgcaactctggctcagaggggcatggcttgccaggcgacttcgatcgagaagcagacattgatgcactcgaattttttctggatggcatgaagctgctcttgcctaccatctcccccgaatctacgctcctcttcggccctactagagaaataattccgctaaagctattgcgtgcatttgacgggacaccctgcctaatccgaaagataaaaactctcgcaagtgatagatgcagagtttacgcccaaataataaccggaccgctgcaacgcgaggagttcaactacgacgctgcaagcaatccattctttggtgcgagcggacctggaattccggtcatatcaacatgggaaaactcatggaacccactttgctttgttcctgatcgaacaaccgacacgttcactggtcgtgcagcccaagttagcgaactggaggactgggcgaatgacgagggatccagggccagtcttatttttggtgacggaggcttcggaaagacaacacttgcaattgaatttctacatcaatttctagatgaatatctagatattaggtggcaaccagcagcagtcatcttctacactgccaagcgcactcaatggggtttggacggcttgcgtccgataggcgttggacaacctcatctcgttgaaatgctcgctcatgtccaccaattgctgttctccgcttatcccgacgcagcattttatagatcaaccgcagccgaagctgccagcaaactccaaacgcgaatcaagaaggatttaggatacaaaccatctgacatacttctcatcatcgacaacactgagactctaatttctaacgagactgaaagaaatgagcttggtaaagagctgcgagaagtaggtcggcgagtggcgcggatcatcttgacatcacgccgccgcgagctaatggaagcagttcccattacagtagacgtcctagaggagccagatgcacttcatcttgtaaaacgcagaggtgaaaagctcggctcaaaaattattattaattcaactgacgaccagctctcaaaagagatttctcagctggagagacgacctattgttctagaagcactggcaaatgcagcatccgagcccagcgtcaagaagctttcagatgcaacgaagcgagttgccagtatgctgcaaagagaactcggcgagttcctatttgcagacgcgtggtcgaggttctccaacgacgtacgccgcgtattacttctaatgacaagagttggcgatgcacacgatgcacagtctcttcgaatctgctctgatgtgataggaatatcaccctcagccaccgaagtgtcgcttgaggaatctggtggcatcgcatccgttgtcatcatccaaggccagccgcagataactttctctcgaaatttcctggagttctccaagaataagacggtaaagtcatccaacagcatagatagtccgtcatcagacgagatatccaaggctcaagaggcgtactcaaattttgtcaaagactctcagaaattcaccggcgaccgggttggtgaggcattccgaataccccaggcacgggctgctcatcgtgcgcggcaacaggggaaaatctccgaagctaaaagactcttcgaggccgcaatactcagcgacgccgccaatggatggctactagatcgattcgcatatttcttgttccatgactggcgcgacaatgaatccgcattacatcaggcgaagaaggccgttgagctcctcccttcagagggagaggtctggttcactcgcggactaattgaagcgcgccaaggggacaccagagcggctgagatttcgttgcgaaaggcccaccagctgggaattcccgaagtgcgctgtgatgtgcagcgaatttgggggtatttaaagagcaggcctgtgcagttgccaacagcgaaagcgcttattgcaaagctcgatcgggcgctaagctcacatcgatccgacgcaagattgagaggcgagctccagttactcaaagggagatacgagtttctaaactccaagtacggacgcgaagtttaa

SEQ ID NO: 530609 - DNA, 1671 bp, Stenotrophomonas maltophilia
atggaacagttcaatacgttggaagaagtagtaaatcgcttcgccggactgggagcgacgagattcttctttaagctcttgcaagagaacgacaatagcaaacagcagatttatattgctgacagacccgcgtcgctaagtttcctcgaggcggaatgggcgattgatgcggagtcttccacccccaaggcgagcatcgacttcagatgggttagtccaaccgaagatgagtccgccccccatgccaagctaatcttctatcccagctatcccgaagtccgactttcgggacttctccttgactctcctcttgcgcccagggcctacatgcaaccggtgccgaaatctgaaaggcaggggcagggccaggacgggcgtgttctgatcattggaacttccccaaatggaacgatcctagctcacttggcaactcaagactctggcccatccgctgaagcaatcgctctaaaaagcgacgcaacagtaacggagctacgatggattgacggcacgcttgcgagctcggttccgcaggatagtggtgcgcaaggatatgattctgagttcggtgtcgaagtcgaggcacccgaggacgagaccgaggatagctacagcgatgacgatctatttagcatttcgtcctggggcgccgaccttagctttcgggagctaatcgcccgatatgacgaggacgaacttgtcaaacccgagctacagcgacactacgtctgggataaagcggaggcatccaggtttgtcgattccattcttctcggcctacctgttcccagcatatttcttgcaaagacaaaggatgaaaagctgctgatcatcgatggctatcaacgcctaatgacagtccgcgacttcacaaaaggaattttctccaaggacagctcagtatttaaactttcccggactgaccgaattcacgagagatggcgcggaaaagcgtttgtcgagctgagtacagacgaacagagaaaggttagaaacaccaccatccacgcgattattttcatgcagcaacaggcaaaagagggcgataccagcctgtttcaagtatttgaaagaattaactcaagcggacggacgctacttcctcaagagataagaaattgcgtctaccaaggaaagttcaattccctgctgattgagctcaatggaacttccgaatggcgagatctttggggctccgttagtcgcgacgatcggatgagagacatcgaattcatacttcgattctttgcgctatcgtccgaggaaatactttcgtcagatgaggcgccgcctaggatatctttgaaaaagcacctcaatcagttcatggacagggagtttggtgaagcccaatgctctcagcttcgacgcgaatttacggaaaccgtcaagttcattcacaagaactttgggaaaaccgcttttcacaatatatctttgtccggcgcgtccaagactgtagcgaccttcagcccaacagtattcgattcgatcatgatatcgactcgcctcgcaatcagacagggccgacatacaaaggctacggaccttcagagcaagagaatcgcgaaactgcaagatccggcttatcaaaaattgctgtaccaagagacgatgcgtattcccaatatcagacagcgaatcaacgaaatgcttgatgctctctactga

SEQ ID NO: 530610 - DNA, 531 bp, Stenotrophomonas maltophilia
gtgaataatgtcaacgcgaaggatacgctggacaaatgccttgtggaacttgagaacatcgacaggctccttgatagcctgggggatgaagcgaagcccgcgccgtatttgaaaaagtattcagtaataagagcctctggcagcattgaaagttcgtttaaaacgataattgcagacaaggtagacgacggcagccacgtacagctcaagaatttcattaaacgcaaggtcagaaattcgtcaagcaacccacggtatgaagtaattgtcggaatgctttcagagtttgatgatcggtggaaggctcgttttgtagagcaactggccttagccgataagcctcgacttgtagaagcactaagacgcctggtagaggcgagaaacagcttcgctcacggcggagacccggatcttggcattgcggaaacactgacttgtttccgggacgggatgcaggtcatgcaaatcctggacgaggcagtgcacggcacctacgaagatgagggcggagaccaagttggtgatgaatag

SEQ ID NO: 530611 - DNA, 789 bp, Stenotrophomonas maltophilia
atgaaggaagacccgttgagccgcggcattcaatcggcgctggacgctcgtgctaccaagcgccagcccacggcgttggacatcgcaccggaggccagagaggccaaggccagcctggaatcgaacatgtcttgcatggcccgcatcactgttcccgccggcagtgagcgccaccgggtgaccttccagctgttgagggcatcgatggactacggccgtgcgctgctgttcctcctggagacccatcccatcgatctccccgcagtgggcttggcgatgcaccgctcccagattgagcaattcctgcgggcagtgtttgtccagtcccttgccgacgatgaacagttggaggactttctccaggaagatcgcggcccccgaaagaagaacgagaaaggaaagtgggtggctattgccctcaaggacctggccgcggacgtggagcagaccattgcacgcatcgggcaggacgatgagcctcagaagctggctcggacggtgaccaattcgtgggacccactgtgcggactggtccatggcgggaaggccattcgggtgatgtatcaagatcccaatgggcagatcggggcgcacgtgccagcagccattctttttcagaccaccgtcaacgcggtggccaccaccaacttgtgcgtcattgcagcactgacggcagttggggttggggccttcgaggaaagccccgttgttgagcagtgcgccagcgggatgttgcactacatgcaacggaggaaagctcgcatggaagagctggcctggccgccttaa

SEQ ID NO: 530612 - DNA, 306 bp, Stenotrophomonas maltophilia
atgtccaccatcaccacctacgctctcatcgcggctctcgccgtggtcgttgttgcggcgctgttctacgccttcaggcgagacgccgaagctgagcgaattaagacgacgaaggtgctaatgctcaagcaggtgctcccagcttctcgaccacacgacgaagcagccagcgaggcagacgcgacactgccgaaaatcgagatatccttgttcagtaacacggacgatgcgtatcgcaggaaccacgtttcggtgatcggtgaacgcgatggattccacggaacaagtaacatcggccctccttaa

SEQ ID NO: 530613 - DNA, 1743 bp, Stenotrophomonas maltophilia
ttgaacacgattgtttcggctgcagacctccgccggacggcgcagcagcgttccgacgcctgggcggacaaggtgctgtccacgttgaccagccacatcgatgcagcgtcccgcggcgggcatggcgcgctgcgctttgtgatggataccccagcgatcgctggcggattggagcgggtgttgaaatcactcgatgctcagggttttgtggtctccaacgtcgcaggggagggtgaatgcccgattctggtgatccgttgggatgagactgctgcgtccgtggtcatgggaacggtggcgttgtccgatccgcccggtatcggcaacctgtatgaaatgttgtcaacgtcggcggtagccgtcgccttggaacgcacccagatcaacaagttccacaccaaaggtggaacgggcttcgccgccgaagaggcaaacgcgtttgccgacatccttgctggccgtaaggttgagcaggttggcgcggacaattcgctcaatggcccggatcgaatcgtcgatggcgttcggattcagaccaagtatttcgcgacggcgagggaaacggttggatcggcgtttggagcggatgggtatcgatacgaagggcagttgctcgaagtgccctccgatcagtatgaggacgcaatcgagctgatgcgcaagcgcatcagcagcggtcaggtgccggggatcagcgatccggcggaagccgagcgcatcatcaagaaaggcagcacgacttatcgccaggcgaggaacatcgcccgggccggcaacatcgatagcctgacctacgacatgaagacgcagagcatcgcctccagctatgcgtttgcgatctccttctccatcaacttcgctcggcaaaagtgggatggacggaccaacatggaggcgctcaatggtgcgctgaccatggcactggaatccggtgcaacttcctttgtttctgggattgccaccgcccagatcctgcgaaccaaggccgcggccattggagtggtggcggcccgggatggggtcaagttcgtgtcccagagcgcccttggccgcagtgcaattcagaaggtcgctcaggtgtccttgggcaaggctgtctacggggccgctgcagtcaaccacgtcgccaagctgttgcggaccaatgctgtcacaggggctgtgaccactgccgtgatttctggcccggacttctaccgggctgcgttcagtcgcaacatttcttgggcgcagttcggtaagaatctggcggtcaacggcgcaagcgtagccggcggtgctggcggctggatggctggcgctgcgggtggggctgccgttggttcggtggttccggtcattggcaccgctgctggtggggtgatcggtggcattctgggagcgctggcgggtggtactgcgtccagtgtggcgtccaaatacctgcttgatgggctggtggaggacgatgccaaggagatgctacgcctgcttcctggctatgtagaagccgtggcgaatgactacttgctatccgaatcggagaccaatgcgttggttgagatcatcaagtctcggctcaacgcgtcgttcttgagggacatgtatgcgagcaaggacagggctcggttcgtctaccaagccttcgaaccggattgcgaaaagatggccaaggcgcgcccaacggtcacgctgccgaaggaggccgtcgttcaggcttccctcgacgagatcgaggaagaggtgctgaacgaggttgagtaa

SEQ ID NO: 530614 - DNA, 477 bp, Stenotrophomonas maltophilia
atgcccgtctctgatctcctcgcgttcgacctgctgcgggcgttcgcgcagctggagtttcgcctcaagaacgatccaggctttcttcgcgccggaccctaccgaatggcccaggtgaactggtccgcggtggatgaggcggtgtcacgactggacgattcactcttcttcgatcgggtgtcggacagcacgcgcgagcaaatcctctcacctccgcgtgaccgcccgatggtccaggaggtggcggtggtcaacggcctcaaccacgctgtcttccagcgcctgtcccttcagcaatccaatgccggtgctttggtcgaagcggcacgccgggtgcgcaacaacctcttccacgggggcaaggaagagccgcatttgggcgatgatgacgagtgggccgccgccgcactggacgtggccgagtgcctgcttcacctgctgaactatggaacgcttagatcgggggtaggcccgtga

SEQ ID NO: 530615 - DNA, 495 bp, Stenotrophomonas maltophilia
atggacgtcgtgaccagtgatgatcctggtcattcttacacctacccggccgacatgacggcgtatcctgcgcgctactactaccaggggccatatcgcttcaagaagcattactacccggtccctggcgatctgaattggaagacgggaaagggcaaggtcaccgaagagttcgattgcgctcaggccatcgatatgatggacgaggttgagttttgggtgcgaaacttggttcacccatcccagttctggatgccaacttctaagcagcgcacttacccggatttcgtcgctcgtcttaccgatgggcgtctgctggtggtggaatacaagggaggtgaccgattctccgctgatcaggaaaaggagaagcggttggtcggacagttgtgggccgagcgcagcgacgggcgggccgtctacctcatggcgcagttgagggatgaaaacaacagcagccttacggatcagctgaaggcagcgatcggtgagtaa

SEQ ID NO: 530616 - DNA, 612 bp, Stenotrophomonas maltophilia
ttgtccggcagggcttgcagccctgcacccgcggtagtgccggccgctggccggcagcctcgacagcaacagcaacagcagaagctggctatccgtgggttggcggggtgggtccggttgcgggggacgccgtatatacattcctgtaggctcggtcgcgccatccatggcgctcacgcccccgcaaccggacccaccccgccttcgacagttttccgcgatctgatggaacggccttggggtcagatccgttttccggaggaaaccggatctgaccccagattcatttcgatacctgacagatgtgtcgaccaaggtcgacacccaccaacagccgcagcgatctgtcagaggtggggcggtgtcggagtgcggggtgtcagccgcatggatgcggctgccaagcctacagggacgtacttgcggcgtccccgcactccgacaccgccccgccaaaccacggaatacccgcttctgacgttgacgttgcttgaaggcttcggcaggtgcagggcgcagccctgccgaacccaaccgacttccgccacttgcggtggcagcgacggcccactagccttcggccgtcgttcaccacccaaggaccgcccgtga

SEQ ID NO: 530617 - DNA, 315 bp, Stenotrophomonas maltophilia
atgggtaacgcccaccgcttggctgccctgaagatggcagttcccaccctctcccgcgtcgtctacggcccccaacgcagcggcaagacgctacacggcaaggccatcgcagcgagccttggtctgcagcacgtgcgcgacctggacgacgttcagctgtcgggcgaccgactgcaacgccatggctacctgtacttggcaaattcgcgcgactacgcgcaacgggccgccgacctgatcggcagcgaactcctgcccatcggcagtgcgctggccatgatcgccgccggcagcaagggggtggcccgtgtttga

SEQ ID NO: 530618 - DNA, 345 bp, Stenotrophomonas maltophilia
atgagcgccgtggtgggtcagcgcgccatattcacctgtgacgtatgcggcacgccgttgacgaagcgcaccagtgccctacagcaccgtcatctgcgcaccgacgcctacgtgtgccaaaacccggtgtgtggcgcgacctacgttgggcattctgagctgaccagcatctccagccccagcggcatgcccaacgcaccggcctgcgaactgccgcagacgcccggctacgagcgcgccctgctgctgcagcgctggaaagaagaccgagggaacgtgcaaatggattgggtcgacgctccctcaacacgctcaccggacggcggcgacttgcccgccgtctga

SEQ ID NO: 530619 - DNA, 186 bp, Stenotrophomonas maltophilia
atgcaacggtcgcggcgcactgatacgcacctggccggtgaacacctggccaatcacggccccttcaaacacggtctgacccttgcaaacgcacgtcgccgcaccacgctccataccatcaccgcaactcataatccatcacaccgtatagcgcgccacaccggcgcctcttgcgatgtgagttag

SEQ ID NO: 530620 - DNA, 219 bp, Stenotrophomonas maltophilia
atgacccgcgcgggcgccggattcgtagcattcgacacgatagtcgtgctgatcacgaagatggtcccgcagatctttccacgctggattccttccatggccaacgaaaactacagggctgtctgctgggaccgcctcagccccctgcttattgtcgaaagggctgaaaatgcgctgtacgtgggcacgcgtgggcgctcgtacgtccacaaccgctga

SEQ ID NO: 530621 - DNA, 240 bp, Stenotrophomonas maltophilia
atgactggcgaggatatgcaagagtctggcgcgctccgcgcaaggcagaacgtcatccacgaagcgggcctattccaaggccgacttggattctcgcgcgccataatcttgctggaagagggcgtcgagcagttctccaacgtgcagggtgtgcaatacattccctttgccaaggaccgcataagggaggcgtatggcgacgtgctggccacattgcgccgcgagttcggcggaggctag

SEQ ID NO: 530622 - DNA, 1134 bp, Stenotrophomonas maltophilia
atgcgtgtagcaatcatccacgactggcttacagtcaatgcaggtgccgagaaggtactaaagcagatgctactgctgtacccccaggcagagatattcactctggtggacttcctccctgaggaagatcgctctttccttggcagccacaaggttcacaccagtttcatccagaaaatgccacgtgcacgcaaaagctatcggagttatcttccgctcatgccgcttgccatcgagcagtttgatctcagcggcttcgaccttgttctatcaagcagctacgccgtagccaaaggcgtgctcactggcccagatcaaatccatgtgtgctactgccactccccgattcgctatgcttgggaccttcagccgcagtatctgcgcgaatccgggctggaccggggcctgaagagtgccatcgcacggatcattctctcctatattcgcatgtgggacgttcggaccgccaacggcgtggaccatttcatcgccaactcgacgttcattgctcggcgtattcgcaaggtctacgggcgcgaatctgttgtgatcccgccaccagttgatatcccggagactctccccagctctatccgccaagactactacgtcaccgcttcccggctggtgccctacaagcgcatcgacctgatcatcgaagcgttcaatcaaatgcctgatcgcaagcttgttgttattggcagcggaccgatgctggaacagatgcagcggctcgccaagcacaacgtgagcgttctcgggtaccagccccaggaagtgctcgagaagcatcttgccgaggcacgcgccttcgtatttgcggctgaagaggactttggtattgcgccggtggaagcgcaagcgtttggaacgccggtgatcgcctacgggaaaggaggcatcctcgacagcgtcaaagaaggagaaacaggatctttcttttccgagcaatcttcgttgtcaatccaaaacgccatcagatcattcgagctgcgctgcgcaccttggaatcacacccagatttccaagcacgccaacaaattcagtcctgatgagttccgcaataggctggcgaaagaagttcagcttgcacaccagaaccatcaacgacagaaaaatcatgccattgattaa

SEQ ID NO: 530623 - DNA, 1203 bp, Stenotrophomonas maltophilia
atgacaaatagggatgttattttgctttccacggcggattgggataatccattctggaccaataagcagcatgttgcatgtgaactgagtaggcttggatatcgagtcttgtatgttgattcggtgggtctccgaaggccttctgcttctgcaagtgatatgaaacgaataattggaaggatccgaaaggccttcgccttgcctagaaaggttagggatggagtatgggttgtttcgcccatgctgctaccgtttcatggaaatagcgtggttgggagggtaaacagatccttgctcggattctctttcgcggtctggagtcgtattgttggccttaagccatccgtcctctggacttataatccaattacaacgcagttggtggatttggatcgtttcgcgacggtggtatatcactgcgtggatgatgtaaaggcgcagccgggcatgccgtttgaggcaattgattcacgtgaaaaagagctggtacgagagtcggatgtgatattcgttactgcggagcctcttcttgaggggcgtcgcgatattaatccaaatactatttactacccaaatgtggctgactacgtgcacttttcgtcagcgggttcgtcggatgtccaggttccttcggacattgcgacgctcaaagggccggtgattggatttgttggagcgattagttcttataaaatagattttgaactaattgttggaatcgcccggcgccgccctgactggaatattgtacttgtcgggaaggtgggggagggtgatccttggacctgtgctgaattgctcagtaccgctcccaatgtgcacctcttagggccgcggccttatgctgatttgcctgcttatctcaagggtatgaatgttgccattatgcccaatattctcaatgactacactcttggcatgtttccaatgaagttctttgagtatcttgctgctggcttgcccgttgtaagtgtgcgccttgattctctgagggagtttgcacatgtgtgtagatttgcttcgggtgcggatgagtttgtcagcgagattgaggcaagccttatggatgattcagtggccaaggagcgaggtcagattgaggcaaggcgtcacacttatgagtcacgaacagtcgcaatgttgaatgacattgggcgcctatccaaacaacgaaaatcagggatgttcgatttgcaagcctga

SEQ ID NO: 530624 - DNA, 1482 bp, Stenotrophomonas maltophilia
atgatacgcgcggccttgaagctcgcaacaggctctgtcattgggaaactgtcgggagtacttagggagattttacttgctacagcttttggaaccggtgcggtagcatcggcggcgcgtgcatcccaaacggctacgctagttcctgtagagttcttcgccgctaacgcgctgtcagcgggatttctgcctttatactcttccattgaaaaagagggcagagagagagttataggtttattctgggcagttctttctatcatggttccgatctcctttggcattctgttgatgctgctggttttggcggaatcctgggtttctgtagtggctccggggttcggtccggaggccaggggcctaacgatagaacttcttaaggtgtctgcgttgggcgttccattttatgtggctgggaatttgctttcatatctggcgatggccaatggtgagttctcgttggcttcgatgcgcgccacaatacagaatgtcggcatgattcttggaattgcgcttgcatggtgcttctcggatttttccttgattgcgtgggcgttcctgtgttcctatgcactgtattctgcattgggtgttcgggctgcttgtgttgggagctgggcccctgtctcaatgctaaggcgcgaatactactttgattcgatgtttagatttcttcgcgcaatacgacccttgctccttctgccggtcgtgcttcaagcaggggtagtggcggagcgcgcgattgcttcattgatctctgactcaaccgtggctgcgcttgggtatgcaaagttgattactgagactggagtgcttcttcttgcgatgcccttgggcctcgccggtttggccacaatggggtcaatgacggcagttgagttcaggtcagtgcttgtgaaggttgtttcagcacttctgattgtcacggttccgatctcgttcattctgctgctgcacggagagacgcttgtgcgactcctatttcagcacggggaatttggtgagaattcaaccgcttcgaccgtttctattctttcatctatgtctgtagggctctgggcgcaggttgtaagctactttctggttaaggccatgagtgctcggatgcgcaacggtatggtcgtggcttttacgatgatatcggttgctgtacaaattctaattagctttcttctctacaagaagattggtggagtggcattgggttgcgcggccgcggcagcctcggtgctcttgacttttatgtgttgctggaatttgggtgttcttggtgatttctcgaaatggctattccccatgctcattattgggggggggcacgtggcagcagttatgacgctccctcatccaggtgttggggagcttggtgttgctggagtattctgtgggtattgggtcctggcgcttcttctttggagacggtcgcgcacagttgcttttggtttgattcgccgatcgctggggaagatttatgacaaatag

SEQ ID NO: 530625 - DNA, 1179 bp, Stenotrophomonas maltophilia
gtgaggcttctcatcgttactcgtgttctgcctcatcattccattggtggaatgcaggcagttgcctgggatttggcaagagagtttgctcgcctaggtcacgaggtggccattatcactgcggagattagcgatcggccagatacattctgggacagtggcgtagaaattcgcggcatgaaaggtgttgcatggcggcgatacggtgcgcgatggaggcgaggacttctggatgcctgccccagggaatatctgctgtcctttgatgcgattctcggcgtcagttcagccgccagtcccttcctcgatttggggcatgatgttcggaaacgcatccatatgcaggcgcatgggacatcatttggcgagctggtttcaaaatggagatctcgccgcgcgattgaattgattaagtctctgaaaaatctagtcaatctaatcaaagatttgcgtgattatccacgatatgcttctgttgttgcaatcggtcaagccgttgtaactgaatttgggcgtttccccattgcactcgtattgagtggagaaagaggggcttgtctgattagcaatggggtttcagaagaaacatttcggtatgattctgagcgagctctccgtcttcgagagtcaatgggctggtggaactcgaaggtagtagttacagcggcgcgcttagacgggcagaaggggatctaccaagcgctggatggcattgccgttgctttgagggatgattgttctgttcggtacctcattgttggtgatggaccagaacgggttcgtcttcagagcaaggtgcgtgagctgggtttggaggactttgtgcattttgcgggggcggtttcgcgagatgaaatggtggattacctttcggccgctgacgtaatgctgtttacgacagttcgggtcgagggtttgccaatgaatattctcgaggcattggcgtgtggtcttccttgtattgtttcgcgtcatgtcgtccagcaagagcggccgtcggaagctatagaggaggtggatccccacgatcctgcgagcgttgcacgagctgttaaagtgattcaaccaagaatggatcgtactagcttgctgccggagcgctattcattgcagtatgctgcactgagttatttgaatttgttttctggtgccagtagatcgaagggcgaagtgcaatga

SEQ ID NO: 530626 - DNA, 1134 bp, Stenotrophomonas maltophilia
atgaaaaagcctaaatcgtatgccgtctttaggcatgagctcttcaaacaatccgaaccattcattagggagcaagccgactccgtccctggctggacgccgttttatactggccgcacgcgttctgcacatccggatgtcaattcgtttgcactctgggatgatacgagaatgggggccttttctaaaggatgccagtcgattctcaggtccagtaagggatacattgagccactgcgtgatgccagtgtagagttgattcatgcacacttcggcgtggagggggtctatgccgaaggcttggctaaagaaatggacgttcccttagtgacgacttttcatggctatgatgtaacgctcaaatcttccgagctattgcgttcgatgaagccggcatggattaactacgttctatttaaatctggtctaaaacgcagggggaacctgtttgtctgtgtttctcgccatattgaaagaatggttcttgaaagtggctttcctgaggggcgcgttgtaacgcactacatgggggtggacgtcgatgccttcgcatataagcccgtagcggaacgatcgggaaattacattctccatgtaggaaggctggtggagaagaaagggtgcatagacctcatcaatgcatttcgcctgatccatcgtgggcaccctgatattcgccttgtaattgttggtgcgggaccgatggagagacgtataagggatctcgtggattcgtcgggcctttcgtctcatgtggatttgctggggggggtccctagagagcaagcccgaaagctgatggagaatgcattaatgctgtgtcagccaagtagaacggcggcaaatggtgatactgaaggtcttccgatcgttctcatggaggcggcagctacaggcacccctatagtttcaacttttcatgcgggaattccagagcttataaagcaggaagtgaatggtctcttggttgaggaggggaatgttggagctatagctgaggctatgcgtcactacattatcagcccggctttcgcttcaagggtatctgctcaagctcgcgagatagtcgaggattcgttcaatgtgaaagtgcagtcggctgtattgggtcgactctatgaggggcttctgtga

SEQ ID NO: 530627 - DNA, 945 bp, Stenotrophomonas maltophilia
atggggttctgggttcttcttccattcttttttgggatgattttttatcagtctgttctcagtcactggatgttgcggaagatcaggattctgttgggtgcggcaattacatttcagctgataaattattttattgtctttccgtgggaagggcttacgatcgaaattggcggaatttcatcgctggtcggacgggagtggtctgatggcggtgttcggcgtttggctggcttatccagctcgtctatcgagtcttctttgctcatcgcagtcttgggtttgctcgtggccagcacggagcgtcgatctttgatgcgcgtccttatcgtgctgttcgtctttatttccatttatctcagcacaatgaagacagctgcactcgcatttgcaatttcctcgattccgatccttttgaatcgcagggtggttaggcgcgctcttgggtcattcattgttgctgggttgatcgtcggcctattactgccgttctatatgtattcaaagggcgcggcaatccctgggggcgggggatatgcaagcttgcacgataggttcaccgtggtctggccggcagttattcagtatggcattgccaattctggcatgttatttggcctcggggttggggggttgggggcatcaatgcagctcggtggcggcggatttgcgtatgccttcgtcgataacctctacctttatatgatctttgtgggtggaatctatggggttgctttgattgcaatgatctttacagcagttttgaagttgacgcttgcgagtcgagagttgttcctcgcttgtgggggcactgttctcttttttatggtcatctacggtattacgcaagtcccggcagagagctcggtagctgcagttttcttgggtgcagcaatcatgcggccgttggcgggcaatagagcgcatgccatccgcgtgcggatttga

SEQ ID NO: 530628 - DNA, 1326 bp, Stenotrophomonas maltophilia
atgtcggcaatgatccctggtccaaacgagccagtgctaccggcacttccttcgactgttctaccagcaatagcggcactcacggactcgctcggcatcccacgagcggttttagcaagtgacgaagagatcgtctacgcatggcgggatcttccgcgtgagattcgagaaattcccgacgaactgcgcgatgctctgatagcgaggatgtgcgtggccgtcagcgctggactgtttgatggcgcaataaactatgcatggaatgctgcgatcattcagttgagaaggaaggtccagaatttcggatttcctatcgtttcccagatcatgcagacagattttgaagagaagcacttgcttgaacttcaggatagccgccttctggatctttgcctgaaacttaatttgatcacggaggatggcttcttctttcttgatcaatgtcgaaatgttaggaataactattctgccgctcatccgacgattggctcggttaacgacagggagtttgttacattccttaatcgatgtgttcgctatgcgttggcggatacgtcgtcaccgcgcggcgtggacattggtgcatttgtagcggctgtcaagggggctagattcacagaaaatcagttgagtgtctggatacagcgtctcaaggaaacgcatgatgcccagcggcagcttttggtgggcatggtccatggtgtttactgcgatccgaattcttctgagccctttaggcttaatgctctggatgtttgcgatagcctaaagtctacgttcaatgcggcgataaggtccgatctgatcaatcggcatagcgaatatgccgctaagggtgatgagtcaaggcataccgcttcagctcaattcttcgagaaaattggtttgctcgctattctcaatgagtctgagcagcatgccgtattctatcgggcgactgagcgcttgtggaatgcccataatgggatgaataatttttacaatgaaccgccttttgctgagcggctttatgagatatctcagcagagcgcgatcccggagacggttcaggaaaactttgttcatgtcatttgctgctgttatgtaggtaacggttatggggtgtcgtgggctgctgcagaaacctacgagaagcttattcaatcattctcgcccagggaggtcgcgacaatgattaggttgggcgcttcgaatcaatcggtacttgggcggcgtatcactagtcatgcatcatctcgaaaacgttttaaggaggcgttgaatttaatcgacgaggcgaccgttccaagtggcgtcaaggcctcgtacgatcatttcatcgcttga

SEQ ID NO: 530629 - DNA, 1386 bp, Stenotrophomonas maltophilia
atgaacaatgtcacagatgagctattcgaggatctgccagaccaggatctagatgctggctatcaattggatccagctaagccattggtgttgctgttggggtgggttgaccatgagggaatactcagttcccttaaggctagtgggcgacagtacaagaagaagctcttggattccttgccaaggaactgggagagcacggtcgatatattttcacaatacaaggtaaccgccgtagtagggaaaattccggctcatgttctgagtcttgtggtggacgctcgatacgccggaattagggatcgtctgttttcatctatcggggcggttccaaatcaaatattcatgtttgaggcaatactcgagggtggtgataggaagagagtcaacgaaaattatgaatcataccctcctgcggagaaaattcaggaggcgattgattttcttagggggcatggcgtacaaattcttccttatacttcacgggcggaagtgactgtattggcggagtcctttctggatgatatagataagaatttgattctccgcatgtatgtgccaagagggcggttgtgggcatcggagacggatcgatttcttcagctattccaggattatgtaacgggcgtagagcgacttgaggtgcgtctagatcagaagcgtaccgagcatggggtcatatatgaattccatggaaacgccgcaaaaggccagaaggatcttcaggaggaatttagagaattctccaaaataatggggctgtttgaattcgatgctgatgcggctgaaagtctgctggctgagagggggtcaaatgttaaagagatcgctcgccttgtctccaagtattccaaggaggcgaaaaggcttcagctggatttgaagcatgaggctgaatcaaagtctctgtttattcgccatcggttggagtctgagcttatggatcttaatcctacgacccaggaatggttgaatattcaagggctggttgacggtgcgattccccgtttcggtagtttttcggggggcgcgcttgcgattgggagggcgtcggatccgttaaaaattgaatctgtatgcgttaataactttcgcccagtgtttatcgaaacattgactggaataattgccgaggaaattaatggggatcaacactttgagccggaacatcatcagttgatggagttgatctctcgtcatggtgcggataaggtcaaggagcttgaggcggccgtgtacgaggttgctgacaaaggcgttggtggcgtaggtagattgcgcgcgaaacaaaaaatacttgcgtttcttgttgaatttggaaagaaaactggcgacgtggcattcggtgtactgcaagcctatgttgagaaaaagcttgggctttag

SEQ ID NO: 530630 - DNA, 243 bp, Stenotrophomonas maltophilia
atggcccagcacgaacagacgcttgccatctatgcttcgatcagcgcccaacgccgtgagcgcggcaaccgcatcgtcggttgtttcatcatcaatgctgaagtcgccattaagatcctgggggcgcgcacggcttcgcttgtcgtatcgaagtactgcgataccctgcgcggcgagaccgcgcgcgacgtccaggaagggccgattgggtccaacggtttcgtcacgatcctgcggtcctga

SEQ ID NO: 530631 - DNA, 1386 bp, Stenotrophomonas maltophilia
gtgggctacgactaccagcagaagcgcgccaacggcgcgacctggggcggcttcccgatgtggtacgccgatggcagcccgaccaactatccgacctcgttcaatccgtcgccggactggacctactgggacaccaccagcaagcgtgcgttcgccaccctgcagcatgccttcagcaacggctggaagttcaagatcggcgccacccacgaccgcaccaaggccgacgacaagctgttctatccggcctacaccgcgttcaacaagaccacgggcgccggcatcacgccgatggccggcttctacaacaccgagcgcaaggttgatggcatcgatggctacatcgatgggccgttccagctgttcggacgcgagcaccagttcatggccggcctgagctacaacaagcgtgagttcgccaactatggtgatttccagcctgacttcaacgatccgaatgcacagtacctgccgctggccagctacttcggctggaccggtgatttcccgcagccgaactggcgaccgctgaagcttgccagccagggcaccatcacccagaaggccggctatgccgccgcacgcctgtcgctggccgatccactgaagctgatcatcggtgcgcgctacaccgactggaagagcgaagacgaaggcaacgaccgctcgcacaaagtgaccacgccgtatgccggcctggtctacgacatcaacgatacctactccgcctacgccagctataccgagatcttccagccgcagacgctgcgcaacaagcagggcagctacctcgatccggtcgatggcaagagctacgaagtcggcgtcaagggcgcgtggttcgacaaccggctgaatgcatccgtggcagtgttccgcatcgagcaggacaacgttggccaggaaaccatggacaaggtcgacgggcaaatgaacgagaccgcctacatcgctgcacgtggcaccgtcagccgcggcttcgagttcgaagtgaacggcgaactggcaccgggctggaacgcgaccttcggtgcttcacgttacgtggccaaggacatcaacggcgccgacatcaacaccaacctgccgcagaccgcgctgaagctgttcaccagctacaccccgcaatcgctgcaggaactgaccgtcggcggcggtgccaactggcagaaccgcatctactacgctgcgccggtagtgggccgtttcgaacaggaaggctacgcgctggtcagtgccttcgtgcgctaccgcatctcgccggagttcagcgtgcaggccaacctcaacaacctgctggacaagaagtactactcgcagatcaccggctacggtgcctacggcgacggccgcaatggctcgctgacgttcacctgggcgttctga

SEQ ID NO: 530632 - DNA, 729 bp, Stenotrophomonas maltophilia
atgagcgacaaccagagcatcaacaccaccaccgccgacctggctattcaatcctgcgaagggagcgaggctgcgccggtgtcggagcataggcagcggctgaatgagttggcccagcagttggccagcgcggtgcagcgcaagcgcgccctgctgggcaaggtcgatacgatgcagcgcgccaaacaggctgcacagggtgatgccgccgctgcacgacagcagtggggcgccaagctgcgcgataacgatggcacgctcacccgcgacattcagaagctgcgcgccaacgagcgctcggcactgtctctggctgaggaatatgaggcgatgcagggcgagattgaggccgagctgccgcgcctggaactggaattggccgaggtggcgggctactgcctcaacgcaagcagcaacgtcaccagggaagcggccgatcaggcctacgagcagttgctgatagaggctggagacagcctggccttcgcgtttgctttgttctcgagagcggagggctccggcgatgcaggcgcactggccagccggttctttggccgactcggcaatgcggtgcgccatcgcctggacgatgccgcattgacggaccaggtgacgcaagtgttggcgctgccgtcgattgacctgagcgcggtagacatggtgctgatgcgtagcccgattcgtcgtatacagttgcgggagaagatcagtgctcggggcgcggcgtga

SEQ ID NO: 530633 - DNA, 285 bp, Stenotrophomonas maltophilia
atgaccggttcaagagctttcctgcgctgcccgcattgcgataccccagccatcgttcgtaccagcgtgctgcattccaggctgctgcgcgaatccgtgctccagtgccgcaatgcgctgtgcggccacacgttctccgcctacaccgagatcgtgcgtacgcatgtgccaagcgcctgtccgcgcgctgagatttgcctgccgctgagcgattccgcagaacgccgcgcgctcagtgagaacgccactgaagcgccgcgcgccaagcgcagtacacgtcgatga

SEQ ID NO: 530634 - DNA, 204 bp, Stenotrophomonas maltophilia
atgaaagacgccatcgtcctgaccatctccaatcagaagttcaccctgagcccggcagaagccaagttcctggccgagcaccttcgcactgccatcgcacaaccgaatctcgcgctgaacttctcccagagccggactgcgcaaggcggccgcattgcactctcgcgcggtgtcgcgggtagccgttccaccaccgactgctga

SEQ ID NO: 530635 - DNA, 273 bp, Stenotrophomonas maltophilia
atgcttggttccccctcccctccggcgaccgcacctggtcagcctgccgatcattctcggcctgaaatcgcacgcggtgagcgctttctgcgcaagcccgaagtgctcagccgtaccggcatttcccgctcgcacctgtactggctgatgaagcgtcgccggttccccgcctcgatccccctttccccgcgcgtgaccgtctggctggagtcggacgtggacgcgtggattgccacccacatccccgacacccacccgcgagtgcagccatga

SEQ ID NO: 530636 - DNA, 273 bp, Stenotrophomonas maltophilia; identical to SEQ ID NO: 511774

SEQ ID NO: 530637 - DNA, 348 bp, Stenotrophomonas maltophilia; identical to SEQ ID NO: 511773

SEQ ID NO: 530638 - DNA, 312 bp, Stenotrophomonas maltophilia
gtgcactcgcccaatggcaagaaggatggcttgcagctgatcccgatcagcgaagtggccgccaaggatgaattcaccggtatcaagcgcgtgacccgcgatgacattctggcggcgctgcgcataccgccgcagctgctcggcatcgtgcctcagaatgcgggcggattcggctcgattcgggatgccgccaccgtgtgggcgtcgatggaactagcacccctgcaatcacggatggccatggtcaacgaatggatcggcgaggaggttattaccttcgccccgtttgacctggcgcccctagcaacctga

SEQ ID NO: 530639 - DNA, 153 bp, Stenotrophomonas maltophilia
atggaactggcgattgaggtcattgccaaccacaacattggccgcccccttgaaggcctggtagcgctttacgcgcacccgcgatttcagtcccatctcccccatcaggcgctgaacccgcttgtgattggtccgatgaccctgattggctaa

SEQ ID NO: 530640 - DNA, 1137 bp, Stenotrophomonas maltophilia
gtgccagacctgtccctagtgaaaacccgagagaaactgaaagccaaccgagagccacattggcagaagctagggaccggacagttcatcgggtatcgagtgccagcaggtacatggatcgctcgccattacgacccggtagcgatcaagtacgtgtcccgctcattgggcgactacgccaacctgccaccgaatgaacgctacggagcggccgtcaaggcagcacgcgaatggctcgaccacctcgctcgcggcggctccaaggaagtcctgacagtccgggatgcctgcgaaaggtatgccgaaggcaaacccgacgcagccaagcggttcccgcgttacgtctatgacgaccccatcgcacacgttcagctgcagaagctcaccgaccgacatgtccgcgcatggcgcaagcgactggaagcgacccctgccgaggtctccaagaacaagaaggggccgaaggtcacccgcccgcgcagcgctgcgaccgtcaaccgggacatggtgccctttcgcgcagccttgaacatggcccttgatagcggcgacgttctgaccgccaacgcatggaagaaggcattggaaccggccgaggcgaaccagcgccgcgaactctatctgaacaaggagcagcggaggcggctactggatgccctcacgggagacgctgccatcctcgcccgcgccctttgcctgctcccggtacgacctggcgccctcgctgacgccgacgtgtcgcattacgacagccgccttggcgtcctctccatcgctgccgacaagtccggcgctggtcgcaagctgcccctgtcacagggcatgaagaccatgctggacagcctgtgccggaacaagctgccgaatgccccactgttcatgcgcggcgacggttcacgctggaacaaggacaagtggaagaaaccattcaagcaagcagccgaggcggcgaacctcccgaaagaaacctccgcgtataccctccggcactcggtcatcactgatctggtgtcttccgggctcgatctattcaccgtcgcacagctggcgggcacctccgtacgaatgatcgaaaagcactacggccacctccagcagcatctagccgccaaggcgctagaaaccctcgccatctga

SEQ ID NO: 530641 - DNA, 2415 bp, Stenotrophomonas maltophilia
atgccaaacaatccggtccaagtcgtactcaatgccaaggactaccagtacgtgcccgagcgcaacggcggtagtcaggtcaaggacttcttccaaggacgggatcaagcgttcttggcgcataagcagcgtctgctgaccgagctggaccaggtcggccgtacgttggccaaaggcaatcgaccgttggtcacctacatgcacgtggcccttaatgaagacgcgtgggccaagaccaagcgtccgaccatgcggctactccccccggccaaggtaccgatcgtgggcggacgcaacttaggtgacatgatcgttgaacttacaccggagaactttgccgacattcgcggcggcatcagtgcggcagagatcgaagtgcccctagcgctggacaagcgcacgcaagagctcaaacccaagccttcgcgggcgcgaggcgaggtgggcgccatcctgtctttccgcgcgcaccacgccgcagaccgtcgttcgttctcggcgcaggaggctattgaatggttggccgaccctcgtaccgggggcatgtacttagtggaaaccttcgtcgacccccgcgtcgcgcaggacgcgacgagccgtgagcgccggcgccgggcaattgcagcattcaacgaccttcgcacgggattggagcagctggcgctgccgttggatatcgaagataccgccatgcgctggaagagcgtcaggctcctgctggtgcgcctcaacagccggacactggccacccacgaggcgttgctgcggtttttggatgagcatcccatcgtgcgccgtatcggcctgccgccgatcctggagatcgagcagaccgcacccggtgcgaaggggccgccggccgcgatctcggcgccccagatcgacgccggctatccgatcctaggcatcgtggacaccggggtgacgccggtgccggtacttgagccctggtgcgtcgggcgcactgatgtggtaaccagcacgcagcaggatcgcgcgcatggcaccttcatcgccgggttgtcggcggcggcccacgaattcaatcaacacccgctcttcgacgagatcccatgcaagttctacgatatgggcttgcatcccacccagccggacgtctatgacgatgtctacccacgcgggttcatcgacttcctcgaacaactggatgcggaaatccccacggcggtgaaagccggcacccgcgtcttcaacatgagcctgtcgatcgagcgggccgtgtccgatgccggttatggcgactacgccaccttgctcgatgagatctccgatcgccatgacgtggtcttcgtcctaccggcaggcaacctgcgcgccccattgtggcggccggtgtggccggacgcgcctgccgacgtggcggccatgctggcggggtatcggcatgcgggccaagatcgtctgttccagccggccgaaagcattcgctcagtctccgttggagccgtggacccgcccgatgctaaaggcaacctgcgtccgtcggtgtatacgcgtcgcggtcccagcacggcgctgggcttgaaaccggatctggcgcacgtgggtggggagggcagccacacctcgaatctattctccctcgatcccaccggcgccaccaccagcggcctgggtaccagctatgccgcaccgctggcggcgcgcacgctggccagcttgaaccatctgattgaaggtgacgtccagcgggagacattgatcggcatgctcgtgcaccacgccgcagtcccggccgcgttgaccgacaaacaggtcagcaagttcgcggccgacttcgttggccacggcattcccgtcaatgcgctgaacatgctggccacagacgatagcgcgatcacactggcttttgtcggcaccttgtcctcgcagcaggagttggagtttcctttcgcatggccggccagcttggtcgatgagaaaggcagatgccgcggtcgcgcccgcatgaccttggtctaccgcgccccgacgcactatcagttcggcgcagagtacgtgcgggtgaatctcgaaggtcacctacgccaagaggtgatcaacgccgctacgcgcaagatcagctggaagggccgcctgaagtcagagggcaagatctacgaaaaacacctgattgagcatggtcacaaatggtggccgattaagcgggccgagcagaactttgtacgcggcgttggcaactcctcgcagtggcgcctggtggtcgattccttgtgccggacggatgtggcttttccggaggatggggttccgttcgcggtcattttgacgctggatgatcccgagggtcaggcaccggtattcaacgacctgcgccaagcgctgcgcgccagtggcgtgcagattgatgacatccgcacggcggcgcgcatcaaaccgcgtggcaggacctaa

SEQ ID NO: 530642 - DNA, 1188 bp, Stenotrophomonas maltophilia
atggagcacttcaccattgttctggccctactacgcgcggcactgaaagtgccgagtccggctgtgaccggtcacgccgagcgattgctggccgccttgcgaaaaggcggcgagacgatccaggccgagcagttggaaaaactactggagggagggagcgtggcgggtcggatgcagccaagtagagtcgtgctgtcgcgcgcagcgttgcctggcgaaccgctgacccctagcgtgcggccgccggtcgacaaggagaccggtggcgcgctggcggacataacgttgcctgacgcgctcacgcccatggaggcgcccgtattgaacaacgcattgcgcggatcggtagatgccctagtggaggagtggcgccatctggatcggctgcgcgccatggggatacgcccgccgctgaactgcctactcttcggcgctcccggaaccggcaaaaccaagctagcgcaaatcgtgagcagagagattgggctgcccttggtgacggcccggctcgatggcctgatctcctcctatctcggcaccacagcgcgcaacatctcctcgctgttcgcttttgccaaccgctaccagtgcgtcctgttactggacgagttcgacgccatcgccaaggtccgcgatgacccccatgaagtgggcgaaatcaagcgcgtcgtcaacacgctgctgcagtgtctggatcaacgtagtgacttgggcatcacgatagccatcaccaatcacgagcaacttctcgatagcgctatctggcgtcgcttcgacatccgcatcgccgtgccgcgcccggacctcgaatcgcgcctggagatcgtcaaccgctacgttacccccttggaaatcgcactgcctgagcgccgctttctggcttggctgaccgaagggctgaccggtagcgagattgaaaccctggcaaatgccatcaagcgcgccgctgcgctgaactcatcggccgacttctcggccttgaacgcactcaaagtccacgcccaactcagttctaaccatcgtcatcacccgcgatgggagcagttgttgggcccggccgaggcgttggcggccaccttgagtcgtgatcgagaactggccttcagccaggaagacctagccagattcttcggtaaagaccaatccaccatcagccgctggaaacgaaggtaccgcgagggatcctaa

SEQ ID NO: 530643 - DNA, 861 bp, Stenotrophomonas maltophilia
gtgaaagatgtctctgcctggaaacctctgctgcaggagctgctgaagcagcagtcagtggagcccgccgcccgactgcggcagcgcttggtggacctgggcgagcaacgcggcctgggtaccttcagttacgtcgagctgggtttcccgcgcttccgcgcctttctcgagcaatttcccgacgtgctcgaaatgcgtgtgcgccccggcggcgatatggaagtgctctcgcttgcggcagccgcggcacagcccgtggcggtacgtggcgagcaccgggcaatgtcagcggcgcgcgaagacgtgtggattgccttctccaatcccgatccgcagcgcctgcgctatttcaatcgcaagactggcgcggtcaagcatttccaacagaccgacctgggtgcggccgttggcctgactccggtagcagattgggtgaagattgagccggtgcctggcacccaacagaccgcttggatgcaggagttcctcgcccaggcgtctacccttgtggcagccgactatccgatgatcgcgcagccctatcgcaccgcggtgaatgtggaattcaccaaagcgttgggcgcggccggcaagcaatggacccagttccgcaccggcaagatgttcgaggtgatgagccaatgggcgcaacgcgctggagtggacgtatcgatgctgcttccatcgttcgagacgcgccacgcgcatccgcccgtctctactgcgtcgctcaccgatgcagcggcgctaagccccaagcagcgcgccctcaaactcatcgagtcgctgaccgatcaggagatcgccgacacgctgattccgctgatggcgtccataatcatggtgagtgcacgccggtaa

SEQ ID NO: 530644 - DNA, 840 bp, Stenotrophomonas maltophilia
atggcaacgtttgtcattggactgcccaacacattgcaaaagcccttcctcgccgaagccggacgccggcaggaagaggctgggctgtgcctagtagtcaaatcgaactatcgatacatcttcaatccgccctctgagcaggccattggcgatctggaacgcttcgccgatgtacacgactggacctcgctgaccgtggtcgcgctgccttacgtgggttggccggaaggcatgaacgatgtgctggaactgctagctgcaaacggcgcccaggtgatccgcccgcagttggggcaaggcgactggccgccacggctggtggggcaacgcgccgaggacgattttaccaacgacgtacgcttggccctgttccaagagctgggctggcaggtcaccgcttctccagctgagcgttttcgacgctcggccgaaaagctggccgattacattatcgttggcgctgcactggatcgctgcgatgaggtgcatacctcgcggcatccgttcttgaagcgctcggcagagatgttagacaagttctgcagaaagaaggggcgtctcggaatgacgctggaagactactgccgcgacaagcgtatcggggtggcccactctggcggcatcagcacctgcatccgcttgatgaaaggcgtcaagcagttggagcggtttgactccaacctgcatctcaaagaaggtgacggcactagcgaaaccgccgccgctcgaatctactttcaacatcttgatcgaaatgagcagttccggctcttcctgctctacgctggtccacatccttccgctgacatcgaccaaaaggtcgactggctgcacgactag

SEQ ID NO: 530645 - DNA, 825 bp, Stenotrophomonas maltophilia
atggcccgatgggcggtggacagtgggctatcgagcatccggcacgcctgccagactttcgcggtgagacagacctgctaccgctaccaggccaaggcgagcgaggagaatgctcggatcgccgactggctggtgcgattgacgactgcctatcgcgactggggtttcggcctgtgcttcctgcatctgcgcaacgtcaaaggctttggctggaaccacaagcgggtctatcgcatctaccgggagctggagttgaacctgcggatcaagccgaagaagcgcctggtacgcgaacgcccggagccactggcggtgccggaggcgatcaaccaggtctggtcaatggacttcatgcacgaccagctcagcgacggatgcagcttccgcctgttcaacgtgctggacgatttcaatcaccaagggctgggcgtcgaggtggatctgtcactgccgtcggcccgagtcatccgtgcactggagcagatcatcgaatggcggggcaggccgcgggtgatccgttgcgacaacggccctgaatacatcagtggcgtgctgctggcatgggccgagcaacaaggtatccgcatcgagcacatccagcccggcaaaccacagcagaacgcctatgtcgaacgctacaaccgaaccgtacgtgttacgcctggctggcccgaaccctgttcgactcgatcgagcaggtacaggacaaggccacccgttggctatggacttacaaccacgagcgcccgaacatggcgctcggcggcatcacgcccatgcagaaactggcacttgccgcttagctccacttttggagaccgctaa

SEQ ID NO: 530646 - DNA, 705 bp, Stenotrophomonas maltophilia; identical to SEQ ID NO: 8686

SEQ ID NO: 530647 - DNA, 1890 bp, Stenotrophomonas maltophilia
atgacgtgggcggcgacgcaatggatagcattccgcctcggcttccagccgcagcttggcaatccgtggttcgagctggtgggcctgccggtctattatccaccggccttcttctggtggtggttttcgttcgacgcctatgcgcccgcgatcttcgtcgagggcggcatcatcgccgtatcgggcggcttcctcgccatcgctgccgccatcttcatgtcgatcatccgcgcgcgcgaagcccggaacgtcgccacctacggttcggcgcgatgggccgaggacagagaaatccgcgcggccggattgctcggccccgatggcgtcctgctcggccgatacgaccgggactatctgcgccatgatggtcccgagcatgttctatgcttcgccccgacgcgcagcggcaaaggcgtcgggctggtggtgccgacgctgctgacatggccggcatccgccatcgttcacgacataaaaggcgagaactggacgctgacagcgggcttccgcgcgaagcatggccgcgtgctgctgttcgatccgaccaacgccagatcgtcggcctacaacccgctgctggaggtgcggcagggcgaatgggaagtccgcgacgtgcagaatatcgcggatattctggtcgatcccgaaggcagtctcgacaagcgcaatcattgggaaaagaccagccatagcttgctggtcggcgcgatcctgcatgttctctacgcggagaaggataagaccttggcgggcgtcgccaacttcctgtccgatccccgccgcccggtcgaggcgaccttgcgcgccatgatggacacgccgcatctcggcgaggcgggccttcatcccgtcatcgcgtcgtccgcccgcgaactgttgaacaaatccgagaacgagcggtcgggcgtgctctccaccgccatgtcgtttctcggcctctaccgcgatcccgtggtggcgcgggtgacggcgcattgcgactggcgcattgccgatctggtcggcagccgccagcccgtcacgctctatctggtcgtgccgccatccgacattaaccgcacaaagccgctaatccgcctgatcctcaaccagattgggaggcggttgaccgaggaattgaccacctccggcaagcgccatcgcctgctgttgatgctcgacgagtttccggcattgggcaggttggattttttcgagtccgccttggccttcatggcaggctacggaatcaaaggcttcctgatcgcgcagagcctcaaccagatcgagcgggcctatgggccgaacaacgcgatcctcgacaactgccatgtgcgcgtcagctttgccacgaatgacgaaaggaccgccaaaagggtgagcgacgcgctcggcaccgcgaccgagatgcgcgattccaccaactatgccggccacaggctcgcgccgtggctcgggcatctcatggtttcacggcaggagacagcccggccgctgctcacgccgggcgaaatcatgcagcttccgcctaccgatgaaatcgtcatggtcgcgggcacgccgccgatccgcgcgaccaaggcccgctatttcgaggacgcgcggttgcaggaacgcatcctgaccccgcccgatctggtcgccgctccgctggcgcccagcccatccgccgatgattggtccggccgcgtggtcgcggcggaaagccgttccgcgacgaggggaaacgaggccgagggcgacccggccaatgccggcatccgccgcgagccggaattgcccgagcatgaggaaatcgtcacgccgacgccatcgcccgaacaggagttcgagtttctggacgacgagccggacgttgacgccgccaaggcccgcgccatgcgccagcgggctctgttgcaaaaatcgtga

SEQ ID NO: 530648 - DNA, 942 bp, Stenotrophomonas maltophilia
atgcggcgcacccgccatcgcagcctcgtgaatggcggtatcctgtccggcaggataccgctcatttcccttgttcagttcgttgccgtcgctgagcatctgaactttcggcacgcggccaacgcgctcggcgtcagtcagtcgagcgtcagcgcgcgcgttaaggcgctggaagaaaatcttggtgtcctgctgttcgagcgccatgcgcgaggcgtccggctgacggatgcaggcagacacttcatggagcgggtcgtggcaggcgtcgatcaactcgatcacgccgtcaagaccgccggcatgacagcgcaaggcgaatgcggccggctacgcatcggtgtctatgccctgattccgggcggcttccttgcagagctgattggtcagtatcgaaaggaccatcccaatctcgacatcgaaatcacggagggcacagcacgcgatactctcacgcagcttcgagccgaccggctggatattgcgttcgttgccggcacgtccaaaccgcccgactgtcattcccggcgaatatggaccgaaccccttttagccgctgtgtcggcgcggcacgctcttgttggacgctcggccgccacatgggctgatctggcagcggacacgttcatcgtcagacatggtggcaccggcccacaagtgcatgaccatatcgttttacgccttgccggaacctggcccgcgccttcgatccttagatttgatgttgggcgcggcaccttgctgtcgatggtgggacaggatttcggtatcactgtcataggtgcggcttcgtccctcttgccaacatccggggtggtcttcctgccgatcaccgacgaacccgagccggtcgctttctcggcggtctggtcgcctcacaatcgcagtgttgcgctccgaaatttgcttggactcgccgacaagatgagccgatctaattga

SEQ ID NO: 530649 - DNA, 1215 bp, Stenotrophomonas maltophilia
atgaccaccacacgccccgcgtgggcttatacgttgccggcagctctgctgctgatggctcccttcgacatcctcgcgtcactggcgatggatatttaccttcccgtcgttccggcgatgcccggcatcctgaatacgacgccatctactatccaactcacgttgagcctctacatggtgatgctcggcgtgggccaagtgatcttcgggccgctttcggatcgcatcgggcgacggccagtcctgcttgctggcggggtgattttcgtcgttgcgtctctcggagcagcatggtcgtcaacggccgcagccttggtcgccttccgcctgcttcaagcggtcggcgcatcggctgcgctggtggcgacgttcgcgacggttcgcgacgtgtatgccagccagcccgagggcgtcgtcatctacggccttttcagttcgatgctggccttcgtacctgctcttggcccaatcgctggagcactcatcggcgagtttttcggatggcgggcgatattcgtcacgctggctgcgcttgcgttacccgcactcttgaatgccggtttcagatggcacgaaacccgcccgttggacggagcaggaacgcgccgatccgttttgccgatcttcgcgagtccggccttttgggtttacacggtcggctttagcgccggcatgggcactttctttgtcttcttctcgacggccccccgcgtgctcataggccaagcggactattcggagatcggattcagcttagccttcgccactgtcgcattcgtcatgatcgtgacaacccgcttcgcgaagtcctttgtcgccagatggggcatcgcgggatgcgtggcgcgtgggatggcgctgctcgtttgcggagcggtcctgttggggataggcgaactctacggctcgccgtcattcctcaccttcgtcctaccaatgtgggttatggcggtcggcattgtcgtcacggtgtctgttaccgccaacggcgcgcttgcacagttcgatgacatcgcaggatcggcagtcgcgttctacttctgcattcaaagtctgatcgtcagcatcgtcgggacattggcggtgacgctgttaaatggcgacaccgcatggcccgtgatcgtctacgcgacgacgatggcggtgctggtatcggtgggtctggcgctacttcgatcccgcgacgttccttccgagaggtcgccagtcgtctaa

SEQ ID NO: 530650 - DNA, 441 bp, Stenotrophomonas maltophilia
atggccgagcagatcctgcacggttcgaatgtcgtaaccgctgcggagcaaggccgtcgcgaacgagtggcggaccagcgccgcgagcatcatatcgaacagggcgacgccgcccgagcgcgggacggccgcatcttctatcggcgtagtcttctcgccacgttgcgcgaacgcgaggttgcccgcgtcggcgccgagatggccgagagcaaaggtctgccgttccgcgcagcagcggatggcgagagcgtcagcggcaagttcaccggcaccgtgcagctatcgagcggcaagttcgccgtggtcgagaaatcccatgagttcacccttgtcccatggcggccgatcatcgaccgtcagctcggccgcgaggtcatgggcgtcgtgcagggcggatcggtgtcttggcagttgggccggcagagagggattggactctag

SEQ ID NO: 530651 - DNA, 300 bp, Stenotrophomonas maltophilia; identical to SEQ ID NO: 270461

SEQ ID NO: 530652 - DNA, 792 bp, Stenotrophomonas maltophilia; identical to SEQ ID NO: 437473

SEQ ID NO: 530653 - DNA, 3087 bp, Stenotrophomonas maltophilia
atgagcgcgccggactatgcggaactgcattgcctgtcggcattttccttccagcgtggggcgtccaccgccaaggaactgttccagcgggcccgggaacagggttacaccgccctggccattaccgacgagtgttcgctggccggcatcgtgcgtgcccacgaggcggcaagggaatcaggcgtgaggctggttgtcggtgcggagatgcaggtcgaagacgggccgaagctggtgctgttgtgcgagaacctggccggctaccagaccttgtgccagctgatcaccgtcgcacggcggcgggcgaagaaggggcaataccgatgcctgcgtgaggactttcctgacgaggtgctcggacttttctgcctgctctgtcagacaactcccacgtccgatagcgacatcgactggttgaaacagcgtttccccggatgcctcggactggcgttggaactgcaccgtgggccgaatgacgtccagcaccaggacaggctccagcagcaatccatccaccatgggctgccactggtggcggcgggcgatgtgcatatgcatgtgcgccgccgtcgcgccctgcaggacacgctcaccgccatcggccaccactgcaccgtggccgaagcgggctggcggctgttccccaatggcgaacgccacctgcgtacccggcaggcgctggcggcgatctatccggctgaggctctcgcgcagagcgtgcgcatcgcggcacggtgccgcttcagcctcgacgagctgcggtacacctatccccgcgaactggtgccggccggctacacgccggcacgctggttgcggcaactggtcgaggagggcgcggcatggcgttggccgcaaggggtgccggacaaggcgcgcagccagatcgagcacgagctggcgttgatcgccgagctcgactacgcgtcctactttctcaccgtccacgatctggtgcggtttgcccgcagccgcggcatcctgtgccagggccgtggatcggcggccaattcgacggtctgtttcgcgctgggggtcaccgagatcgatccgtcccggatgtgcctgctgttcgagcgcttcatctcgcgcgagcgcaacgaaccgccggatatcgacatcgatttcgaacacgagcggcgcgaggaagtactgcagtatgtgttccagcgctacgggcgtgatcgtgcagcgctgacggcggtggccaccagctaccgtggccgcagcgcgatccgtgatgtggcccgggcgctgggcctgccttccgaccagatcgacgagctggcccggacactggatcgctggagcggcgatacgcccttgccgcagacgctgcgcgagcgtggtttcgatccggacacgccggtcatgcgccagctgctggcattgaccggtgaactgatcgactttccccggcacctgtcccagcacccgggaggcttcgtgatctccgagcatccgttgcataccctggtgccggtggagaacgcggcgatggacgggcgcaccgtcatccagtgggacaaggacgacctcgacgcgctggggctgatgaaagtcgactgcctggcgctggggatgctcaccgccgtgcgcaaatgcctggacatgctgcgtgacacgggccggcgcgagctgacgatggctacgattcccgccgatgaccgcgacacctacgccatgatcggcaaggccgataccgtgggcgtgttccagatcgaatcgcgggcgcagatggcgatgctgccgcgtttgcggccacgcaatttctacgacctggtgatcgaggtggcgatcgtgcgccccggaccgatccagggcgacatggtccatccctacctgcggcgtcgcaatggcgaggagccggtcgaataccccccgcaactgggccatgtgttcgagcgcacgctgggcgtgccgctgttccaggagcaggtgatgcagctggcggtggcggcggccggtttcaccccgggcgaggccgatgcgctgcgtcgctcgatggcggcatggaaacgccgcggcgggctggagccgtaccgggaaaagctgacgcagggcatgctcgaacgcggctacagcctcgactatgccgagcagctcttccaccagatcaagggctttggcagttacggttttcccgagagccatgccgccagcttcgcactggtcacctatgccagttgctggctcaaatgccacgaaccggcggcgtttgccgccagcctgatcaacagccagccgatgggcttctataccccggaccagatcctgcaggacgcgcgccgccatggggtcaaggtacggccggtggacgtacgttacagccagtgggattgcacattggagtttgcccgcggtgatgggtcgggaaaccctgaaatccgcctcggactccggatgatcaacgggttccagtcggtggtggccgagcggctggccgggcaacggcaacgtcggggcttcaccgatgtggccgacctcagccatcgcgtggacctggattcgcgccatcttgcattgcttgccgacgcgggcgcattgaaggggctggccgggcatcgccatcgcgcacgctggcaggcatcaggtgtggaaaagacgctgccgctgttcgagggcctggcgggaacctgtgagcccgcaccggccttgccgctgcccacgccatggcaggacacgcaggcggactacagcaccacggggaccaccctgggcaggcacccgatgcgcttcattcgccggcaactggaggcgcgtggctacctgcgttcggtgcaactggaagtgctgccgcacggcaggcgcgtgcgccatgccggcatcgtgcgcatgcggcagtcgcctcccacggccagcggcgtgaccttcgtgacgttggaagatgaggacggcatgatcaacgtcgtcgtctggcagcaggtgatgcagcggcagcgccggacgctggtcgagagcagactgctcggcatcgaagggcgatgggagcgggtggagggtgtgtcgcacctgatcgccgaacggatgaccagccttgatgggctgctcggtggcctggagacaggcagccgtgacttcagatag

SEQ ID NO: 530654 - DNA, 1407 bp, Stenotrophomonas maltophilia
atgcgctgggcttgcctgctgctgccgcacctggcgatggatgccgtcctccggcaattgccgacgccggaggtgccgctggtgctggccagtggcccggcgcagcgccgggtgttgcatgcggtcgctcctgcggcccagcgactgggcctgcggcggggcatgcgcctgtcggcggctcaggcccttggttcggatttcatcgtccagaatcacgacccgcgcgtggaccaacaggcgttcctgttgctggcgacatgggcatacagtttcagctcgcaggtctgtaccgagttcgggcatgcactggtgctggagatcggcgccagtcgggctctgttcgggcagtggcctgatctggaacggcgcctgcgcagtgagctggatatgctgggcttccgccatcgcctggtggccgcgcccaatccccacgccgcctatgtgctggcccgcaaccacgacgggctgggggtggatgaagggcaactggaagcggcgctggggcgggtgcccatcgaacgtgccggcctgcccaaggccgcagtcgataccttgagccgctcgggcctgcgtaccttgcggccggtattcgcgctggcccgcgagagcctggtacggcgctttccgccacaggtgctggcccatctggatgccatccggggcagggacgccgcgccgctggcgtatttccagccgcccgaccgtttcatggcccgcatcgagttcgagtacgaggtcgaatccagcaccgcactgctgtttccactgcgccggctgactggtgatctggccgccttcctgtccagtcgcgacggcggggtgcagcgcttcgtgctgaagttcgagcacgagcgtcacccggccagcaccctggtggtgggcctgctgaccgccgagcgcgatgccgccgtgctgttcgagctggcacgcagccgtctggatcatctgcggctgccggccggcacgcgcggcatgtcgttgctggccgaggaactgccgccgttcgtgccggtggcgcgcgacctgttcgacacccggccacagcaggcgatggactgggagcaactgcgcgaacggttgcgggcacgtttgggggatgaggccgtgcagggcgtgagcgtgcacgccgaccaccgtcctgaacgggcctccggggtgtcgtcggcttcaacgttgccaccgcagttgccccagcgtccggcatggctgttgtcgcaaccggttccgttgcggggtttcgggatggaagtgctgtgcggaccggagcggatcgaatcgggctggtgggatagcgagccggtgcgccgcgactattacgtgctgcaaacgcgcaacggccagcgcgcctgggcctttaccgcaccgggcgagcgtggcccgttcatgctgcacgggtggttcgcatga

SEQ ID NO: 530655 - DNA, 615 bp, Stenotrophomonas maltophilia
atggctgcggtcgtggcactggatgccttggtgcataccggtcgggtttggcgcggccagccggcgggtgttccggaggttgcgcctcagcccaccgggtatgacgcgctggatgccgtgctgccggcccggggctggcctgcacacgccctgtcggagatcctgctgccggctgacggaatgggggagatatcgctggtctggccaaccttggcccggctcacgcgtgcaggcttcagggtcgtgctgatcgcgccgccctatcgaccgcatgcgccggcatgggcccgggccggcatggacctgagccaggtgcaggttgtccatgcatctccccgcgaggccttgtgggccacggagcaatgcctgcgctcggccgcttgtggcgcggtcctgtgctggccggccaaggccgatgaccgcgcgttgcgtcgcttgcaggtcgctgccgagacgggccaatgcctgggtttcgtgttccgtgatgcacgccatgccgacaacccgtcaccggtcgcgttgagcctgcaggtcagtcccggccagatccgggtgctcaagtgccgggggggcaatcctcccgcccggtcgatctgcttctctgcgattgcgtga

SEQ ID NO: 530656 - DNA, 159 bp, Stenotrophomonas maltophilia
atgaaagaccctgatgacatcgaacacgaggcacccgacccaatgaccatcgcaactgcaccactcgacatgccccagtccgaacaggacgtgtggagtgccttgcgcagctacttgaacctgcaggtgccgctggccgctattctccgcagcccataa

SEQ ID NO: 530657 - DNA, 657 bp, Stenotrophomonas maltophilia
atgagtcaccagctttacgagctggacctaggccaactggccaacaccattgaagacctcaccaagcaggtcactgtccttgaggcactgatcgagatcgaagccaagcagctgagtaaatccttcaaggaagcgaggaagaacgccaaggaccaactaggcgaagccaccaccaaggaaaagcacaaggctcaatttgcaccactgctctttcacacccggctccacaagggcagcttggagatcaactggtcactgctgaaggccaagaccaagcccaacggagcgagtgctagcaggccgatctaccacaacgtcgccaagggcaaggggttcggataccgtttgccggatctgatgtcactctcccgtgactaccagcaggtgctggtactcgaagccgaacagaaagctgtggtgctccgagagctgtggtcgaagatcgtcaacttgcgtgtgtcgatccggacgctgagtcgtctctgcgaagagaagacaaatccggtggaaaaggtcgaggaggccaagcgtgagggattggccgctgagctggcggtgcagggggatgagcgggagaggcggcgccttgccgatgccgagaaggcggccatgacctatgaattcgataaaactcatttgggggcctctactgaatga

SEQ ID NO: 530658 - DNA, 672 bp, Stenotrophomonas maltophilia
atgatgactgcgtatatggggaagacccaccgttcccatgcattgcatgggatttggaggacgttcacatacaagggcggcttgctaatgcatggggacggaaccctattcccatgcagcagtagtgtgtggacgggggtgatttcccatagcgaacttcacgggttttgctatgggatggccatccacgacaacacggcaaagccttggtctcaaaagctccacttcccagatcaccaatgccagtgggcgggaattggcccctggcttgctggtgagggtgtgctgccctcgccgccagcaggcgtgtccgccaaaaaggtcgagattctctatcctttaggaccgttgctaggcaagcctttgggcgtgatttcgcccgatgctcccgttgaaaaaggtcgagattcattagtgaccatgccgagcaacctcatttttgccctgcatcaggccaaaaaggtcgagattctttcgccctcgattcctttatgtaccaagccattcgggacgaaactcgcagctcatgccgcacaaaaggtcgagattcttttccgggctacagaaagggggctttttgacccctcaccgcagcctgatggtcgagattcttggcagcccgaattgcttggcatgcaagtctttcggggggcgtcaactcatgaaccgtga

SEQ ID NO: 530659 - DNA, 462 bp, Stenotrophomonas maltophilia
atgtcggccagcatatgggctgaccgcgcaggctactaccgcatccttgagagcacccagaagcgcagccttcacatcaccgcctggctgcaatggttcctgagcaccctgcatgacagcctgattcaggcctggcatcggatcaaccgactgaaggccaagggatctttctggcagaaccattgcccccaatcgctgtcggcagaccaaatgaaagtgctcaatcgccttcttgatggtggtgagcacggcttcgagcagggcatcaacacccgccagtaccaagcagtggccaaggtatccaaagccaccaccgacagccacctcatcgacttggtggaaaggggctacttgcgccgcctaccagatggcggccgcagtacccgttacgaaatcaacatacccgctacggacacccctctggcaacccgcccctgctccacccaaagtcccagcacatag

SEQ ID NO: 530660 - DNA, 348 bp, Stenotrophomonas maltophilia
atgtcccgaaccgagctcgcacgacgactgggggtgcagcctagttcggtgctcaagctggagaacagcgagcgggccggaacggtgcaggttgacacattgcgccgcgcagccgcggccatggattgtgaagttgtcttgctggtggtgccgagacagtcgctacaggcaagcgtcgatcaacagcgcctgaagctcttcaacgccacattcaatcggactgcgacccacatgaagttggaagatcaggcggtctccgaagagcttcgacgctatctcctggaacaggctgaaaccgagatcccggataccgcactgtggcgggtacgggaggaggaccttggctga

SEQ ID NO: 530661 - DNA, 393 bp, Stenotrophomonas maltophilia
atggcaaagcagaagaacacccccgcgccggcagccggcggcccgatcgatgcgcaggaagcgtccgcagccgtggccgacgcagctaccggccaaggcgaacagccgaacgctgaaagccccgtggctgacgccgtagccgctgtcggcgagccggaggcggatgagggcggaaacagcccggcgcccgaaaccgtggatacggacgacgacgcgctgccaccagatgaagaactggttccgcaggatggcgaaaccgtgccggcgctggtgctcagtgacaactacctgggcaaggttggggaggtgatccaggtcaatgcggctcatgctgaagcgttgcgcattggcgggctgatcgacccccaccccaacgccatcaagtcggcctaa

SEQ ID NO: 530662 - DNA, 1146 bp, Stenotrophomonas maltophilia
atgctcaaagtattcgtcagttacgcacgagaagatgagacttctgcaattgaggtctacgactggttgcggtctatcggatgccagccatggttggatcagaaggacattctcccaggtcagaactgggaggcagagatagaacgagcactagcagatgcaaattgcgtgattctgttgatgagtccaaacagtgtctccaagcgcggctttgtgcagagagaggccaatgaggccatcaagaaccttcagtacaaactgcctactgatgtgtacgtgattcctgtagtgctggccccatgcgaggttcccacgcatgtgtcagcaaaggtccagtacatcacttggtctctgccagatgcaaaaagcagggtttcagctgcgctagcgctcgcagcgaagcaacaagcaattgtaattaacgaaggggtgcagtttggtccctttaaagttctgcttcgggctttttcagaagaatgggctggcctccccggatatgacatctcaatttcttatccagagttcacatctggccgcttatcgcagcaggctcaagagctcagttcactattcgcaggacgtacgtccagcgttgtgataaaggcgcggcagaagatatgggatcaaaatgcggaagatttccaagggcgtgagtacgcgcagtccaatgggcgatgggatgactatcatattgcgtacgcatctgagacgctccttagcgttgtgtacaacgttggctggtacggagctggtgctgctcatcccaactcacatttcgaaactttcaatttttcactagagccacatttgactctgctgcgtctgccggacttctttgttgattttacggctgcactggacgtaatcagccgtgtatgcgtatcacagttgcgcaaagagtactggcagcggtgtcgcgaagagcccgactcttcagcgagtgaatggatctcgaccggtgcagggcccgatgctgataatttccaagcgttcagccttgctgacgatgggttcgattttcatttttctccctaccaagtctcggcctatgcgcttgggaactggtccgtaagggtttctttctatgatcttctagcccatctgaaggatgatggagcattgggaaagctgatgcgagctgggtaa

SEQ ID NO: 530663 - DNA, 771 bp, Stenotrophomonas maltophilia
atgaatgcgtttattagctttgctgttatgcccagcgccaagccccacaaccgaaccatcacccctgccgatacggcggcggctgcccggctgaaggccatttggaaggcgctgccacgagacaaaaggccgacccagcagcaaatggctgacgaatgggaggggccaggcgaggcgaatcagagcctaataagccagtacatgaacgggatcatcgcgctcaactaccgggcggtgctgtcgtttgcaaagcagcttggatgtaaggatacggacatacgcgacgatctacccgaacaggcagcagccagcgcgctgacgccaaatttcgacgactacgagccagtcattggctactcacaggccgtaggacttggcgagggggcagaggctgtggagtacgcagctacccacagcttgatgttcaaggcgaccagcctgcgccgtcgcggcatctatggcagaaaccttgccatctactacggcaagggcgacagcatggagcctaccatcaaggacggtgacgctatcctcttcgacacttctgatacaagagttatggacgacacgctgtacgtcatccaggtcgatggcatggcccaccccgagtactatgtgaagagagccatggtgctggacaccggaatctacttccagagcgacaacccgcgtggcgaccacaagtggcagaagcccaagccgatggcctccaagcggaacccgatcacggtcattggccgtgtccactggattggcggatgggctgattaa

SEQ ID NO: 530664 - DNA, 246 bp, Stenotrophomonas maltophilia
atgagcgcgcccgttgatgttgtggcgttgctgcgcgccctgcagtcgcagattggcccccgccgccctgacgaagatgacgatgaggtcgacgctgccgcatgggaccgcatcgacacggcgatttccggcctgggcgcgctgtttgaggcactggaaccggccgtctccgaagaagggatggaccaaccggagctggatcgtctgcgcgcagcggtcgcccgcgtcaaaggcggtgccgcatga

SEQ ID NO: 530665 - DNA, 225 bp, Stenotrophomonas maltophilia
atgagcaacgacaagacaaccctggcggacgtgcagccaggtgggatggtgcaggtgatgccgtctgacgcggctcgcgcccttcttgcggcgcagtatcgagacgacggtgacaaggcgaaggccattcgcatcaatcacaagtcgctcactgattccgacaagcgcgcgttgcgagccatcgaagccgtcgagaaggcggagaaggcggtccccaatggctga

SEQ ID NO: 530666 - DNA, 531 bp, Stenotrophomonas maltophilia
atgcccgcgcccgaactgaccgtgaaagtccccggcgaaaccgccgacaccaacgccgcagccgccagcacgaccaccgcgccgccggacgagcgcctggccgccgtcctgaccctgtccaagcagaccgttgcggtcatcaccgaggcgctgcccggcttggtggctggcgacctgatcgccctgcgcgacctcgaggtggccggcgacaaccgcaagggcgtcctggctgccatcgaggccgaggacaagcgccgcgaggaactggcgcaggcaaccgccgacaccagcgccggcaccagcaccagcgaggcagagcgtaagcaggggccgatcatcgtggcggactacgtggaagcccatgacgccaaccgcctctatggcgaagccttcggcgtggactggatctacgagggccgcccggtggaagagcgggagcaggcggtcaccagcccgcgcaccgcaacctctggccaggcctatctgaccgaagccggctgggtcgtccccgaaccgcagccgaaggcctga

SEQ ID NO: 530667 - DNA, 1446 bp, Stenotrophomonas maltophilia
gtgaacgcgctgccggacttctaccgcgaggaagggctgcgcatgctgccgcaggccatcgaggccgagcaggcggtgctgggcgggctgatgatgcgtccgcaggcctggatggacgtgcaggacgtgctggcggtcaaggacttctatcgccgcgatcaccaggccatctggcaggcgatcgaggacgtgctgaagaagggccgcgagccggacccggtgacgctgggtgaatggttcgagtcgcgcggcacgttggagctggtgcgcgatggcggttacctgatcgagctgttcaacaccacgccgtctgccgccaacgtgcgcggctatgccgaaatcgtggcggagacggccaagcgccgcgccttgatcgacgccgggcgggagctgatggacgccgcctacaaccccgaaggccgcagcgcgctggacctggtgggcgaggctcagacccgcatcggcagcatgctggaccgcgagccgtgcgacctggaatcggtggcgccggtaatggaacgggtgttccaccgcctcggcgagcgcgcagcggctgagggcggaatcgtgggcctgacaaccggcgaccacgacttcgacgagctgatcggtggcattcggccggggcagctgatcgtgctggcggcccgcccgaagatgggcaagaccacgaaggcaatcaacgtcgcggagcatgtggcgctgaagctgcacaagcccgtggccgtgttcacgttcgaaatgccgcccgaggacctgggggatcgcatgctgtcgaaccaggccggtgtaaccggctcgaggatccgcagcggaaggctggacgacgtcgattgggcaaacgcgtccgcagcaacgcgccgcctggctgatgcacagatctacgtgagcaaaccgaagaaggccagggctcggcacgtcgtcgcgcagatccggcgcatgcatgcgcgcaatccgctcgggctggtggttatcgactacctgcagctgatggaggtagagggcgacaaccggtctgctgccatcggcgatatcaccatgctgctgaagctgacggccctcgagctaggcgtgccgatcgtgctcctgagccagctcaaccgtgattgcgagaagcgcccggacaagcggccgctgctcggtgacctgcgcgattcggggtcgatcgagcaggacgcagacctggtggtcttcatctaccgcgacgaggtctaccaccccgacagccgctggaaaggaaccgcggaactgatcgtggcggcacagcgcagtggccccacaggcatggtccgccagctgttccagccggagtactcgcgattctcggctctgccggagtactgggaacccaagcacaccagcgccagcgcgcccgccgccggcaccgcacccaggcagaaacgcggcttcgccggcgttgccgctgcccgccaacaggaggactga

SEQ ID NO: 530668 - DNA, 591 bp, Stenotrophomonas maltophilia
atgcccgagtacgcagcaaagctgctcaatgcacagcccgagcatgacgaaggtctgccagtagcaggcgagggtgtgcagctagcaggatcgagcaatgccccgtctccgaatccgtctccgtctccgaatccgtctccaacagcagaatctaaatcctcgctttgctcggattcgtcgccgcagctgtcgctgacgggcgaccaagcaccgccggcggctgcaaagctgaccaaggccgagcgcatccgccagatcgccgaggacgcccaggctgcgtacaacgccacgatggccaagccccacgggctgctcgcggcctgcacggtgctgaacaagccaaggatcaaggccgtggagaaggcactgcccaccgtgcgccagctgtgcctgcggctgttcggcagcgagaaggtcaccccgaagttctggaccctgtacttcgagactgcggccgatgatgacttccacgctggtcggcagccgggcggccccgggcacgagaactggaagcccgatttcgagtacctgctgcgtgaaacggtgatcgccaagctcgccgaccgtgcgctgtccgaggtggcccagtga

SEQ ID NO: 530669 - DNA, 213 bp, Stenotrophomonas maltophilia
atgaacgtccctcttggaatgacggtggtcaccaaggagcagttttgggctgcagtgatgggaaccacggcgaacgtacatcccaaatccgaccgcaaccagaccaagtggaccgacctgcgcacgggtcagccgtggggctggtcatcgaagggctacatagcgtctgagggcgacgaagtcttcgctctggcgcaaggcggtgccgcatga

SEQ ID NO: 530670 - DNA, 393 bp, Stenotrophomonas maltophilia
atgagcaatgaagctggctacgaaatgcacccgggcacgctttacgactacaccgccggcgtccagtgcggcgtgctggtaacggaaaaggtaatgcgcaaactggccgctctgcaggccctgcatctggaagcggtgaagcggctgctgaccgacagcgagggcgaggttttcccctcgatgtggacgcttcactaccccgaagggaagcagaccacggtccgctacatcgacaccagtagcacagtcgcagagcgcatccgttcggcggtcgtctcccgccagccaaccgccgaatacccggtgtttatcgccagcggcatggacgaagcccgggacatggcggacgcgcgccacgagcagctgcaggcggccgaagcatgcgcctcctga

SEQ ID NO: 530671 - DNA, 528 bp, Stenotrophomonas maltophilia
atgttcgaactgatcgacgcgaccgcgaaggtctccaactacaacccgcgcgccgagaagcatggcggcgaaaacaagatggccggcgacctgaagctgctcgccaccaccggcagcagcgtgctggatttcttcagcaaggatctgcgcaaggcgctttaccgcaagcccggccagggcgagcagcaggatctgatcgaaggcgccgacgggctcaccgccgtgaagttcccgcggctgggcgccctgccctgggacgaggaatacccgggctatgaactggtgatcgccggcggcctgggcctcaccgaaccgatggtgctgtccggcgtgacgctgaagaacttcaagttcgaagcgctcgacggcggcagcctgcaggtcaccgtaagcgccctgttccacccgaccaccgagcaggccggcgccctgtgcgcgctgatccaggaagacgtgcagatcaccctgatcccgccgaccaagcaggccaagggcagcaagccgcagcaggaagacctggccgcgtaa

SEQ ID NO: 530672 - DNA, 750 bp, Stenotrophomonas maltophilia
atgaatcagatcaccaccacgaccgaggcgcagcagctggcgccagttcatgcccccaccggtccagagtccatgctggccgtgatcgagcgcgtcgccaccgaccccaacgccgatatcgacaagatggaacggctgctgcagatgcacgagcgcatgctggaccgcgaggcggcatcagcctacaccgccgccctggccacgatgcagccgcgcctgccctccatcaaggaacggggctccatcaaggaccgctccggcaacgtgcagagcacctacgcactgtgggaggacatcaacgctgcgatcaagccggtactgcaggagttcgggtttgcgctgtcgttccgcacgtccaccggccagggcatggtgaaggttgtaggcgtgcttgcccacaaaggtggccacagcgaacagaccgaaatcgagttgccggcggacaccagcggttcgaagaacggcgtgcagtcggttggttcaagtgtcagctatggcaagcgctacgccgctggtgcgctgctcaacatcaccacccacggcgaagacgacgacggcctgctgggcggtcggaagctcgacgacaaggccgtgaactggatcgacgtggccaacgagctggaacaccccgatgcctaccaggcgaagcgccaggagctgctgaaggactacggcggcgcagccaacctgccgaccgaggtgcgcaacgcattcaaccgggccaaggcccgcgttaccccgaaggactga

SEQ ID NO: 530673 - DNA, 615 bp, Stenotrophomonas maltophilia
atgaagatcatggacgtcgagcagggttcaccggagtggtacgccgcgcggctcggcgtcccgactgccagcgaattcggcagcatcatcaccccgaagcgcggcgagtacgccactgccgctgacacctacatcaaccagctgatcgacgagctgatgcggccgcaggcggcagagtcgtttggcggcaaccggcacacgcagcgcggcaaggatctggaaccggatgcgcgcgagttctacgcgttcgagcgggacgtggtgccgcagcaggtcggtttcatcctcaacgacgccggcaccctgggctgcagcccggatagccttgtcgaagccgacggcggcctggaaatcaaatgcccggacggccccacccaagtgaagtggctgcgcgccggcgggttgccggacgaacacaaaccgcaggtgcacggctccatcatcatcaccggccgcgcttggtgggacttcctctcgcattgcccgggctatcccgcgctgctggtgcgcgtgtacccggatgggttcaccgagaagctgcagggccacctcgaccgcttcctgcgcgagtacgacgcagcgcgccaggtattcggcctgaaggtggcggcatga

SEQ ID NO: 530674 - DNA, 306 bp, Stenotrophomonas maltophilia
atgaccacggaacgtctgacggccgcgatggccgagaacatcacccgctcgaaggatccggccttcgctgtcgacaccatcctgaaagggataagggccgctgccgtgaacgggaagcgcgagtacatcacccgcgagtacggcttcggcgacggctcctgctacaccgccgaagacaactacccggcgctgtgcaaggcgatcctcaaagaactgcgcgaccttgggtacaaggccgatattggctccagctgtggccagttcgtggacgtgtggctgttcgtgcgctggggtgaccagccatga

SEQ ID NO: 530675 - DNA, 2778 bp, Stenotrophomonas maltophilia
atgagatggctgacctcgtccccagcagcaatcgaatttcaaagacttttctcagaagacgcccatgagtctgcaaccgacatctggtgcagcgttatccgaaataagagagatttacctgccccaatcttcctcctcattcaggagcatatgcgacgcaatccagccaagctcgcgtcgacgctcagagggcgaggcttcagactctcaatatcattggcaaacgtgtccatgagggctgccggcgccatttatgaagacgcgaagaccagtttcgcgaggcatgagattgatatcgcagcgagccgattcagagcagccctgtttgatttcagattcgcaattgacagcaacattctcgcgctagcgcccttgagaattgcgacaggaaagtacgcggcagccgtagccatgatcgggcgctggattaacgtgagccccgacaccataactcgagcaatcagctactcaaagcagtcaatgcagctaggcaacctaacaagagaacacctaaattaccgaattgagcttcttatacttcgattcgatcaaactggagacacgggatctctatacgacgcacttacccttattgaaagcaatagatcaatcgcagccggatcagaattgatcgaagctgaaacgcactatcgaatttccctgctgaaaaacaactcaccagagaaacgagagaagtgcatagcctcagcgaagaatgccatttctcgaattggaccgaataattcaggcagcttagaagaggcccgcagcgccatcctcagcatgctcatatctcagacagagcagcgtcagatcgacatttccgcaacatcggtagcgatccctagagggctgctatcccatatggcaaagaagccttcggcgcaggcatggaaagcagccagacaaatagtaagaatgctcgaaaccctccgacatagagagtccatcccagctgcggtactcggcgccaacattcttcgccaaatcgtagaaggcccctcggagctacttcaacagagagacctaacactttatgtggaagttacgaaatggctttcagaaaatgccccatataatcgacatgcacgatgggaagccggcgctgctgccctcactgccgcgaagcgatccggaaagaaaaaactcgccctgagtgctctagatacattccaaaaattggcctatctcgactccgactggccgctgccgaggataggaatcgccagggcaagagactatctcggcggaggagaaaacagcccgatatcaactggcagctggaaagaagcagcaaaattaacgttagcatcccccaattacgcgagatcaaatcttggcgggcgaaatgaagtctttgccgtcacagatgcacgcggcttcttatcctatacattcgtgttcaagagaacgacgaaactcaaggctgaacatgaagcctcaatgcttaaaagtctacgagacgagatagacaatcaggcaaaaggaaacctcttcgaggtccctcggtcactggcaatagtagaggttccttctgatgatgaaaggaagtgggttcatgtcacccagcgatcagctggaagacttctgagtgaaatcccagcaaaggaagcatcttcatacctagaatctgtcacgtacctactcgcgaccttccatcaagcagcaggcaccccacccaccggtaaatcagcgtggaggcctttgaaggtctacttgaaaatgtggtcgcgcaccatattcaagaatgatcactccgacgaatttgtggcagccctccataggacattcccgagccacataaggctggttaggaagcgcgacggccacgcctccaactggctcatcgacccagcggggcgaatagttgccattgactttgagtctgtcgaatttatcacagcaggttacgatgtagcccagctgattgaggacttcgcgataattcaaccagactccgccggctgggaaaggcgtatcgatataatgacccaatacatgcaattgattgaaatggagattgatagagaaggaatttcaaacgcatatggatggtttgcgattacacgcgcactgcgcttgggcactgaacgactggcaagcaagagcttgagacgccacgcacgagagatatgtgcaatggtcgcggaccattgcactgacgatctagcgcaaattgcgcgagaacttcagcttgcattggcacaggtagatcaggcggacgcgcaccagtcaccgcctagccatgatcatagacggcttagcaaatcaatgtcgcatttgctgcgccaccatggccccaagaagggtgttcccgtggacgagttcggcttcgctgcgatggatgaccttgctcgcgcccttgaggtagatgccagcagcctattggcagtggcagaacatccaggcgaacccagatttgaagtgcgcgatggattcattagagcactgtacggccactcccttgatgtaaaaattgacggcgtaattaaggtcgggccacctacaatcctcttccatggatcaaactggggaaccatcgacaagataattgaagaaggattgaaaccgatgagccgccgcatggttcatttaacaaacaatgcgaacgaagccatttccgtcgcggagagaaagggggcgaccctgctactttctatagactacagcgaaaatgaagaacctgtggcggagggcatttgggttgcgcccaaagttggtcccgagcgcctacgaatagttaatatattccggtacgagaacggcgtttttcattaa

SEQ ID NO: 530676 - DNA, 798 bp, Stenotrophomonas maltophilia
atgaagattactgtcgagcagctgcagcagttgatagcttgggccggtgccgagccgcacaccgagctctcgatcgagcgaattgatggcgacgaaggacctggcctgtacgccttcaacagcgatcaccccgaagaaggtgccattcgcctcgatgagggtgagcaatctgtacccgcaggcaactccctctccctgccctggtcaccgccgatgctggacggcccgaggccgcccatcgccggagcgtgcgttgcccccgggaggctgcgtgcgatggtcaagcattcctttgaatctgcacacgatcccgatgacgccgcgctacggatctgcgtggcgatcgacgcggagctcggcctgtcgggcaacgggtggtttgacgatgacccggcggtgctggcagctggaagcaccgcccattctggcgcggcggacgccatcaatgcatgcaagagtgccttgcgcctgcaaccgcatcagctggatgagtttcacgctggcccgtacgccttcaacagcgatcaccccgaaaaagctgccgactacttcgatgaaggtgtgcaagcggacgagttcgctcgggggctgcaggtccaggaggagtcggatagtcctccgttgccgcctttgacggagctgaccattaatggcgtggccgttccatgcttgggtccagatgcagacctggcggagaaagcagcgcatgcaaaactgctggtgtcgatgatgttcggggatgatggatctgaagagctcagcggaattcccgaacctgcatctggaactcttcactga

SEQ ID NO: 530677 - DNA, 294 bp, Stenotrophomonas maltophilia
atggaattctggaatacccaagcgaagcaactggagaagaagcttcaggaacatctgccggcgctgatgctgcacttccttcgtacagcgtctgaagaatcgatcaacagcatcgctggcgaggcattacccttgggagagaacgcacgctcctcggtcatctcccacttggtcgcacgcttggtcgaccaggctgacggcaagcagattcgcgtgtcgcccgagatggctaccgcgatcagtgcgaattgtcatcacgcggtatcggtcaagcaggggagcaattgcccgtga

SEQ ID NO: 530678 - DNA, 210 bp, Stenotrophomonas maltophilia
atggactgttcgagtaacaacggtgatccgaaaacaaccgattcggctccgagacggcgcgggaatggctggggtggggtggtagtcatcatccttgcatttgcgatattgcatatgtggcttgggtttagcaaaggcgagatgggttatgtgatcggcggaacctgtctgttcgcaattgcgggaatcctccgcgctgctccccgttag

SEQ ID NO: 530679 - DNA, 639 bp, Stenotrophomonas maltophilia
ttgggggcgccagcgtacgcgatttgccttcgtgtcgcaattgtgcgacagtgcgcgccaattcgcctatttcgtcttttcgtcatgtcgccaagagcctgctacatcaagcttctcgcgatgaccgcgcttcactgcgtggccctgggcctgcaggccgcgcctgccccggtaccggcaaccccagccaccgagcaggttcggtatcggccgcttgaggaaatacttaaggaggcaaatcggaagacagccgccggtgccacgcgtattgaagtggagacgtggttggccggcgaaatgcgccgttccggactgcaggttgaccaggctcaaacgaagcccacagaggcacccgcgccaagctgggacgtgtacgcccgccagcggcgggctgcatatggaagccaggcgccggctcaaggtcaggctggcgaagccgataacgcttccgagcctttgccaatcaagggcttacctacgcccgaggccgccgagacctacccgctcaatgaccaggatgaagccttccacgacagggcttgccggtatcctagctgcgcccccagctacggagacccagcaaatggccatcgaggctatcaagagcgacgagattttcctgtttggttctcggcatag

SEQ ID NO: 530680 - DNA, 354 bp, Stenotrophomonas maltophilia
atgaagatccgccctctcctgcttctctcgtctctcgccatcactatcagcgcctgcgacaccggcaatcaaagtacccctgcttcggaatcgacgccttcgatcgcacctgctacagcgacttccatcgtgctcgattcggggagaaagatcgtcgtaccggagggtgtggacgtgctgcgtagcggctggacgtaccgcagctttactgcgaatgaggcggctgagattctctcggcctgcgggcgggaggaacggcggcttcttaaggaaggtaagtccccggatctgcagaagccgcttctgtgggtttgccgccaagccgctgctggcgccgataacttcaaacagtaa

SEQ ID NO: 530681 - DNA, 645 bp, Stenotrophomonas maltophilia
atgccgaacgatccaacggcgcgaagcgccagcagcagcggcggatgccgctgccaggcgcgggcggggcatgcgccgtccgcgcgatcgcagttgatcgcgagcatttctgcaggcgcgctcgcgcctgcaggccgccggcgagcgcagccggtggccaccaccgggcaggcccggcctgaccggtgcccgcgcgccctgggcgagggaactgccggcgccgaccggcgccggatctgcgcacggcatcgaggtcgaccagcgccaggccgggacgtggctggcgctgcgatcgcgctgtttccttccagcccggccgcgctgcagctgcagcgcgccgggcgtgccctggacgttggagctcgggcagctggccagcgcgcctcgatgctgccggcatcgagctggccagccgttggctgtgctcgtccacgcctaatccacggccggcgtgcggtgcacgccgcggcccggccccggagaacctctatagatcgcaggggccgccggcagcggtggagtaggggtgggcgaggagcgccgcgacctgcagggcggcggcgcggtggggaccaggtggcgggatttatcccgccacgtcgctggcgctggcgctggccagcgccggccacggcgagcgcgtag

SEQ ID NO: 530682 - DNA, 153 bp, Stenotrophomonas maltophilia
gtggaggattcggcgccgactgtccaggaagagcgcgtggacgacttcgcgatcgttgtcgccgatgcgcagctgcagcagctgcttggtggcggcggcatcggggacttcggcgccgacctggtggcggccggcgaggatttcgcaggctag

SEQ ID NO: 530683 - DNA, 204 bp, Stenotrophomonas maltophilia
atgcgtgatctcagtcattttgaacttgcagaagtttcaggtggtacgcgcggaatcaacttccaggttggttccagcgaaggcactcatatcagcggcaccctgcacgaccttggagaggctgcctatatgtatggaagggttgcgccattcagtgggatcggcgctgctggcttgatctaccattacctcatggctcgatga

SEQ ID NO: 530684 - DNA, 2067 bp, Stenotrophomonas maltophilia
atggttgcgtcatatcatgggaacaacatcggactccgggaactccgccgccgttacgccctttcactcaaaggggcaacgcttggtcagatcatcgaaattggtggggcgctcggttttcgttgccgccccctgcgcttggacctggagcatctgagccaacttcagttgccgtgcatcgcgcattgggatctcaaccatttcgtcgtaatcagcaaagtgggtcgcagtggcgtcactgttctggatccaacctttggcaagcgcaagctctctctggaggaggtctcgcgtcatttcaccggaattgcactggagttgcatccaaccaccgggttccgggtcagcccgcgtccgccagccatctcgcttgcacagctgaccgggaagatccagggcttgtggcaggctttggggctgctgctgttcttgtccattgctcttcagttattcgtcctgatagggccgttcttcatgcagtggaccgtcgatcaagtgctcgtcgcctacgacagagacctgctgaccgtgctgggcattggattcgcgctggcactgctgctacaggtctgtatcgggcagatccgaggccgagcggtcatctatctgtcaagcaggctcaacctgcaatggaccggcaacgtctttcaacacctgcagcgcttgcccctggacttcttcgagaagcgccatctgggcgatgtcacttcacggatgggaagcgttcaagccatccagaaaacgttgacgaccagcttcgtagaggcgctcattgatggactcatggcggcggtgacgctgggaatgatgctgctctacagctggaagcttgcgctggtcacgctgcttgcggttgctctgtatgcaatcgcgcgtgcctgtgcctttgcgcccctccggcgaggcacggagaagcagttgattgccgcggctcggcaggagagccatctcctcgagtccattcgcggagttcagtcggtgaaggtggctggtcgggaaacggctcgacaagccaattacttcaatctcatgaacgagacggtcaaccatgacgtctggttggcaaagttcgggctgaacttcggtggtgccaatcagttgctgtttggcatggaacgtatcgcggtgatctggctcggcgcgctgctggcgatgagcaatgtgttctccgtgggcatgctgattgcctacctcgcctacaaggatcagttctcacagcgggtgggagcgttgatcgacaagtgggtggagtttcgcatgctgcgcctgcatggcgagcggctctccgacattgttctcaccgagccggaggaccactctttcagcgcgggcaacatgcttccggatggacttcgcattgaggttgaggggctcggtttccgctacgcccccggtgagccctgggtgctgaagaactgcagctttgtggtggacgccggggagtcggtagccatcattggcccttcaggctgtgggaagtccacgctgatcaagatacttctgggtctgctgcagccgaccgagggccagatccgcattggtggcgtaccgttgtcaaggatcggcgtgggtgactaccgtcgcatgatcggagcggtgatgcaggatgaccagctcttcgccggaagtgtcagcgacaacattgccttcgaggacgatcatcatgatgaagccagagtgcgtgaggtcgcacaggtggcggctgtgcatgatgacatcgcagcgatgccgatgggctacaacagcttgatcggcgacatgggtacgacgctttccggagggcagaagcagcgggtgatcctcgctcgcgcactgtatcgcaagccgcagttgctcttcctggacgaggcaaccagtcatctggatgttgagcgggagaggctggtgaatgaagccgtccgacagcttgagctgacccgggtgatcatcgcccatcgtccagaaaccatcgccagcgctgatcgggtgctggtcatgcatgcgggagcagtggcacaggtattgatgcaggacgtgtcaagctccgtgaaagcggatcgggacggcgtcgaagaggtccctgcatga

SEQ ID NO: 530685 - DNA, 438 bp, Stenotrophomonas maltophilia
atgaagaaccagaagggcttcacccttatcgaactgatgatcgtcgtcgcgatcatcgccatcctggctgccatcgcactgccggcttaccaggactacacctcgaagtcgaaggttaccgctgcgctggccgacctggcctcgcacaagacccagttcgagatggaaatcagcagtggtcgtactccgaccgctgcgaccgccggcttccaggctgaagagaccggtagctgctcggaaatcgctgttgccaagactggcatgacctgcaccatccgtgatccgggccgcattggcaccagctccaccatcgctctcaagtatgatgaagcgacggttgatgctacctcgggcgcaatcacgaaggcgggtggtttcagctgcgtcaccgtgtcggttgacaagaagttccgtccggctggctgcactggtacctaa

SEQ ID NO: 530686 - DNA, 300 bp, Stenotrophomonas maltophilia
atgttgtcgcgtttccgtcgccccgcgctgtgtgcgctgttggcgcttgcgctgcctgccgtcgcctgggctgctgcaccggcgccactcaaagtgatgtcgttcaatgtccgcaccccggccgataccgaaccgggcaagcgctggcccgaccgccgcgatgccatggtcaaggtcatcctcgatgcgcacccggctgtgatcggcacccaggaactggtgaaggagcaggccgactacctgtccgaacacctgcccggctaccgctggaggcgaaggccgccgcggtggcagcggtga

SEQ ID NO: 530687 - DNA, 714 bp, Stenotrophomonas maltophilia
atgcgttttgaagggattagggtgtccataagagtgaccacagccgtggacattgcgacagacgaggaggtggctatgccaccgagaaccgaacagaagtatcgcctgagcaaggcccagctgcagtcactgacgatgggtcaccggcccacactgacggtggacggttgggttcacttggtcgacaacacgaccggcaggccgtatcgctttcgcgatggctcgcccggttctcccatcgggttcggttcaagagctggacctgacagtcgcactcgagctggccggggccgctcccacattcgccagaccggcgaagacccgcaggaacggatcaaggccaccacggaagcgcggaaggtccgtgggaccacagtaggcgaggcgctgcagaagtacctggacagcctgaagaagcccccgacgggcaagaaggccaagccaggttccatacgctgccgtgcagcaagcggttcggcggttgtcgcacccggacgtcgcctgatcgacgtagcagttgcagacctcacggacgagcgtctcgtcgaagccttgaacaacatgcgtcacaccgccatgcaggcgtccaacctgctgtcgaaggacaccaaggaccgcttgaaggcagctgggcggcggtgggagttgaggccaggtcgatgttggccaacgtgcgcttggatgctggcctgtacgacccggcaaagggcatga

SEQ ID NO: 530688 - DNA, 420 bp, Stenotrophomonas maltophilia
atgttggccaacgtgcgcttggatgctggcctgtacgacccggcaaagggcatgaagatccgcctcacaccgtacaacctgaggtgcacttcggggcgcttggctggcaaactgttccatggccgcatggtcacgcaaatgctcggccaccatccgaaggatgacgagccgcggcgcatggcgaaaaccaccaggtgctacatccagcatgcgtggccggacctatggatggcaatggcgcaatgtgaggaggccatcattggcaccagccctcgggtctggaataccctgaggcccgacggccactccgctcgcgacgaacaggacgatcctgcgatccatgtccccaccacctaccccggcaaccggagacgtgcgcgatacgcgctcgatcaagcaaacccgggacgacctggctga

SEQ ID NO: 530689 - DNA, 642 bp, Stenotrophomonas maltophilia
atgaacctagtgaaatccaagcagcgcgtcgccgaccacggggaggtcttcaccccgccgtggatggtcgaggctatgctcgatctggtgaagagcgaaaccgagcggatcgacagccggtttctggagcctgcctgtggcagcggcaacttcttggtgcaaatcctgcggcgcaagctcgcggctgtcgagctgaagtacggcaaggccgagttcgaaaagcgcaacttcgcgctgctcgggctgatgtgtatttacggcgttgagctgcttcccgacaacatcttggagtgccgggagaacctgctcgaaatctttgcggaataccttgggttggacgctgacgccgacttgtaccgtgccgccagtttcgtgctaacgcagaacctggttcacggcgatgctctaaccatgctggataacagcaagcagccgataacttttgccgagtggggctatcttggtaagggcaagttccagcggcggaatttccgtttcgacgtgctgacgcattcgtcggcgtttagccaggagggcggcttgtttgcccacctgggcaagcatgagatattccagccggttaagacctatcccgtcatgaatgtggctgagttggccgccacggaacagagaactcgataa

SEQ ID NO: 530690 - DNA, 939 bp, Stenotrophomonas maltophilia
ttgcctatccctgactttcgcacgctaagggatgaggccattggcgagccgagtagccacctgctcgacacgatctatctctgccagcagcggcaaggctggttccgtgaccacgcgcggctgcatggcttcccgcccctttccttcgtgggtagtgccaccgtccaggaggaaccagaaatagtggcccagcggatgcgcgaggtattgacgctgtccgttgaggcaagacagcgtctgtctacttggacggatgcgcttcgccagttgattgccaaggccgaagaagcgggcgtgatggtgatggtcacctcggtggtaggtagtaatagccaccgcaagctggatgttgaggagttccgaggcttcgcgctggcggatgatctggcgccgctcgttttcatgaatggtgcggacagcaagtccgcgcagatgttcacgctggcccacgagctggcacatctgtggttgggggcttccggtgtatccgatcctgagagcggtcgtatgccggagcagcagattgagcgctggtgcaatcaagtggcggcggaattgttgatgcccatgcaggcgctgcgtgctgcgtatcacccagaaatgccaatcccgcaggaaactcagcggctggcacgtctgttcaaagttagcactttggtcgccctgcgtcgccagttcgacgccgggttcattagccaaactttgctgtggcagcactatcgcgatgagctggaacgactgcgttcgttggaacgtagggaaagtggtggagacttctacaactcgctcggtgcgcgcaccagtaaacgttttgcacgcgccatcctgtctagcacactggaaggattgacttccttccccgacgccttccgcatgctgggcgtgcgaaagacggccaccttctacgaagccgcacgtgagctgggggtgacggcatga

SEQ ID NO: 530691 - DNA, 495 bp, Stenotrophomonas maltophilia
atgagctatttgctggacgccaacatattcatgtcggccaagaatctgcactatggactggatttctgtcctgcgttctgggaatggctggtacacaaaggtaataccggcgtggtgttcagcatcgacaaggtggccgatgaaattgccgcaggtggagatgctttgtccacatgggccgtagatcacggcagccatctattccgccgtactccggcatcgctggccacacagttcgggcaggtcagcggctgggcaacgggtcagcaattcacgcctgcggccatcaacacctttctgcaggcggccgacttctatctggttgcgcatgccttggcaggtaatcatgtgctggtcacgcacgaaacgcccgctacatcgaacgcgcgcatcaagattccgaatgcgtgcttaggtgtaggcgtgcgctacatgacgccgttccagatgctgcgcaccgagcaagccaggtttgttctggggagacaagcatga

SEQ ID NO: 530692 - DNA, 1581 bp, Stenotrophomonas maltophilia
atgatgggcacaaagcaatcaggtttcactctgcgtgggcgaaatcccgacgtgctgacgtgcattgccaacctgagcaacgacgaggtgttcacaccaccagagttcgccaatcgcatgttggatgccgtggccgaagcatgggcctcagaccacggcggcgcgagcatctgggcaaacccggacgtgcgtttcctcgatccgtttaccaagtccggcgtgttcctgcgcgaaatcactgcgcgactaacggaaggcttgaaggacgcgatccccaacctgcagaagcgtgtcgatcacatcctcagtaaacaggtgttcggcattgccattaccgaactcaccagtttgttggcacggcgcagcgtctactgctcgaaacacgccaacggcgagcattccattggtaagtcgttcgatagcgacgctgggaatgtctggttcgagcggacggaacacgcttggaacggagagagatgcgcgttctgtggggcgagcaagaaggcgctggatcgtggcgcaggaatggaaacgcatgcctatgcgcttatccatgctgacgatatcaaggcgcgcgtggacggaatttttggaggcgacatgcagtttgatgtgatcattggcaatccgccgtatcagttagccagtgatggcggcacgcgagatattcctatctataataagttcgttgagcaggcaaagaagctccagccgcgttatttgactatggtcatcccctcccgctggatggcgtctggtcttggcctgggggattttcgaaaggctatgcttggagacaggaatataaggaagttggttgactttgagcgtatggatttggtgtttcctggcgtggatttcgagggtggcgtctgcttcttcctctgggacagggataatgaaggtgcgtgcgaagtcaccactgtcagcggcgatgaaacagtgggccccgtggatcgcgatctgggtgagcacgatatctttgtgcgggacagtcgagggcttggcattctcaagaaggtgctcgcagcgaaagaaccctccatcacggaaatcctgtcagctgacaaggagttcggctggacctcaaacttcgatgaatttcgtgagaaaaagcggccggatgacattgcgctgtactacttccgtaagggcaagcgcctcattggcggcatagcgcgtagagatgtcactaagagtgcgcatttgattgactattggaaggtgatgacgccagcggcctatggcgagcgtggggctcggcctgccatggtgcttgggccaagtttcattgccgagaagccgtcagtctgcacacaaacctatttattcttctacgtagggtcgaagaagaaggctgagagcctgcaaacttatctcaatactcgcttcttccgcttcttggtttcgctaagaaaaatcacgcagcatgctacgcgtgcaacttacacatgggttccgcagcaggcgtgggatcgagcctggacagacgcagagctctacaaaaagtaccggctcagcaaggacgatatcgcctacattgaggcatccatcagggcgaagggcaatatcgatgagtaa

SEQ ID NO: 530693 - DNA, 2541 bp, Stenotrophomonas maltophilia
atgagtaagcccatcgatgaaatccttgctcccaagccaaccacacgcccacgcatttacgcctactcgattgccgacaacgcgcataaggggcagttgaagattgggcagaccacgcgcgacgtgaaaaagcgcgtcgccgagcagctcaagacggcggcaatcaagaactacaagattgaaatggacgagagcgccgagcgtgaggacggtagcgttatccgcgaccacgaagttcgggcggcgctggtcaagaaggacttcaagaatgtcgcgctggagtggatgcgctgcagcgtgaaggacgtgaaaaccgtcctgaccgagttgcggacgggccagaagttcacaggcacgcacagcgatacctttcccatgcgcaaggagcaagcggacgccgtgcgattgacgcacgactactaccgctcacgctgggaagaggacaagcacgccgttccgcgtttcctgtggaacgcgaaaatgcgcttcggcaagactttcaccgcctaccagctcgccaaggcgatgaaggccaagcgcgtgctggtgctgacgttcaaaccagcagtcgaggacgcgtggcagtccgacttggagaaccacgccgatttcgacggctggcaatacctctcgaagagttcgggcagcgacccgacgcagatcgacaagaagaagtcggtggtctatttcggctcgtttcaggatgtgctgggccgcgacaaggcaaccggggcgatcaagccccgcaatgaatggctgcacgaagtgaactgggacttggtggtcttcgacgagtaccactttggagcatggcgcgacaccgccaaggagctgttcgagggcgaagacgaggccgaggccaagaaggaagccaagctcgaatatgcggctgatctggatgcagtcaacgacgatctggacgtgctgacggagaaggagccaggcttcctgcccatcactaccaaggcgtacctctatctgtccggtacgccgttcaaggcgctggccacgggcgagttcatcgaagagcaaatctacaactggacctacactgacgagcagcgcgtcaaggaagagcacgccacctatcacgcggacaagtggaacccctacggggcgctgccgcaaatgcggctgctgacctaccaaatgcccgatgagctactggccatcgccagcgccggagagtttgacgagtttgacctcaatgagttcttcgccgcgacgagcaccgggaagacggccaaattcaagcacaaggacgatgtacagaaatggctcaacatcatccggggcgcatacatgcccaaggctgccgagtatctgaagaccggcaccaagccgccgtttccgtattccgacacccggctgcttccgtacttgcagcactcgttctggtttttgcctaacgtcgcagcctgccacgcgatggagaacctgctgaaggaaaagcacaatacgttctggcacgactatagagtgatcgcggctgctggcacgagtgccggtattggcttggaagccttgccgcccgtgcgcaatgccatcggtagcggcttcgataccaaaacgatcacgctgtcatgcggcaagctcacgacgggcgtgacggtgccgcaatggtcgtccatcctcatgctgcgcaacctgaaatcgccggaaacctatttccaggcggcgttccgcgtgcagtcgccgtggtcgatcaagaacccgaacggcgacaacccgaacgaggaagaaatcctcaagccggcttgcttcgtgttcgacttcgcgcccacgcgcgctcttcgccagttgtccgagtacggcattggtctgtcgccgaacgaaccgaacccggagaatgcggtcaaagacttggtagcgttcctgccggtgctggcctacgacggcgctaacatgacgcagatcgatgccggcggcattctcgacattgcgatggcgggcacatcggcgacgctgctggcacgtaagtgggaaagcgccctgctggtcaacgtggacaacgacacgttgcgccgcatcctaaacgacccggaagccttggctgccgtggagcggattgagggctggcgatcgctgggcgacaacgtgatcgaaacgatcatcaacaagggcgacaagatcaaggcgctcaagaaaaaggccaaggaagctggcctgacggagaagcagaagaagcaactctccgaggaagaaaaggagtttaagagcaagcgcaagctggtacaggagaagctgatcaagttcgctacacgcatcccggctttcatgtacctgaccgacttccgcgaaaacacgctgcaggatgtgatcaccaagattgaacctgatctgttcaaggtggtcactggcttgaccgtggccgacttccatctactggtgcggttgaaagtgttcaacaccgagcagatgaaccaggcggtgtttgcgttccgccgctacgaagacgcctcgctgcgctacacgggcatcgagagccacaaggggctgacgcactacggcctgtacgacacggtgattgcgaaggaatga

SEQ ID NO: 530694 - DNA, 951 bp, Stenotrophomonas maltophilia
atggctgttaaacctgtcggcacggcgccggagccggctactgtcgtgcagcacgatgccgacaccttcaccgtcgctgggcttggggtcgggcctcaaatgtctgagctcaagcagcgcgaaaccaggtggtggcggcgcggtaagaccgtggcgctgatcggcggcgttttcggcattcttaccgttgttgcgttgtgtgcgatgccaatcctctggcccgctagcctgtcgatgagtgaattggacgtaccctcgcagattgcagcggccctgccctcggaggccagatctgcgggagaagcgcttaacctcaaggtcgtgttcatgggtgacgagcttcttcagctcggcttggtccttggtatcctaattttcttcgtgggtctcgcgatgtggatgttgcttgagacctctttggctccagctgtggccggcctttcgatggccgcgctgtcatttatgttgcaaagcacgggcagtctcgattctgctgatccggctgggcagccagaagtggctgtagtccgtctcgttgaggcttcagcattggcgagcacacccgcagggctgtatgtccgggcgcaggaagccctatcgcgcgaagagctgaacgccaaggacagggctctactgaaggctgcggcagactcgatgcagggtgcatcgcccggcttcgcaccgcagccacgcgtggccgccctcatcgaacaggctgcttacggcaaggcccgttctccggccgccgttcaatacgccgaggcccggtccgtaaaaagcaatctgttccgtgcgctgacctcgatctttgctgttctggcaggcacaggcgcagtggtttccgtatccctgtgcctgcttggcagttcggtgggccgccgccgccaacgtttgtcggactctatccgaacccgtcgtgccgaagcttccgaatcggggcgagcagaatga

SEQ ID NO: 530695 - DNA, 816 bp, Stenotrophomonas maltophilia
atgagccatattcaacgggaaacgtcttgctcgaggccgcgattgaattccaacatggatgctgatttatatgggtataaatgggctcgcgataatgtcgggcaatcaggtgcgacaatctatcgattgtatgggaagcccgatgcgccagagttgtttctgaaacatggcaaaggtagcgttgccaatgatgttacagatgagatggtcagactaaactggctgacggaatttatgcctcttccgaccatcaagcattttatccgtactcctgatgatgcatggttactcaccactgcgatccccgggaaaacagcattccaggtattagaagaatatcctgattcaggtgaaaatattgttgatgcgctggcagtgttcctgcgccggttgcattcgattcctgtttgtaattgtccttttaacagcgatcgcgtatttcgtctcgctcaggcgcaatcacgaatgaataacggtttggttgatgcgagtgattttgatgacgagcgtaatggctggcctgttgaacaagtctggaaagaaatgcataagcttttgccattctcaccggattcagtcgtcactcatggtgatttctcacttgataaccttatttttgacgaggggaaattaataggttgtattgatgttggacgagtcggaatcgcagaccgataccaggatcttgccatcctatggaactgcctcggtgagttttctccttcattacagaaacggctttttcaaaaatatggtattgataatcctgatatgaataaattgcagtttcatttgatgctcgatgagtttttctaa

SEQ ID NO: 530696 - DNA, 705 bp, Stenotrophomonas maltophilia; identical to SEQ ID NO: 8686

SEQ ID NO: 530697 - DNA, 423 bp, Stenotrophomonas maltophilia
atgactgagaaggcttcgccaggtgactgggtcaagcgcggggagggtgacggtggcattgagcgcatcgaggcgttcttcgaaggccacggttacgcgcctcatcgacatgacacttatgccatcggattcacgctggctggggtgcagagtttccagtatcagcgctcacggcggcacggcgtgcctggatcggtgctcgtgctgcatcctgatgaactgcacgatggtgaggcgggcacggccgccggattccgctacaggatggcctatgtctcaccttggcaggtgcaacaggtgcttggcggtgcgccgcttcccttcgtgcagggggggggtatccagcgaccctcgcctgagggtcgcgattctgcctctactggcgcacctacaggcctgcctggatcccatggaagaggctga

SEQ ID NO: 530698 - DNA, 5640 bp, Stenotrophomonas maltophilia
atgaaccggaaagtattgctcgttgaaatcggtggccagggcctgcctgcaatcacgcctgtgacccggcagccctccaactgggtggcgtcggccaagcccgctgttgtggttcctccggccgaaggcgtggagaccaagccagcagcggatagcgtgaccattacctggaacgcttcgccgctggctggtgctgtctatgtcctctggcgcgcggccgatgcaggcggaaagccgggcgaatggaagtacgtaaccaaaacctcagacacgcgctacacctacaccgaggccagcggtgttgtgagctggtggaaggtcactgtccaggtcaacggcgtgtcgtctgcagactccacgcccaaggctcaggcccccgtggtgccgccgaccacggcggagctggtccagctgcagggcaaggtggaccagggcctgcgtgacctggcactggcagatgctgccgaggcacagcagcgtatggcggacttccaggctgcgcaggcacagatcctggcagagagtcagaagagtgcggccgcagtgggtgaagtggccaagcgcgcagaggatctggccacaaacctggccaacgaagagcgcgcccgtattcagagcgcactgaacgaaaaaaccgagcgcaccgctgacatcagcgcggtcaacacgaaagtccagaacggcctggattcgatggcgcgctctctggccgaggtcgccgcaggcagcggcacgcagttcgactctgccggcatctggcatttcaacgcaggactggaaggctggacgggtgtgtacggcgccccgactatcgccgacggcatgctgcggccgatcaacaccaccaacaactccggcatccagtccccggcgccgctcaacatcgacggcgccgcctatcgcttcatcaagctgcgcatgcgcaaggtgggcaatcccgcctggatggggttgattcgttggatcaccgccgccgaccaggagtggaacgaagcgaagtcgctttccatccccgtgccggcattcgacgccaacggcatcgccgtcctggacgttgatcgtctgccctggaacggcccctcaccactgcgtgccattcgcctggcactgacgggtgcgcagaccgccagcgcctacatcgaatacgactggattgccgtgggccgcccgtcgcctggcgcatccgtcgccatggtccagcaagagagcgacgcgcgcaccgccgccctggcggctgaggctggccagcgcaacacactggccgtgcagatgcgcggcgactaccccggcaacgatccggcgaagctgacgggcggcctggcctacaacgaaatgagggcgcgtgtcggcgcggacgaagcgctcagccagcgccagtcggccgtggaggtccgtctgcctgcagggacaggtgcgctcgcgtctgaggccaaggtcaactccgtcgagcaggcgagcgtcacgcgcgaccaagccattggacagcgcattgaccaggtgaacgccacgctaccggtgattgctgcccagggcgccaacatggtgctcaacggaggatggcaatccggccgggacgtggcctggacctacaaccatgcgtcgctcggcgtggctgccaccgagggccgtgcaggaggtgcgtgcctgcgggtggacggcggaaccgccgttgtgcgtggcgcaaccgccaacggcggcgcgcctattcctgtcgcgcctggaaagaagtaccgatatggctgctggtacaagacaacggcggactataacgggagcgcgaacaacggaaagctccgcttggccacgcaggacaatgcgctgattggtggtgccacgtatttctctgcgaaccagggaacgtggacctacctgggcgcggtttatgccattccagaaaacacgtccatcactggcctgaagctcaacatcaacgtggatcacacagcaggcacgttgtgggtggatgacgttgctattgaggaagtcaccgagatcctggccgtcgccgatggcctgagctcgttgagcgggaccgtcacccagcaggctggcctcatcaatgcacagtctggcctcatcagcgccctgcgcaccgacgtggacggcaaggccaccaacagcgctctccaggcgctgcagtcccaggtcacactccagggaaacaccatcaccagccagggtggcgcgctcaccagcgttcagtccgccatcaacaacctgggcggtgacaatcgcctgcgtaacagcagctttgaggttctgctacccaacggcgttcctcagtattgggcgccctcatcgtcatccaccgacgcggcgaacaagactactcgcaagctggtggactctgtactgcctggtagcaccaaggcctggcgatgggacatggcggccatcccggccaatgcctatgcagaatgctactcgtcggtgtaccgcgtcgatccccaacagcccgtaaccgtgtcctgcaacgtgcgtggcaaacctggcgcgcgcttcttcttccagctcggactgaaggatgcggcgggcgcatctgtcggctggcctggcgggccagctgctggcgcgggaatggtcgtcacggaggcgtgggagcgtaagacgtacacgttcccggcatcgcagatcctggccagcgctgtcggtgcagcgctttacctccgtgtgtacggcgacggctcggcggaccagtggattgagatcgacaatgcgcaactgcagaccggatctgccgccacgggctatgcaccgtcattggaggagacagccgcgcagtccaatgcaaacgccgaggcgaacagcgccctcaataaccgcgtcaccaatgcggagggacagctgctgtcccaaggcacggcactcactgccgttcgtgccggcattggtaacgccacggtctacgaaatcaccgccaacgcggtcatcaccagccagccgaccggagggccgcgctcgtctggcacacgaaacgcggcgggcgcggctgtcggtggtgccggacgcggcctcaacgttcaactggtgaatgccgatagcaccttgggggctcgccagacctttgacacctacggcaacggcgcatcggcatgcgccagcttcaacgattggtacgacaacgccctggccgacaatcagtatttcatcctgttcaccagcgaccacaccgggccgctgagcaatggcgtgagcgcggacatcgccgggaccagggaccgcctcgttgatgccggcgcctcgcgtcgcaacgtggaggccctggacggaatccgcatgttcgtcctgatcgggcgcaagcgcactggcgaggcggcaggcctgcagcgtctatcgccccgaccgtcaaccgcccgcactgaccagtgggttgagctcattgtggaattcgtcaacgggcgcccgcagggcagcttggacgtatccgcgctggaacgggccacacaggcaaacgctgctgcaaactccagccttgaagcacgcaccctggccaatgagagcagcgttacctcgttgggtcagtcgctgaccagcgtcaatgccaagatcgaggcgattggtggtgacaacctgctgtggaatagcagcatggaagacgccccggtggctaccgcagcgccaaccggatggaacctggaacgcatccgaagcgacgttggaggcacgttctcatacgttgattccccactaccaggtggcggcaaggccgtgcgcctggattggaaggcgatcaactcgcgggattggtgtggtctgaaccgtgcggggcctggcgcaggttacctgcgtgtcgcaccgctgacggactacgtgctgtccagctggattcgggcgacacagggaacgcagctctacgtctacgtggtgtggatggatgaggccgggactcaaggactgggcaccatcacgtctccggtggtgggggctactggtaattggcagcggatcatcctgcccgcacggtcaaacgccacggcggcccgcgctcgcgtgtacgtggggcgtcagttcgcggacgtccctggcgcctactggctggagattgacaacgtgcagttccagcgtggcctggtggcgacggagtacgccccaagcggcgccgaggcagcagccgcagttgcggcaaacgctgcagcgacggcgggccttacttcgacggttacccaacaggggcagcagatcacggcgctgggtcagtcggtgactggcgtccaagccgaggtgaagggaaaagccagcgcctctgtcgttcagacgcttgaggcaaaggtcagcaaccaaggcagcggcgggaacctgctcatcaactcgacgttcccaaaatatcagcgcaacggctggggctggggcgaaaatcccggtgccgcatgggtagagcttggcgatccgacgccgggaaatgacagtttccacccacctggcatctatggaatcggctcaacctccggcggcaccacttctaagcagattgtctggtggggaaccgagtacggaatccccgtcgaggccggtcaaacctacatggcctccgcttggtttaacactcaccgttgctcttgttacatcgagatcagctactgggacaagacagggaattggctggcgcaatggggctcgccggaaaccgggcatacggggaacagtggcccgccattgctcgccgaaatgccgcgcccaagcatcaagactgttgcacctcctagagctgctctcgctcggttcaggatcatcgtcaagcccaacggggaggcctggccgtatttctggatgttccgcccaatgttctcgcgggttgaaccggatgcgacgcagccacccccgtggaatgccggtggttcagagagcagtgccaagtggggttttgcgctggacgtgaatggaaatgtctccggcatggagatggaggcgaccggggcaaagagtgagctgaaaattctctccaagatcctgcgcctcatcagtccaggcacaccggacggcatggagatccaggacggctacctgcgcgtctggcgaggcaacgtacaacgcatcatcggtaacggcttcgggcctgatggcctgatcgactacttcggccctaatgtcggcgcttcgggtgcaacgaagcgtaacgcaactgtgtggatggacgtgaatggtggtgcgtactggggcggtgccattgcggccggtgtccgccgcaacgcaatgcagacaactactacgcagaccattggcgcttccatcgtcgttggcccgttcagcacaagcggccggaacaagaacgtcgttgtcagctaccagcgaacggtcgtgcgaaccaacaatcgaatggaccgccagggcttcgtcgcaggcggaaacaggaacgcctgcgcagtgaatgtctacagaaaactgggcagcaacgcggagcagttctggacgagctttgaagccagcggcggcgtgtcgattacgaacgagtctgatggcccggatatggcgatttcgttctggtctggatcggtgacattgaacgacagcgaaggcacgcaggaccgcacctaccgtgcagagatcgttgggttcagcgaacaggacgttagccatcagactggaagtttcaccggcctggacatcaccgccagcctttccatcgtctccattgaggagtga

SEQ ID NO: 530699 - DNA, 387 bp, Stenotrophomonas maltophilia
atggccgatttccccgaccgcagccactggcaggcgctgtcccttcagctctcgatgccgggccaggccttcatcgatggccgttatgtcgatgccgccagcggtgcccgcttcgactgcatcagcccgatcgatggtcgcgtgctgggcgcggttgccgactgcgacgcgcaggatgtcgaacgcgcggtactggccgcgcggcgcagcttcgaggcgggccactggtcgcaggcgagcccggcgcatcgcaagcgcgtgttgctggcgctggccgcgctggtggaagcgcacgtcgatgaactggcgctgctgaaaccctggacatgggcaagccggtgtgtgacgcacgccgtatcgacctgcccggtgtggtgcggtgcctga

SEQ ID NO: 530700 - DNA, 1638 bp, Stenotrophomonas maltophilia
atgaaccgcaacaaatattcagcaatgcatttagccctatccattggcatggctttaagcggacatgctgcagctcaatcaacgcccatgcaaaactatggtgacgcaagccgtcaacagtattggaatggcacaggcaactctgcaacccatgctgaccctgcctgggagcgcaatctaaccaatctgtacttcaacggagtaggaaacagattgaacatcaccaacccattgacccataacgtcagcgatgttgtattcaacggaaggaacaaccaaagcgacacaggtttcgtcaccgtcaccggatatgacaacatcgttcgttcggattgggtctatgcaaatgatccagcaatatcacctagcaccggccagatctatttgaacggcggcagcaatgagttgaatggacgaaacctcaacatttatggcagcttcaatcgcgcaaacggtgaattcaccagttcgctaggcgacaacaacgaactcggatccaatgtgcggaacctcggaagcggcaatgccgttgcggacggtggtacaagcattgggtttggaaaccgcgtgacttacgcaagcaatgctggaagtgcaggcggcattgccctgggcaactacaccgttgttgaagcggcgtgcgtatctattggatatgcctcatcgtgcaatgaagaccgcactgtctcgttcgggcagacagggaccaacttgctgtcacgtttgactggcgtagccgctgggcaagctatggacgacgctgtgaacctcgggcagttgtcttccgtgacccaatcattaggcggaacagcaggcttcaccaacggcgtctacaacggatggagggtcaacctagggggctcgagctatacgaacgtacacgacgctctcgtgtcgctcgacggacgcctcaccaccgttgagaacaacccaggtggtggaactccgacacccggtccggttggtcctcccggcactcctgggcgcgatggtgtggacggtgaaacaggtgcgcccggacaaaatggaacggatggccgcagcgcatacgaggtggctgttggtgagggctttaccggcacccaacaggaatggcttgagtcgttgaacggacgcgatggtgccaaaggcgaccgtggcgaaacaggtttggcgggcaaggatggcattgacggagccaccgatcccctggcggtgaagtacgacgacgaaagcaaatcccaagtgacgttgaacagtgcgtcgtcccaaccggtccgcgtgagcggtgttgccaacggtcaaattgcgcaaggctccatcgatgctgtcaacgggggccagttgtgggacatggaaagccgctggaacgaccgctgggaagacaccaaccgccgcatctccaatcaagacaagcgcatcaatggcttgggcgcgcaagcgatggccatggggcaactgtcaatggcaagccagtatttgccggtcggaaaagttgccgtgcatgccgcttttggcgcgtacggacctgaaaccgctgtggcgttcggtggaagcgcccaggtcagcccacgtattcgtgtcacgactggcttgacgtttggttcgggcggcgcaaaacccggtggtggtgttggcttctcgtacgtattggattga

SEQ ID NO: 530701 - DNA, 1137 bp, Stenotrophomonas maltophilia
atgaaaagtcattggtccgaaatggtgttgcgcgcaaaggagttcttaacacgatggcgtgcaaaggaagtcgaacagttaatcacggagccggatgttgcagagaatgccttatccagccaagttgtagacagtatccgtgcgatagaacgatctgtcgaaagtgagcgcgattctgttggtatgtattgcttgcggaaagcgtatctcagtggatgcttggtggattttagtcagatcattccgcactgttcggacatcaatatgtcttgtggaactgtgagcgatagaaaacatcggatgaattcaaccctgctgcatgagtgcgtcaaagatggcgcaatccatttcgctaaggtgctcattgagtgtggagcggatcccaatagcacgttggacctcagatttgagtccacggtgtacgaggcgacccatacaatgcctttgcattccgcagtcctgggcggcgacatcaatcttgtgcagatgcttattgacgcaggagcaaaccttcatgccgtggacgacaatggaaacaccgccttatgcgccgctgcactcaacgacaacatggatgttgcgaccgcacttttgaaagcaggggccaaccccaatcaagtgcatgacaccgtgatttgtccgcttctttccgcccaatccacagcgatgacggatcttcttttgcaccatggtgccgatcccaatctcatgttggagaatggatatccactcttatctgctctcattttaaagcgaaaaatcaatattgcacggtatctcatcaaaatcaacgcgtgcagttatcaattccgcgagatggaagaagagctgttggaccggcatccattttggattgcgtattactgtggggaatttgaagtgttcaaagatcttgcgaatttcgccaacatcaaccagcatgggtgttatgatcttggacttcttgaattttctgttcgggaggacacgtgtgattacacaagagttctccttgagcatatgatgcgcggtcatttgagaatagacagcgagcttttgtatcttgcgaagtcgcggaggatgcaagaaatgctcatccagtttggcgcagaccccacaataaaaagcgcagattattacggaaaaacccccagttga

SEQ ID NO: 530702 - DNA, 1080 bp, Stenotrophomonas maltophilia
atgagacaacttaatacgtcgatttcccagggggagcaagatctggatgtctatgcaattctaaaagtcaagaatcccagcgcagtattggatagatcgcaagtgcgtagctactttgaggcgcacgacgttaatgaagttattgcggtcaatggcccgctgtggcagagagaaatgacgccccttgcttttgtagcatccaagtggatggaagacgatgagaatgagggcattctagaaattatgagtgatcttattgagcttggcgcgagcgtaaatgcacacgtgacaaaaaatgggtatgggtatggatgcgcggatgactatgactatgactatgactatgacgatgataataagaatggacttgatattattgatgtggctcgcggtggtgatcgtatagctctgcttttaaagagtgggttgcgccctcgtgagcggcacattgagaagattatgtacgccagtgttgacccggatgtcatagcggaaaaatacattggcctgttgcgtctgcatcatttcggcaatttgaatgcccatgatgaaggcttgcggctgttggaaaatctggttcttgcgggctttgatgtcaatggccaggataaaaatggtagtacacttcttcactatcttaatgatattgaacacgtgtcttttcttgtaaaggcaggcgcatcattggatattgtgaataatcatggtctcaatcctcttgatatgtacgatcctaacttcatagcgctcaacgcaagtcgcagagacgcagttcagttgatggttgatctaagcatagatttaaacgcaaggtttcaagaaacagacagcacggctcttcatcaactcatgacgttcgggaatttgcaaggcatacaaaatttgcttgatgcgggcgctgatccatcattgcgcaataaggctggaaaacaggctgctgatatgacctgtgaggacaatgatgatgaacaagaggtgcgggaagcaaaagctttgttggaaagcgcagccacgcaacgaaaacttttggaagaactgggtgagtcgcaacaacaatctacaaagcgacgtaaaatgtaa

SEQ ID NO: 530703 - DNA, 1389 bp, Stenotrophomonas maltophilia
atgctccacgaaggggagtgggagcttgctcaatacgtggtgcgatattcaagcgatgttcgtcttgtgcgcgcggcgttgaacactggtgtggaccccaacattggcattccggcgttttacacggtgcgcagcgatgatgccgccgctttgcttgctccctacacaacaatgctcgatgtgcatggactgctgatgagattgtgcgtgatgggtgacacgtggcggatcccagaagacttgatctattccgatgagaactacaaagacgcccaggagggcgcagcccatatcctcaagctctgtgggaacagtatgggggtccaccagatttacaacaatgcaccctcaatcaacgccaaggatcttctgctcagtgtgtgcgccaacagtgcggatcatgcgcggggcttgattgagtgtggggccgacccattcgcaaccgacgatgggaacaccgctttgcacaacgttggtcaccctggggttgttgagtacctactgagtttgggattggaccccaacgccagaaatcggcacggttcgactccattgcatctcgtggacgacgccgcatgtgtccaggcgttgattgagggtggggcggatgtcaacgcgaaagggagcaagggccaaacaccattgcacacgacgttgaacgtaccgtgcgcgaaagcactgttggacgcaggtgcagagattgatgcgcgcagcaatagttgtgcaacacctttgcacatgatgaattcgccggaggtcagcacgtacctactcagccgtggagccgatccgaacgcacggaatgatctaggccgtacaccactatttgaatacatgcactacttaggatgtcattcagacgcactccatttaactcgcgtacttcttgacgcgggagcggatgtcaacgccattgatcaagcaggacatggggtgttaacgcacgctgcatttaatgagtctgtgtttcatgcggtgctggatgcaggttacaacccattggataagaaatctccaaataacggtaaaacccttcttcatcatgtggcaatggaacacatttcctgcggtttgatgcacagaattattgaactgggtgtggatgtgaacgctcaggacaaattgggattcacagccttgcattacgtggcattgaacaacgcaacgcggcgcttaaattggttgttgcaacgcaaggccgatccaactcttgaaagcgggagtggtcaccgagcgtccgtctatgcgaagacgcccaaagccaaagaattgctgattgaacatgaacagcgctggatccagcgacccatcaaacgtcagcgccgattgcttaataaagccaccgggctgagtacagaacagcactccgttcaacgtcgaaagatgtga

SEQ ID NO: 530704 - DNA, 555 bp, Stenotrophomonas maltophilia
gtgaccaacagcaacgattccgtcacactgcgcctcatgactgagcatgaccttgcgatgctctatgagtggctaaatcgatctcatatcgtcgagtggtggggcggagaagaagcacgcccgacacttgctgacgtacaggaacagtacttgccaagcgttttagcgcaagagtccgtcactccatacattgcaatgctgaatggagagccgattgggtatgcccagtcgtacgttgctcttggaagcggggacggatggtgggaagaagaaaccgatccaggagtacgcggaatagaccagtcactggcgaatgcgtcacaactgggcaaaggcttgggaaccaagctggttcgagctctggttgagttgctgttcaatgatcccgaggtcaccaagatccaaacggacccgtcgccgagcaacttgcgagcgatccgatgctacgagaaagcggggtttgagaggcaaggcaccgtaaccaccccagatggtccagccgtgtacatggttcaaacacgccaggcattcgagcgaacacgcagtgatgcctaa

SEQ ID NO: 530705 - DNA, 555 bp, Stenotrophomonas maltophilia; identical to SEQ ID NO: 530704

SEQ ID NO: 530706 - DNA, 906 bp, Stenotrophomonas maltophilia
atgcctcgggcatccaagcagcaagcgcgttacgccgtgggtcgatgtttgatgttatggagcagcaacgatgttacgcagcagggcagtcgccctaaaacaaagttaggcatcttcatgggtgaattctttcctgcacaaatttccgagcagctatcccacgctcgcggggtgatcgagcgccatctggctgcaacgctggacacaatccacctgttcggatctgcgctcgatggagggttgaagccggacagcgacatcgacttgctcgtgaccgtcagcgccgcacctaacgattcgctccggcaggcactaatgctcgacctgctaaaagtctcatcaccgccaggcgatggcggaccatggcgaccgctggaggtgactgttgtcgctcgaagcgaagtagtgccctggcgctatccggcgcgacgtgagcttcagttcggtgagtggctccgccacgacatcctctccggaacgttcgagcctgccgttctggatcacgatcttgcgattttgctgaccaaggcgaggcaacacagccttgctctgctaggtccatccgcagtcacgttcttcgagccggtgccgaacgagcatttttccaaggcgcttttcgacacgattgcccagtggaattcagagtcggattggaagggtgacgagcggaacgtcgttcttgctcttgctcgcatttggtacagtgcttcaacgggtctcattgctcctaaggacgttgctgccgcatgggtatcggagcgtttgcctgccgagcatcggcccatcatttgcaaggcacgcgcggcgtacctgggtagcgaggacgacgacctagcaatgcgcgtcgaagagacggctgcgttcgttcgatatgccaaagcaacgattgagagaatcttgcgttga

SEQ ID NO: 530707 - DNA, 1173 bp, Stenotrophomonas maltophilia
atggttgacccgcgccatggaaacattgtggccttcacaatgcgtcactctgaattggcggaaattgaaattgatgtgccagagaatgggaagtacgcagtcattgcgtacgaagatctgtctgtttgcctgtacgagacgtacaaggactaccgcgcaaaatggaatgcagagtatggcggcacatcctccgtttccgatgatgtgccatcaacgccagaagaactaatctccaagctttcagagttcaagaggctgctgcaaggtttggaagacgaagatgatggtaatcacgtcgtgtcttttatggagcgaatgaaggccagtggggattcatacaagcgtccgaacacaatgacagaggcgcgcgcccaggctggatcaatttttaaagattcaaccgacccaatgctgggggctgttgtaaagggtatctatcaaagccgtcacgttgacatagatccaaacgatcttcgccgctgtgctattgcagccatctgtgccggacgggatttgctttacaagcaaaatggtcgagaattggatgagtcaaatccattctcaaatgtgaaggcatctatttcgccagaaggcatcatccattcgtttgctgtgaacaatcatgtcgtcttctttggagacgagccaatggaggaagatgaccgtctggcgttcgatttggactacgttcccctgtcgatccattatattgacgcacgcacgcgtagtgttcaagaaatcactcatgaaggcgagcaggcgactagaaaacgtcaagattttccaagcctactggatctgatcaataatattggtcacgaacaacttgatgttgttgcaaacaacttggcggtgatcgatggaatagccaacgagcagcttccacaagccctggaactggcgttgtcggtcgcaaaaattcgatttcaaggcgcacaactgaacaccataaacgcctatatccgcgtgcgctatgcaatgcggctgagcggagagcgggactggtctgttgcccccagtggccgcgttgttgccggtacaaaaactgccatcattctcaattgtgatgatggggtaggtcacatctgttctggtgatgatctgtgcatcccatctatcgatcaaattttctttgtgggcaaggatagcgtcagtcgatttcttagaagctaa

SEQ ID NO: 530708 - DNA, 627 bp, Stenotrophomonas maltophilia
atggaccactgctgcggccacaagcgccaggaactggaagcgctggcccttcacagtgcgcagcggcgcgtactggtggcagtactcgtcatcaacctggcgatgttcttcatcgagttcggcgcgggcatcgtggcgcgttccagtgccctgcaggccgatgcagtggacatgctgggcgacgcgatcgtctacggcctgagcctgtgggcagtgaaccgtggggcgcgctgggaggccggtgcggccctcgccaaggggctgctgatcctggccttctttgtcttcatcgtggtggaggtgatcagcaagctgatccacggcgtgccgccttccagcggcttgatgctggggttcggaaccatcgcgctggcggccaatctggtgtgcctggcattgctgtggcagttccgcgcactcaacatcaacatgaaaagcactttcgagtgctcccgcaatgacgttgccgccaacatcggtgtactggtggctgccgggggcgtagcgctcaccggaagcgggtggccggacatcgcagcaggcgcggtgattgccctgttgttcctgaaatctgcgttgggggtgattggggaggcgtggcccgcgtggcgggcagcggcgaagtag

SEQ ID NO: 530709 - DNA, 906 bp, Stenotrophomonas maltophilia
atgccgaccttggtcggcgctgtgggtttcgtgccaaccaaggttggcacctaccagagcgatgcgtcggttgttgcaggggtagtgccggccgctggccggcaatcgccgttggtagatgccgaccttggtcggcgcggcgggtttcgtgccaaccaaggttggcacctaccagagcgatacgtcggttgttacaggggtagtgccggccgctggccggaaaccggtgttggtagatgccgaccttggtcggcgctgtggtttcgtgccaaccaaggttggcacctaccagagcgatacgtcggttgttacaggggtagtgccggccgctggccggaaaccggtgttggtagatgccgaccttggtcggcgctgtggtttcgtgccaaccaaggttggcacctaccagagcgatacgtcggttgttacaggggtagtgccggccgctggccggaaaccggtgttggtagatgccgaccttggtcggcgctgtggtttcgtgccaaccaaggttggcacctaccagagcgatacgtcggttgttacaggggtagtgccggccgctggccggaaaccggtgttggtagatgccgaccttggtcggcgctgtggtttcgtgccaaccaaggttggcacctaccagagcgatacgtcggttgttacaggggtagtgccggccgctggccggaaaccggtgttggtagatgccgaccttggtcggcgctgtggtttcgtgccaaccaaggttggcacctaccagagcgatacgtcggttgttacaggggtagtgccggccgctggccggcaattgccgttggtagatgccgaccttggtcggcgctgtgggtttcgtgccaaccaaggttggcacctaccagagcgatgcgtcggttgttgcaggggtag

SEQ ID NO: 530710 - DNA, 174 bp, Stenotrophomonas maltophilia
atggcacagcagaaccagaacccgaaccagaagcagcagggccagcagaaccagcaggatcagcagcagggtcgtggccgcgaccagcagcagcaacagcagcagcaacagcagcaggaacagcagaagcgcaaccagaaccagcagcagggcggccacgacgaagaagaatga

SEQ ID NO: 530711 - DNA, 444 bp, Stenotrophomonas maltophilia
gtgtacagctacgactacgccatctccctgggcgtcaggcactcctccgcagccagcgctgacatcgccgcccggctcggcatggagcgcgggttcttccgcgatgtggggaccgatctgcgtggcgccgatggcaggctgatccgcgtgcatgcacacacctgggtgctcttcgagctggccgagggcaaggacggctggctgatggatgcctggccacagctggtcgacatgctgcaggcgcgggtggctgtgatccaggcattgagccaggaaggcgccgacgtcggcctgcgcatcggcgtattcggcaagcgcgcctgggccgggtttgtactggacgacgcgctggtgcgactgatggccgatctccgcctgggtttccatctggaaacctattttccggatccgccggtcgactccgagagcgacgacgaggcctga

SEQ ID NO: 530712 - DNA, 993 bp, Stenotrophomonas maltophilia; identical to SEQ ID NO: 517266

SEQ ID NO: 530713 - DNA, 591 bp, Stenotrophomonas maltophilia
atgttctctttcaacgaagtgattgacgcgttcaagagcgcttctgttcttgatcccaccatggctgagattggttattgccggacactggacaggaaagcggtcctgctcggttaccgggattatcatgacttccgtgccagcttggagcacatgcccaaggacgaacttgggccagtgtctctccggctcatgcggaagatttgcgctgcaaggctgcctttgaacaattcacagccctacttcgagctgaaggtgctgccgaacggcatagcccactacagccagtgggagggttgggacaagttcggtcaggaagttcgggtaccgcgcccccttgagggagccgcatcggtagaggccgtacgtagattgggacgttatcccgtctacgtcatcgaagcagagcgggaactcatcgcatggaggggcgtttggcaatcaaccgcgtatgtccgatcggatcttgcgaggaagaatttcccaaggatgttcaataagcggcacttgattgcagatgacgttccagtcgaactgattcgacttgcagccgcccgctgcaattttgatagcaacattgcaatggggtga

SEQ ID NO: 530714 - DNA, 1080 bp, Stenotrophomonas maltophilia
atggcatttgcaatcccggaatacagccgcaagcaggtcgagaagtctggaaatattcttgcacgaccagatggactccctgatgaagccgtaaatgaagctctctctgttgtttccaactggagggccgcgcatgctcatccactcaacacgtttcaagctgcgctacgaaacaaactaaagagtcaccagcttgatgcaagatccgcacccgttggtcagagactcaagcgcctcccctcaattctagccaagctccaaagattcgaaaaaatgtctctctcccgaatgcaggacattgctggattgagggcagtggtaccagcagtcactgacctaaccagaataagagactcatacctcctcgcagaccgcctaaagcatgaactgcgcacaaatcaagactacgtggcggagccaaagctcgacggctatcgaagcattcatttaatctatcgatacgagaattcgcgattccctcagtacaacggactacacgtcgaactgcaacttcgcacacgactgcagcatgcttgggctacggccatcgaaaccgttgatacttttgcacatcagtcgatcaaagctggacgccctactcccgagtggggggagttcttcctcctagctagcgccgcatttgcaaatctggaaaaactcccactccccacatcacttactgggatgactcaagtcgatatcaacgataggctgcagcaggtcgagcagcaactgaacgttcttttgcggcttcgtggattttcagtagcagcggataaaatacaacgcaaaggtcgctccgcctccccatatcaccttgttgttctcgacaccgagcgtcgcctactcaacatcaagtcctactcaaagagtgacctcgacttggcgacagcggactatgccatcgcagaacagaagaccgcgaggggagaaccgatcgatgctgtcttggtgtcaggcggcaaagtcgatcagctccgaaagacctatccaaattactttcttgatacaactgacttccttaaccgaatcgccgccatctgcgctggtgcacgcaatcgtcggtcgagcgcccgttag

SEQ ID NO: 530715 - DNA, 438 bp, Stenotrophomonas maltophilia
atggtcaaaaaccgtagcgctaggcactacacagataactactaccaggcggtgtgttgtttcgcgcacaccgcgcccctgctgcacgaggtgcatgccctgcacgggatgcaccccatgcgcccgctgcacccgctgcacccgctgcaccacgttcaccagtgcgcgacgttcaccaccaccgcatgtgcgttgtgcggaaaacccatcaccagctcacccacaggcagaccacgcacctactgcagtgatgcctgtcggcagaaggcgtatcgcaatcgcctgttgttacgaaacccattgagccgcgcgctggaagccgtatcgttgcagttgtcggcgatccgcgatcccgacaccgcacactccgcgatcagcgatccggcagcggccaatgagttcacttggcaagcctgtaccggagattcccgcgcgtga

SEQ ID NO: 530716 - DNA, 189 bp, Stenotrophomonas maltophilia
atgagcgcgatcatcatccccttccccacccgcgccccgacctggcccgatgggcaactcggcgttgagctggaaaggctggctgtcttgctgcagaaagctggcaaccggcaacccggtaaatacgtttcgctcgcacaagcgcgcgcggcggccttggccgcctatcaacagagggcacagccatga

SEQ ID NO: 530717 - DNA, 360 bp, Stenotrophomonas maltophilia
atgacgcccatcgtacaccaaccatccccgcccgcaatcgggcaaacccccgacgcgcattcagacttttccgacaccgcgcgctgggccaccgttgcgctgactgacagccagaacgctcccaactatctgcccggcgacgtgctggtgatcgacctggaagtgacggaataccgttacgacgccatgtatgccgtggaggtcggcggcgaggcgctgattcgcttcgtgcagcaccgcccgggtggcctgtacgtctacgcgctgtcgggcatctacgaggggcacacgatcccgcgcgctgcgctgcgcgtgctgggcctcgtcacctacgccaacaagctgcggagggtcggatga

SEQ ID NO: 530718 - DNA, 549 bp, Stenotrophomonas maltophilia
atggctaacaagaattcacccgtgaagaagcggccaggccgtccccgcaaggctcccgaggagaggctggagcagttcagtatccggctgccgcccaagctgaagctggggctggagctgctcgcccgcgctcagcacagatccttaagccaggcggtggagtgggcgcttaatgccgggctctccaagtaccagctcaaagacgacagctactacgcgtccctgtcgtcgctacttgatgacgtgtgggacttcacaccggccaagagtgcactcaccatgctgctccatgcgccggagctaatgacctatcaggaccgcattgcggcggagctggtggagtacagcgtcgaaatgcaggccctggagcagggccgcgagtgcgagatcacccatgaacagctctttgagctggctgaggaaaactggccgtcaatcttgaaggtggccgaacacatcatcagcatcggcgagtcgccgcgcggccacacactcttgggattgaatcgtatggggtggatgggaaatgccgcgccggcaagtggctga

SEQ ID NO: 530719 - DNA, 459 bp, Stenotrophomonas maltophilia
atgcgattaccaagctatctgactcgctcttccactggtcgctaccagttgccgatgaaccccaccaccggcaagagctaccggggcggcaacttgctccacttgtgggcattgctaggcgcctgggacaaccaggacaaccgctggatgacttacaagcaagccgcccccgtgggcgcccaagtgcgcaaaggcgagaaggccagcttcatcgaatactgggattggtcaccggtcgaagaggctaagaagagtggggatcccgagttcatcgccaaggcccatcccaaggtgttcttcctccgcgtgttcaacgcgatgcagatcgatggggtgccggcgttggtcccgccgcccccgcgcccagagcccgacatccaccaggcttgcgaagcggtgctcaaggagagcagggccgagatccatcacgacgggggcaggcgttctaccggccgatga

SEQ ID NO: 530720 - DNA, 219 bp, Stenotrophomonas maltophilia
atgacggacagcatccacttgcctcagcgcaacaacttccactcgtccagcggttactacgtcaccgcgttgcacgaactgggccactggacagattttccaacccgcctcagccgcgatcagaagggggctttcgggagcatcgactacgccaaagaagaactggtagggggagatctccagcatgctgataggcgaacgactgggcattggccatga

SEQ ID NO: 530721 - DNA, 609 bp, Stenotrophomonas maltophilia
atgtccgacacaacctacagccaccgcatcctcaagacttatggcctgctggtggacttcgaaggtaagccacgcctcaagaacgttccgtcgcctctaaccggccaaaagaaggcaaaggagacgatggaaaagtggacgcagcgagtgctgggtgatgaggtcagcaaggtccgtatctaccgaccggcacgcgttaaaagtgacacactcattgccagccttacagacacgcacgatgccaagctggtgcgggacattgttcgcggcgccgttcgcaagaagagcaagtcagcgaaagcaaagattgaagaaatcaaggtggagcacgccgccgagcttaggaagcgcggagccaccgcgcgagaacttcggaaggcacacgaagaagacctgtcgggaaagctcgatgagatcttggctgcgacggcctatctgccgttggacgaccttcaggacttggtggtggaactcggagacgacttgagcccttcggtccgcagctgggcacttgccttgactccggccaaagatgcagacgaggtttccgtcatcgacgttctcaagcaaatgctcttgcgcatggacgtgctttcgaagaacaagtag

SEQ ID NO: 530722 - DNA, 243 bp, Stenotrophomonas maltophilia
atggttcgcacggttcagctgaagtcagaccagcggctcaacgctggctcggccgtcggcgccgctgtgggctacggcgcggctcgcaaggtggacggtgactaccgcaatgccgcccgtgtggccggtggcgtcatcggtggggcgccggaaccgccattcaaaagggcctcagcggccgccgtgcagtggagatttatgtgtgcgtcttgtccgatcgccgccagcgcgtcctggcggtag

SEQ ID NO: 530723 - DNA, 429 bp, Stenotrophomonas maltophilia
atggcattggatatttcggccgcccaggcgcgcggcaacatggccgcagtgcgcgaacagtggcggacggcacacttggagcagatcaccgcggtaatctcggccgcctccgatagcggcgagatggcagcgtcctatgagctccaggtgagtgagaacgaggaggctggccttgaggaagttatggacgccctaactcaacaaggcttcaacgtctcgcagcgcgggaagcgccttgcggtctcaacggctgttaccaagaaagtgctgcggacggccgctggcagtggagctgacaccgatgcctcggtagaggcaccgcgtcacaaagaagatgtggttctggatatcagctgggccgaggagcaggaagaatccgaagacgcaagcggctctagcctgccgccgacccctgcgccgttgatctga

SEQ ID NO: 530724 - DNA, 1107 bp, Stenotrophomonas maltophilia
atgagtagcattccacacactttttcttcccttgagctcgaaaatgcgcgaacgttgacgccgagcatttcgggaccaagtgagtcttcccgcttcatccaatactgcatcgactactttgcgcagtggcagaaatgcagcaagggtagaatagaaagtggcgccatagcgcctgatcaagccacactaattatctacgcgctagacccaaaagttacgacgggaatcaaggaattcgacggaataaagctgaagcaatcttacaaaagtacgtactcaatagagtccggaatattttgttccaatcagtcacttcatacggtttgccgcatccctgtagagcactcctcgagtgacgatttaatcgaatttgctcaagagaaaattgcgatcgatcagacattcgtaattctgctcatgaccaaaggaattattctagttcacaacgcaggcgagccgattgatgactggatcaacaaccccacagcggttcctgttagcggcactaccaatgaaatcagtttgaaatcggtggatgagcaacttatccgatatcagcatgcacacactagtacacacagggcatataccgcgcgtttgatgtggaggcatgattcagcaggacgcccaagactgacggagaagcctgaacttcaagtgcaaactacgcttctcacgcaccttaaggcctggtatcagaatgcaaacgtcatagtacaagaggaaatcagcaatccaggagggcgtgtcgacattcaaatgacccgcccgtccagtaatgggattacgctaagcacgatcgaacttaagatcctgaaaccgaaccttaacgagaaagagaatattgcatgggcagagaaaggaattgaccaagcaaaggggtacattgccccagaaagtgatttttctatgacatgtctatttgatgcacgcatagaaaagtcgcccatttttagcccactcaacgaatacgcagcagaagccaaggttgaactgagaacgttctcgatgacacctcctccagccaaggaagccaaggaaaagaagccgcggtcaagcaaagcgaagaagacgtccgtccctcctccttcagagaaatctgagtaa

SEQ ID NO: 530725 - DNA, 729 bp, Stenotrophomonas maltophilia
gtgaagccggcaacagggccacgaaaatcagattttgagcgactgcagttcgcccgatgggtgctttttctcattgtcactgcacgagctgccggggtgcaaaaaatcgatagagagagattacacgccctgctatttcagtcattcgcatcatcgctgttttatgggataccccctctgcgccagagggcccagcgaactctgcatggcccatactatcgggctgcacatattgcagtaggccagctagccctaagtggactcgttgttatttccaattaccacccactagatcacaagagcggactactctttgacggcgaactatctccttcaattatgggacttgaagttgccagcaagctacgcgaaacgggctatggagagagaatataccgatttctcttggacctatgcacaagcatgatgctggcggtcaccaaggacacctcagactcgcaagctcccgtcatgaattttggcgaagccgaagccgcgcacgccgcagcccagaggaaaatagatgacgtgctaagccttgatcttagctatcgtcaagccagtgcgaggaacgaattaattctgcgcacaaccttagggccggatgatatgccacttacgctcatcggactcagggacattgaggctgccgttgcggacgggcgcatacgaaataggagagacgttctcacggcatatcagtatttgctccgccggagggctgcatga

SEQ ID NO: 530726 - DNA, 2019 bp, Stenotrophomonas maltophilia
atgagtcgagcgatctatctacccattttggatagcctgacagttaagaactatccactctatccaggcaaggaaggtcaaggactcgagctagaatttagagacggagtgaccgttcttgcaggcatcaatgggatcggcaagacgactttgctcaacctcctgctgcggatgatcattggccccacagatcccgtgaaggcggatcgagagttgggacgagttagcaggcgcgtgcttacgatgccggtcaagcgtgatttcttcagtgcacgcgttccccaagcacttcaggcaaatgcaaaggcaaccttaaccttccgattaggtgatcgcaacctaagtgtaagtcgctcgctacgcgacatgagcctacttgcgattacagtcaatggtcgaaaacagcgcatccccgaagagcaagctttcatcgaagagttggccaaatgggcaggggtgagttcagcctatgactttcacattcttgttcggtaccttcagttcttcgccgaagagcgccttcccatcctctggtcaccaggaactcaatttgagttcttcaagattctttacttcgatagggaattacaggatagactgaatacgacatttgctcgcatccagcgggtcgataccagttacagaaatcgacgacatcaattgaataaacggatcgagagaaatccgaagccagaaagtgatcaggacatcccagttgaaaccttgctaaagatggtcgccgaggcacaggcagcctttgagcgggcagatgcagcttatgacaacgcaggcgagatctatcaggtacagaggcaacgcgcctttgacgcttacgacgcgatctcgcgagccgaggtgtccctaactgatgccgaagccaactttattgccgcagactcacactttattgcccatgcacttccgaatctagatgacaagctaaagttcctcatgcaagggattgggggcggccaaggctgctttgtctgtggaaatagaaatagcaaatcagcccgcgcaataggaaaggagctgttacaaggaaattgctttgtctgccactcctctctttccgccgatcaaataaagctcaagcctctttcggcggataatgttcgcgcagtggagagtgaggttgaagccgcccacacagagctgaacaacgcaaagctccggcgtgacgctgcagaagctgatctcaaagcggctgggttagagcttcaagaagccagttctctgaggcgcacaactcaacaacaactcgaggaactacgccgccacctcccagcagagggatctctggcgggcaccgaaaatggcatcatcgaggcagagaagaaggcactcctggagctggaactccagcgcaaccagctcgtcgaggaatatcgcgaagcgattaccgaagggcagacaaagatggccagcctaaccgaagatctgcgacgctcctttactcgctacgcggaggcattcttaatggaggaagtgaacgttgatatatcacgccaatctccatttcgtcccgcaactggcgccaaggctgtgaatattccgacgttcactgtaaaaatgacgtccagtaccttcaagcaacccgaggctcgatccagcgccgatagcgtctcggaatcccagaaggaatttcttgaccttgcctttcgcatggccatgattgaccttcttgcagcaaaagccagcatcacactagtcgttgaaacacccgaggccagccttgacagctactttatgcggcgagcagcagatcttatgcgcagcttcacaacccatcaggaatctgccagcaggcgccttatcgcaacttcgaacctgaacggaaccaagatgatccccgcattacttggaatattggcaaaggactggtcgattctctctactcgcccaccggatgcaggacatctagttaatcttatggagcttactgctcgagccaaggtacttgatgttccggaggcttcagatcttcttctcaatgagatccaggagtacatccagtga

SEQ ID NO: 530727 - DNA, 1260 bp, Stenotrophomonas maltophilia
atgcaacttgccttcgagcgttggactcagggcagaacggtttcgaccctgggtacaaattcgggctcggagccgctgccgtttcaacagtggcgcaatttcaaggaagcatttgctccggagctggtcgcacgtgcggtggctgagagtggtcgaagggtgagacgatgcattgatcctttcggaggatctggcaccactgctttgacttgccagttcttgggagttgagccggtgaccattgaggtcaatccttacttggctgatttgatcgaggcaaagcttacgccgcatgatccgggagcacttcttcgtgactttcgtaggctcaaaaggctggtacgacagccccgtcagtacgatctgtctcatctgcctcccaccttcgttgagccaggtgtaggggggcgctggatcttcacagctgaagtcgcacagcgaattgaatgctaccgcagcgccatttgccggttggactcacgcgcctcgcagcttttcttcagggcgcttctgggcggagttatcgttggagttagcaacgttctggtgagcggcaaggggaggcgatatcgtcagaactggatgtcacggcaggctgtggcgtcggacgtggatgatgccgtgcttgcacacattgaaaaggcgcttatcgaagtgacgacgcatgcgattcgtcccgcgagagcttacacgcttcttcgtggggactcgcgcgtgcgtctgcctgaggttcctcgagcagatttggctgtcttctcgccaccatatccaaactcgttcgactatacggatgtttataatgttgagctttggatgctcggctacctttcagatgcaaaatcaaatagagcccttcgccaatctactctaacctctcacgttcaggtgtcgcgcgtatattcccaaaagcccagtggttcggcaaagttggatttggtgtcggagcgattgcattctgaaacttccaggctatggaataggaatataccttcgatggtagacgcctatttttatgatatgaagaaaattcttcatgagctgcatggaaagctctacgccaacggagaagtttgggctgtggtaggtgatagcctgtataacggtgttcatgtccctgttgcggaggttctagaggaacttggtgcgggagtaggttatacgtccgtggtgaaagaggcatttcgctcgatgcgatcttcggcgcagcagggttggcgcgctgaactcagtgaaacgcttctggttcttaggaagaagtga

SEQ ID NO: 530728 - DNA, 435 bp, Stenotrophomonas maltophilia
ttgggtcgcgatggagagcatggcacgctctacaagcgcctgttgaccatccctggtatcggccccgctgtcgccgctcacctgatctactacatgacgcgctggccgttggccaacgccaacgcgtggatcgcctgcacgggcctggatccccggcccaacgagtctggcggaagaacgggacggcgtcggctgtccaaacagggcgcgccagtgctgcgccagatgctctacatggccgccatggggctcaagcggtgtcgtcgggggcaaccgctctacgacgagctgtcaaaacgcggtcaccccagcaccgccgtcttcaacatcctggccagaaagctggccaggatcgcctggggtgtcttcaaaagcggccgggacttcgatccggccatgctgaaggtgggtcaagcctgcttccagcaggcttga

SEQ ID NO: 530729 - DNA, 267 bp, Stenotrophomonas maltophilia
atgttgacgctggggcaggtggcggaccagaatcgggccatgagccgactccttcccgtggtgtgtctggtcgccagcatggtgctgctgctgctgcgtggggtgcacgtgatactcaagggtgttccggccatggccagcgaaggtgccagtgctgcgtatgcacaaggctacctgcatggacaagcggcagccgggtgggtgttgattgccgctgcagcagcctgtgcgctcattgcctggcacagggcgcgcgccaggaagtga

SEQ ID NO: 530730 - DNA, 978 bp, Stenotrophomonas maltophilia
atgaagatgggaatgcgcggcgccgcggcgtcggttctgattctggcgatgggcacttcgggtgtcgctctgtcgcaacaaccggctgcccccgcagccgccaaggagaccgcaaccttgaattcccccaagcagaagctcggctacgccatcggccttgatgtcgccaagtcgttcaccccgatcgccgatgagatcgatgtggccgccctgcgcaccgccgttgagcgttcgttcgagggcctgcagccgcagatcacccaggaacaggccaaggccaccgatgccgccctgcgccaggtcgtgatggcccgcagcggccagcaggtgccgggcgtggcaccgggctcgcagccgccgaaggtcgaccgcgtcaaggtgtcgcagatgatcggctcctactcggtgggtccgtcgctggcgcagctgaaggacgatatcgatgtcgcctcgttgtttgacgcaatcagcaccggcctgaccaagggccagccgaagatgacggaagctgacgcgaccgccaccatccaggccttcatgggtgccaagcaggctgaaatgcaggccaaggccgcccaggctgcgcagaccaaccgcacggaaggcaacgcattcctggccaagaacaagacccagccgggcgtggtgaccacctcgtcgggcctgcagtaccaggtgatccgcccgggtagcggcgagcgcccgctgccgagcagcaaggtgcgcgtgaactacgaaggcaagctgctcaacggcaccgtgttcgacagttcctacggccgccagccggccgagttcggtctggaccaggtgatcaagggctggaccgaaggcgtcgcgctgatgccggtcggttcgaagtaccgcttctggatcccgggcgaactcgcctacggtgagaacggcaccccgggcggcccgatcggcccgaacgcgactctgacgttcgacgtcgagctgctgggcgttctgccgtaa

SEQ ID NO: 530731 - DNA, 345 bp, Stenotrophomonas maltophilia
atggcgattaattacggaattcacacctcgccgcttgaggcgctcaagcatgctctggatgagcagctgtccaagggcaagagcaagctcgagcaggacttcaggcaggcctatccgatcctggaacagcacatcgcaaagaagatgcgcaagaagatcctggtagatcagttcaatgctgcgtacaagcatgagctgaacctgattcagttccgaaagctgctcaatgaggagcgtgctcgtcgccatgcggagggcgatgctgctcggtgccagagctgtggccatctgttggtcgaggctgaagagcagaccgcgtttggcgcggcagaggaggatgcatga

SEQ ID NO: 530732 - DNA, 3399 bp, Stenotrophomonas maltophilia
atggcacgaccacgcaagacccctgccgccggttcggtcgcaagcggcgcagccggttccactcgcggcggcaagaagcgcagcttccatcaagaattggtgctcaaccgctgggcgctgggtttctttcagggcggcacgctggcggcactcaagatgcgcttgggcgatgaccgcttcgagggcatcgacgaggacggccagaccaagttcttccacgaactgatccgaggcttgttcgatcccaacaaggtgcccgaggccgacctgcggcgctacgacttgaacgtcgtcgcccactggcaggccatcaccgcccagcgcaacaagctggaaggccacgaactgcagatgaagtacttccagtacctctcgctgttgttcaccgagctgtatctggattggtacttcaaccatcgccaggagttgctggatggcctgaacgacgaaatgacgcgctaccgcgccgaaacgggcgcggagccgttccgcgatttcgaggccgatgacctgaacaagatcgccttctggaacgccacgggcagcggcaagaccctgctgttgcacgtcaacgtgcgccaatacctgcactactttcaggccggtcgcggtgaccactttcccgacaagatcatcctgctcacgcccaacgaaggcttgagccgccagcacctggaagagctgcacctgtcgggcttcgggttctcgcagttcttcaacaaggcccagaccccggcgcgcggcaccatcgagatcatcgacatcaacaagctgggcgatgagatgggcgacaagaccgtcgccgtggatgccttcgagggcaacaacctggtgctggtggacgaaggccaccgtggtacgggcacggcggcgggcgcgtggatggcgcggcgtgacgcgctggtgcgaggcggttttgccttcgagtactcagccaccttcgggcaggcagtagccaagggcatgaccgtggcggcggcggaagaagacatccagaagaagcgcgccaagatgctgttcaacaccaccagcctgcgcagcctggacgacgggcagaaggcgcagttggcactgtcggaagaggacaagcgccgcgcgcgcatcaccgctacccgcgagatttacgccaagtgcatccttttcgactactcgtacaagttcttctatgaggacggctacggcaaggagtcgctgatcctcaacatgaatggagatgcctacgagcaggcggacaacgctcgcaagtacttcaccgcctgcctgctggcctactaccagcagctttggctgtggagcactcaccgctcggcgcttgccgacttcaacatcgaaaagccgctgtgggtgttcgtgggcaacaccgtgtcaggcgaggagtcggacatcctggaagtggtgaacttcctcgcagacttcctgaacagcgaagcgcagatcaagagctggctgaccgacctgattgcggacaaggcgcagattctggacgccaagggcaacaacatcttcagcgggcgtttcacgcccttgatgggtttcggcggtcgcgttgatgatctgtacgccgacatcctgctgcgagtgttcaatgcctcggcccgtcagcgattgaaactggtcaatatcaagagcagcaaaggtgagctggcgttgcgcgtgggcgatgccgagcccttcggcctgattaatattggcgatgatgcaaagttcttcggtttggcggagagcaccgataccttcgatagtgaacgcgacgacttcggcggcgcgctgttcggcacgctgaacaacaaggacagccgcctcaacgtgctgatcggctcgcgcaaattcacggaaggctggagcagttggcgcgtgtccacgatgggtctgctgaacatgggccagggtgaaggctcgcagatcatccagttgttcggacgcggggtgcgcctcaagggcaagggcttctcgctcaaacgcaccttgccgcaggacaggcccaaaggcgcgcacctggacaagctggaggccttgaacatcttcggcgtgcgcgccagctacatggccgcgttcaaagactaccttcgcgaggaaggcatcacgcccagtgacgaagtgctggagctggacttcccaacacgggccaacctacccaaaggcaaactcaagaccttggcgctgaaggatggctacaaggacaaccagaaactcgggttcaagcgcacgcacttcccgtggctgtacgagattcccgcgcagttccagggcaagatcaagccgccccacgtggtgcttgacctgtacccgcgtgtcgaagcgctttccagcaaggacaagggcacaacagcacctacggcggaagcccgcaacaagggcaagctgaatcacacgctattcacggctttcaattgggatcgcatctatctggcgttgcaggattacaagttgcagcgcagctggagcaaccttcggttggaacggcagaagctgatcgacttctgcgcggccgcgcaggattggtacacgctgttcatcccggcggcggaactgaacgtgacgaccttcgccgacatccgcaagcaggaagagatcctgcttcgactgctgacggactacaccgaccgcttctacaaggccctgaagacgggctacgaaggtcagttctacgacatcgtccacatggacgaagagcacggatcgatgctcaagctctaccagttcgagatcgagaacacggacgacggcctggaatatcagaagaagctggaagtgctgaagaagctggtggcggacggcaagatcggcgaggccagccagtggaacgccccgcacatggtggcgatcagcttcgaccggcacctgtactacccgttgctggcgttggaagacaaagacgccgtaccgctgaaactgcgcccgctggcttttgacgcgccgagcgaagtcgagttcgttcgcgatttggaggcgttctacaactcgcccgacggcaagcaggccatcggccagcgcagtctctatctgctgcgcaatgcagatcgggaagagaagggtttgggctttgcgctggcgggcaacttctacccggacttcctgctgtggttggtggacgacgccagtggcaagcagtggctgaccttcgtcgatcccaagggtctgcgcaatctcgatctctcgcaccccaagctgggcctctacaaagaagtgaagacgctggaggcgaccctggcaggacaggcgaaggcgggcgaacccccgcttgtcttgaatgccttcgtgctgtcgccaaccaagttcgccgatctgctcaacgtgggagacccgacgaagaaggccgatctggagggccgccatgtgctgttcatggaggacggcggcagtgcctacctgaaaaagctgtttgcggtgctggcgtga

SEQ ID NO: 530733 - DNA, 717 bp, Stenotrophomonas maltophilia
atggttgagcagggcgattactttgacactgtcttaaagcccagaattcagaaaatcgtcttttccgctgattggtcagaggggaaggcgactagtccagagactggcatctctcactgcttcagggtaattaagctcgaaagctacgaagacaccctgaacaacctgcaattgcgccgtactgccgcgcagagcgaaatgttcggcaccctgccgcagcaggccaaggacgactacctgctcaactacctgctggacgtggagagtcggggctcgctactgtcggtggaggacttcaagaagcccttcgattacaccctcaacgtggccgtggattcggcgggcgcgttcgagccgcgcaagatcgatctggtcgagaccttcaactatctgatcggcctgcgcgtgaagcacatcgacgcccagccgcagcgcggcttcgtcaccgtcaccggcaccttgcccagcggcgaaagctgcctggtgctgtggcgcgattgcgatgtgctggactacgaaggtatcggcaagctgtgcgacaagctggccatcaagccggcggacaacgagtttgacgtggtctacatcaacggcgaccacaacattcccaccgtgctgacgcagacggccgaggaaggcggtgccacccgcgtgctcaagctgcgccagatcgagccggagtttctggagcgcatgttctccgtggaggacatctga

SEQ ID NO: 530734 - DNA, 1830 bp, Stenotrophomonas maltophilia
atgaccaccaaacagaatcccaaattccaggagctcgtcgccaagctgcgcgagatcttccagatcgaccgcccggaactggacttcggtatctaccgcatcctcaacgcccgcgcgggcgagatcaacgactatctggagaaccgattggccgaaaaggtgcaggccgcactctcggcagggagcgccgccagcgcgcagcaactgcaggccgaattgcaggaggccgagaagaacgcccaagccttgggtgtcagccccgatgccgtgcccgaggtgcaggaactacgcgccaggctgaaagagacagcagcgggcagcagcgaacacgaaaacgccgtcttctcacacctgctcaccttcttctcccgctactacgagcaaggcgacttcatcagccagcgccgttacaagggcgacacctacgccatcccctacgcgggcgaagaggtgatgctgcactgggccaacaaagatcagtactacaccaagagcggcgagaacttcagcaactacagcttcaagctggacgacggccgcacggtgcatttccgccttgccgccgccgacaccgccaaagacaaccgcaaggacaacgccaaggaacgtcgctttgccctggttgtggccaagaccgtgacccgtgtggatgacaacggcgacgaggtcgaagaagagctgctacccgttgaggaagtacaagccgccgatggcagcaaggagctggtcatccgcttcgagtacgccgcccagcccaaaggcaccaagcaggaggcgctggtcaccaaggctgtcgaggccgtgctggcggatgccgccgtcaaggcccgctggctggctctgggcagccgcgcgcccaccgagaaaaacccgcagcgcaccctgctggataagcacctgagcgactacaccaccaagaacacggcggactacttcatccacaaggatctgggtggttttctatgccgtgagctggacttctacatcaagaacgaagtcatgcacctggatgatgtgcagaacgcgggcgcatttgccgacatcgaaaagaacctgcgcatgatccagtgcctgcgcagcatcgcgttggagctgatcactttcttggcccagttggaagacttccagaagaagctgtggctgaaaaaaaagtttgttgtctccagccattactgcatcacgctggaccgggtaccggaagcgctgtggccggaagtggtagcgaacgagcggcagtgggaacagtggaaacagctaggcgtttggggcggcaacgcacctgggactgtggaggacctgaagggtgcaccgtatcggatgctggatacagcgctgttcgctgatgatttcaagtggcggcttctggccagaatcgatgatatcgacgatcgccttggaggcaccattatcaatgccgacaacttccaggcgcttgctctattgagtagtcggatggctggctccatcgattttgtttatatcgatcccccgtataacgcaaccacgagtgaaatagcctacaagaatggcttcaagcatggttcttggatcacgctcatggaaaaccgactgtctcgggcaatagcgctaatgcgacgcgacgcgccagtttgtgtggcaatcgatgagaacgagagggagcatctatcaatgctgatgaaagacctgttctcagagggcgatacaactcagatcagcgtgatccacaacccgcgtggtattcagggtagtgggttctctgtaacaaacgaatcggcgattttcttcaggcctgaaggcaagctgctggaaaacgcagtcttaatgattcgaagtccaagcctctcatga

SEQ ID NO: 530735 - DNA, 2949 bp, Stenotrophomonas maltophilia
atgtcaggattgatttcctcatatcacgcgaagtactacgcccatgaaattacccgccggcatggcgctgatggcgtagatcgtttgtcgcgatcgttgttcgacgccagtgttgatctgaacccacatcagatcgaggcggcgctgttcgcacttcggaacccgctgcaggaaggcgtgctgctggctgacgaggtgggcttgggtaaaactatcgaagccgcgctggtggtttgccaatactgggctgagcgccgccgtcggctcttggtcatctgcccggcgagcctgcgcaagcaatgggcgcaggagctgcactacaagttcgccgtgcccaccaccgtggtcgatgccgtttatctgcgtaagcagtccgctggcgacatgcttgccaacctgcaacggcaggttggcaaggcggtcgttatcatgtcctaccagtttgccgccaagctggaggcagagctgcgtgctgtgccttgggatgtggtggtcatcgacgaagcgcacaagctgcgcaatgcgcaccgtgccagcaacggtacaggacaggcgctcaagcgtgcgctgcaaggccgcaagaagctgctgctcaccgccacgccgttgcagaactcgctgatggagttgtacggcctgtcgacgcttatcgacgagcacatgtttggcgacgaaactgccttccgcaagcagttcatgaacagcgaaacaggcttggaggaactgcgtgagcgtcttgccagctttgccaaacgcacgcttcgtcgcgatgtgctggagtacatcaagtacaccgagcgcaaggccctcacccagccgttcaaccccactgacgacgagcaggcgctgtacgagcgcatctcggcctttctgcaaaaggaagactcctacgccctgcccaagcagcagcgccacctcacggcactgatcctgcgcaagctgctggcctccagttcgcacgccgttgccgccaccttggtcaccatccgcgagcgcctgcaaggcctgctcgcagcgggcaaaacggaagacgacggcagccaactggtcgaacagctcattgccgaggacgacctggagcaggactacctggaagaggaagccagcgaggcagaagaaaacgtcgaagccccgacgcctgcgccagtcgaagaaggtaagccgggcgcagcaaaagatgcccatgccgtccgcaccgccatcaccaccgagatcgcggagctgactgcattcgtcgatgccgcccaagccctgaaaaccgacaccaaggcacaggcgctactgaaggcgctcggcttgggcttcagcaagatggccgagctgcgcgcgccacgcaaggccatcatcttcacggaatccaagcgcactcaggagtacctgcaccgcttcctctcagccaacgggcacgcgggcaagttggtgctgtttagtggcaccaacacccacgaggaatccaccgccatctaccagcgctggctggaagaatatagaggcacagatcgcgtcaccggctcgccgcaggtagatcgccgcaccgcgctgatcgaccacttccgcaaggacgacggcaccggcgcggaaatcatgatcgccactgaagcggctgccgaaggcgtcaacctgcagttctgcgcgctcatcatcaactacgacctgccgtggaacccgcagcgcgtcgagcaacggattggccgctgccaccgctacggtcagcgtttcgatgtggtggtcatcaacttcctcaacacccgcaaccaggccgaccagcgcgtgctggaactgctcaccgagaagttcaacctgttctctggcgtgtttggcgccagcgacgaagtgctgggccgcatcgaaggtggcctcgattttgaaaaacgcatcctccagatctacgacacctgtcgtcaacccgagcaaatcgaagccgccttcaatgccctgcaaacggagctggaagaggcaatagccgaccggatcaaagacacccagtcccagctgctggaaaattttgacgaggatgtccacgaccggctcaagctgcgtcttcaggacgccgaggcacgtctcgacaagctggggcgctggttctggggtgtcactcggtatgcgctcaatgaccgcgcacgcttcgacgagcagtcctacgcgttctcattgagcacaccgccaaccggtatagccacaggccgctaccagctcattcgtgcccatacacaaaaccaagcgcagccggacatgctggcgcacgcttatcgcctcagccacccgctgggggagtggagcattgaagccagcctgaatgcggccacgcctgtcgccacattgaagctcgactacgacaaacacggcgcgcgcgtctccgtgatcgagagactgcgaggtatgtccggctggctgacgctggcccggctggaagtcaccgccttcgagaccaccgaggcgctgctgttctccggcctcaccgacgatggtcaggtgctggatcaggaaacctgcgaaaggctgatggccattccagcagcaggcaaacccactcccttgagcaccaccgtgcccgaggctcttctggcaaacagccagcgcgcggtcgccgccaccattgcccaggtactggaagccaaccagcgcctcttcaatgaagaacgggacaaactggaacgttgggcagacgacaagctgctggccgcagaggaagccttgaagaacaccaaggcgcgcatcgcacagttgaagcgtgacgcccgcaaggctgtcaccttgcaggagcaggacggcgtccagcgcgagctatctgagctggagcgcaagcaacgccgcctgcggcaagaaatcttcgctgtcgaggacgagatcatcgccaagcgcgatgagctaattgcctcgctccagcagcgcctgcaagaaaaaacaagcaaagagaccctgttcagcatccgctggcaggtcacgtaa

SEQ ID NO: 530736 - DNA, 660 bp, Stenotrophomonas maltophilia
atgcgcgctgccgctcccacgtttcgcgatgcgaatcgcgggccccccttaccggcctccacaccccggcgcctatggtgcagcccccggactccgggggcgggtagtgccggccgctggccgggtacgcgtcatcgcatgcgcgctgccgctcccacgtttcgcgatgcgaatcgcgggccccccttaccggcctccacaccccggcgcctatggtgcagcccccggactccgggggcgggtagtgccggccgctggccgggtacgcgtcatcgcatgcgcgctgccgctcccacgtttcgcgatgcgaatcgcgggccccccttaccggcctccacaccccggcgcctatggtgcagcccccggactccgggggcgggtagtgccggccgctggccgggtacgcgtcatcgcatgcgcgctgccgctcccacgtttcgcgatgcgaatcgcgggccccccttaccggcctccacaccccggcgcctatggtgcagcccccggactccgggggcgggtagtgccggccgctggccgggtacgcgtcatcgcatgcgcgctgccgctcccacgtttcgcgatgcgaatcgtgggcccccccttaccggcttccacacccccgcgcctatggcgcagcccccgaactccgggggcgggtag

SEQ ID NO: 530737 - DNA, 510 bp, Stenotrophomonas maltophilia
atgcacgccattctcaagaaggccgcgctcgctgcagcgctggccacggcttcgctgtccgcgcacgccgtggaaaccaagatctccgtctatgccgacgtcgacccgaccctggccctgctgcgtgatgacggcagtgccttgccggatctggtgaccctgacccatgacccgatgcgtggcctgctgccgaacacccagcgcgttcgcatccacaccaacgatcaggacgccgatatcgaagccaagatcggtggcgcattcgtgctcgccaatggtgacggcaaggtcaccgtgccgatgacggtcagcctcaacggtcgcgatctgggcctcaccccgattgaatacgctgcagccgatctgttcaccggtgccggctccaccccaggtgcgtcgatctcgatgccgctggtcatctcacagaccaccccggccccgatcgccaccaagggcgcgtataccggcgtcgtcaacatcgtgctgaaccagaaggccaccacgccgtaa

SEQ ID NO: 530738 - DNA, 408 bp, Stenotrophomonas maltophilia
atgtggcgctcgttggcccaggttctgattctgtcgctggcgttgcaggttttcgtcgtgctggcgccattcctgctgcaatgggtggtggatcaggcacttgtctcggcggatcgtgacatgctcaccgtcctcgggattggatttggcatcgccctgcttgtgcaggttgcaatcaacctgctgcgtggctggtctgtggtctatctttccacgcatttcggattgcagtggacgaacaatattttcgcccacctgatgcgtctgccgttggcattcttcgagaaacgtcaccttggtgacatcacctcacgccttggctccatccgtgagatcaggacggtcatcaccaccagtttcgtggagggcatcattgacggcctcatggcgatcatgacctcgcgctga

SEQ ID NO: 530739 - DNA, 432 bp, Stenotrophomonas maltophilia
atgaaggtcatcctgcagtctgaaagcgccgaatgcgggttggccgcattggcgatggtggctgaccaccatggccagcacggtgggctggccgtgctgcgccagcggtttaatctttcgctgaaagggctgcgtctggatcggctggttcagatctcccagcagattggcttttcggcgcgcgcgattcgagtcgaactcgaagaactggggaagctgacgactccgtgcatactgcactgggacatgaaccatttcgtggttctgaaaacggtgcgtgcatcagggatcgtcatttgtgatcccgccgtcggtgagcggaaactcagctaccgcgaggcatcggagcactttaccggagttgtgctggagctgacaccgacggccgagctcaagcccgtgaagcgcgcaccggcgatcagcctgcagtaa

SEQ ID NO: 530740 - DNA, 1971 bp, Stenotrophomonas maltophilia
atggaggatagtagtaaggtctctgaggcttttgatcagtatactctatctggttatgcctgcacccttcgcaagattaggtctgcgcacgatgttgaggcggctctctttaaagggtttttttcggttgattctagtcgagagcgccttaggtcagattataataaattcaccaagtcgataacttccccatattcaagtttggcgaagtataagtacattaatgcgccctattttattaatggtaaagagggtgatgtgccggttgccaccgaaataataagtaggctggagagtgataggccagctctttttcttattgaggctgcagcagggtttgggaaaacttgtaccgcctatgaggtggtaaacgagatcctggagaagtcaaataggcttccacttttctcggagttgtccagaaatagatctgcaaagatatttagatacgtccttctagatgaaattgatcgaactttcccgcagttgaagtcccgcctggttgagagtgaaatctcgaaggggcgagttgtggtcgtgttggacggctttgatgaactgctcaggaagagtgatagcggtcaagagtttgagcgtgcggagcctatgctggaaactattggcgagctcctgaaatctaaagcgaagatcatcctaactactcggagaactgttctttttgagggagatgattttcatcgatggatggatgcgaatgcggatagtttcgatgtatttagattcagcttgaatgagccaagaattactgactggcttccccaagagcgccggagcgaaattgaaaaatctgggatcagtcttgagggaattgccaatccggtccttctttcctatctgcgttgcatcgaggatcagaagttcactgcagcgattgaaagcaaagatgagttggttgaatcctatttttcgcatatgcttgatcgcgagcgttcgcgccaggatctccgcctcgacattcaaggccagtacagcgttttgacgggtatagcgcgcgacatgattgaacttggatatacttcggaggatagagagtatatcgttgagtttattaagtcatcatacataaaggttctcgatgaggttcgctcgggttattcttcctccgaaaagccgtctcgagacgaggttgcaaataagcttgctagccatgcgcttcttgataggagtgctagtgatgattccaagattggatttataaatgaatttgtctttggtaactttgttgctgaaaatataatatctgacccagcttggatgaacgatgatttgcgattcctagagcctgccgtactttcgcacgcttcaaggagcccagcacggagggccgctcttaaaggctcgctttctagtgtgatggagttcttggattggacaagtaggatcgatttttcctgcaggctggacggtggtattgactatcctctttcaggaggggaggcggattcgctctctttggaaggcgtgacgattggtcaaaacttcgtctctcagttccagttcaatgactgtacttttaagaaatgcagttttgatttgtcacatctgtccgcagtgacattcttgaactgcaaattctatgagtgtggggttcgaggaattgcatcgggacaagttcatatcttaggttgctttgctgagcctgagtttatcgctgctcttgggaggcctatgttgccggctgaccgggcaacagatgagcggtcttcagagttggataaattcatcctagagaaattctggcccgtcggatcgctaaatttccatcggagaaggccgatcaaggggatttgtagtagaagcaatgatttttctccggaggagctatatgaaggcattcgcagtctgaagcaacgtggcttgatctttgagccaagcaaaccaagctttgtcgaaatatcgattgatcacctaggagagattagagatattctcgggagagtgggtgtatga

SEQ ID NO: 530741 - DNA, 894 bp, Stenotrophomonas maltophilia
atgaacggcgccttggatgttgtggctgaacgcattcggcgacaggtcgagggtgacgttctttcaattggactcttggcgcgagttttcgccagaggtaaatctaagtcatccctaaggcggaagcttgatcgcgagccaggcaagtacagtgttggaggaaagctcatccaagatggtgtaggggtccgagttgcgctttacttccctgacgatgtttcaattgtggaagatctattgaaacggaagtacgaatatttgccagattcgtcatcgattgataatatcgatgaatcaacttttaatgttgtcaggcgcaatcttgttttcagaatgaagcaagaggattgtgtggagcttgaccgtggtggttttgcggatgttcccctcgatacaacttttgaggtccaattgagatcaatgctctctgagggttggcacgaggtggagcatgatctgcgatataaatgcaaggcccattggcatggtcattcggatctgaatcgagctcttaatggcgtttttgcaacgctggagacgagcgagtggagtatgttgaagatatttgatgatttggcgcttcggcactatagatctggtcaatgggccgcgatggcgcatgctcgattcagaattagagctgacgctgagatgcttacgccgatggcgcaatatttcgatgggggaaatggagctagcaaggcgcttttccgagctgatcggagacttttgtttaataagctaagttcttatcggatagccatgccagttacgatctccaattttgtgtttctttggaatcatgttgtatataaatgcccggagttggcaagcttggcgccgtctccaatacaagacgcgctttcggagatagacgacgaggtggcggcttga

SEQ ID NO: 530742 - DNA, 966 bp, Stenotrophomonas maltophilia
atgatcgccattgccattgcctggttcctgctcggcctgctgctgctggcgttgggcggggactccatcgtcaaggccgtgtccggcctggcccagcgtttcggcgccagcccattcactgccgggctgttgctgctcggggtgaccacctcgttgccggaactggcagtcaacgcgcgcgccctggcggtgggccaaccggagctggcactgggcaacgcggtgggcagcagcatcgtcaacctgggcgtgaccctggccgtggcggccatggctgcgcccctgctgctgcgcgcgcgcctgcagacggtgctgtggtggtcgctgctggcggcgggtgtgctgctgatcctgttcgggcttgatggcggcctggcacgctgggagggcggcatactgctggccggtttcatcgtggtgcaggtgctgctgctgcgccgtggccgtagcgagagcgccgaggtgcaggtggccatcgccgagtccgcactgagccgcaccagcctgccgttgaatgtactgcgggtgctgatcgccgcgctggccctgtactggggcgcacgcctggtggtgggggccgcagcggacttcggtactgcactgggttggacaccgctactggtcggtctgctgccggtcgcgatcggtaccgcgctgccggaggtggcaaccgcgattgctgccgcacgccgtggtcatggcgacatggtgctgggccacgtgctgggttccagcgtggtcaacctgttgctggtgattggtgcgatggccgtactgcagccgctggcgctgccggcctcgttcgtgcgcctggaactgccggcgctgctggccttcgcactggtgctgtaccccatgctgcgcggcgacctgaagatcagccgcggcgaaggcgcgatcctgctggtcgcgttcgcgggctggttcgtgctggagctgctgttggtgggtgcaccggcgttgtag

SEQ ID NO: 530743 - DNA, 357 bp, Stenotrophomonas maltophilia
atgtcaccgaatgcagctgcatccatcaccatccactttgctggccagacacctgcgcaagcaccgttcgagaatctcgacttggcgtttctttcggcaggctggcaggccagcggtgagccactgaccgtcgaggatggcatgcatctgattgacgttgcccgggtgcttacccgcgtttacgacgacctctgcaaaccgcatgaatatcccggcgtgttcgtctacgagatcgccgaggagcttgggaaacacctcggcgtcaatcaggagtacgacctcgcttctacagaacgcatcgcccgggagtgggtgatcgcacagatgaacgacacgcgcgagcgccgcgtactgtaa

SEQ ID NO: 530744 - DNA, 498 bp, Stenotrophomonas maltophilia
atgacccggcggcgaattacggaaagccgaagccaaggcaaaagcaaaaggccggctctagaagcccgcacagcagatcacgtgaagcacgtcgagccaaaacccatcctgttcgtggcgagtgctgtttgcgaggccgtgacatgtgattacaggcaatgcaaggcgagtgcggcgcaaccgtttgcggcactggcggagcagttgagccagttccccggccacgttgtgacacatcctatcgattgttcggacggcagcattgctttcctgaccttcattggcgcccgtgatgatgaccctgtctgtgccgaagaagagctcactctgcttttccaatacgacgcgaaagcgctgactgtgcaccgctacgagcaaggccgaatcgagctgacgccggagatgttgacagccgacccacgccacatggatcacgtggacgcccgctatctctaccctcagatcattgagcggcttcatggatacgtgccgtggtga

SEQ ID NO: 530745 - DNA, 753 bp, Stenotrophomonas maltophilia
atgcgccggcgaggccggtggaagggcggcgcccctgcaaccggcagagctggcgctaaattcaagcgctggcgaagaactcggctcgcgaggttcagccaagcgggcaacggtcatgaaccggaacggctccatttgggaagcgaacgccaccggcggatgtggccgcgactgaagacggcgcagcgcccgcccggccaggcctcgcctggctgctcgcgtattccggcactgccggtgccggctcgcctgcattcgccgtcgccagttgcaggcggcgctggtgcgaatacggccaggcgcggcctggccgctgctgcagaattccggcaccgccggtgccggctcgacttcggtcgccgccgccagctgcaggcggcgctaacgcccggccaggcgcggcctggtcgctgctcgcagatcccggcactgccggtgccggctcggcttcattcgccgtcgccagctgcaggcggcgctggtgcaaactcggccgggcgaatgcaggccaccgagggcggagttctggcgcggtcagttgcagcaagcagccgcgggaaccgcactaccacaggacggcatcaccgccgggagcggcgccgaggaagcgccggcagctcaccaggtctgactctgatccacgcttcgatccagcggatagcctgggcacggcttccggcagtgcactcgaactcccggccctgccaacgaaggacgtgcctccattttccgtcctggcgaggctgcacgtag

SEQ ID NO: 530746 - DNA, 447 bp, Stenotrophomonas maltophilia
atgcaagaagccatcgcattgccgccgtctgtccatgcaacaagtgctgcggtaatcgcggcattccatctgtggcatgagcgctgtggaacgattcacgccctggtccgggaactgtcatcggtgcccggacacgctgccagcttcgacctggactacgccgagggcgattgcgcaggtctgagcatcttcgaggttgatattcatcggggaagcgaacagcactgcattggcgtgctctacggggaaagcgttatgtcgatgttcctctatggcccacgcacgttcacgctgagtgctgggcgcgacgagtcggcggactacgactcagaccagatgctgacttccaatccacgcaggatggacgatctcgatgcagtcggtatgttccaccaggtgccgaagtgccgtccccgccagttggccactctggatttggcgttctga

SEQ ID NO: 530747 - DNA, 156 bp, Stenotrophomonas maltophilia
atgcggctcgccggccgccatcggcaggccgcgcgcccatgtccatcgccatatagagctgccggcatcgccggcaccgattcgtgcaagcacaacgccgagggtgccgctgccatgcgcgggcagggcatgcgccacctgcgcgagcgcaggtga

SEQ ID NO: 530748 - DNA, 2067 bp, Stenotrophomonas maltophilia
atgaatgctgcatccctcgaaaccctcatcctgcctctgtcggccctctatcactcgcgccataacgcgcggaagaaggaggactacagcatcgagagtgtccgctcactggccgaatgcatcacgcaggtcggacagctgcagaatctgggcgtgtatgaagagccgggagctgatccgggtgtggagggccggccgtttggtgtggtgctgggcgggcggcgtctggcggcatacaacatgctgctggaggagggccggatcgagccgaaccatccgatccactgtctgaaattggtaggcgatctgaaaatggcctcgctggtggagaacacgcagcgcgagaacatgcgaccggctgacgagtacgagacaatccgtgaaatgtctgaggttcacggttatagcgtagaccgaatttcggacctgctcggcgtcagcgcgttggtagtggaacgccggttggagttgtccaaggcgcacccggaacttatccaggacttccgcgacgacaagatcaccacgaaccagctgatcgcgctgtgcgcgacgacggaccgcgctcggcagctggaagtctggcgggctgcaacctacccatggatgcgcgacccgaaggagttgcgaaagaaggtgcttgcccagcgtatcgactgcagcacggacccgcgcatcaagctgattggtggcgtggctgccttccgcgctgcaggtgcggtgattcatggcgacctcttctcggattccgaagatgctggcatcagtgaggacgtgggcctgctggaaaggctggtcatggccgtcgcagaggcaaaggttgccgagttgcagtcagagggctggagctgggtcgaattcctgccagaggggacgaccgcgagctactaccggcttggtaatgcggtcccctccagcgctctctcggacgaggagttcgcatcggcccatcccgtcctggcagctgacattgcacgggtcgaggcacgcattgctgagatcgaggcatccgaagacgacgaagccttcagtaaggagtacggccagcttgaagacgagctttccgacctcagcgagcgccgcgatgttgcctgtgccgtctacagcgacgaacagaaatcccacgcgggtgcggtggtctggatcgacgaagacgaaatcatgatcgagcggggaaaggtgcgcaccgaggatcgtagggacgcttccgctgcgaccggcactggtgtggttggggggcgcgagaaggcctccgcaggccgcaaagaggcggcaatgtcggatgctattacccgttcactgctcggccgtcggaatgccgttgtgcagctgcaggtcgcccagaatcctcgcgtggctaaggttctgctggcggtatcgatggcgtctttggtcaccttcgattcgcgtcgtttcggggttcgtgatcgcggtgtctgcgacctgaccttgagcaatttcagcgacggcgcccgtctggagcatccgatcgtcgggtctgatggcgaggccatccgtgatcagctgcgctcgtccatcgcatcgctgcttgagggaatgcccgactcgccgagcgagcggttcacgttcctcgctttgaagtccgacgctgagcttgacgcgatcattgcgcacggcgttggctctgcggtgtcggtgaatgcgctgcacaagggggcgactgccgccctgctggacgcgctcgatttccagatcggagagcacatggaaatcactgcggacaacttcttcaagcacgttcccatcgccatcattctgtcatccctgaaggacgccgggcaggactacgagcgtgcagtcctggaaggcatgaagaaggaccagctggcggctgaggcagagcgccgcatcaaaggcaccggatggttcccggaactgatccgctcccctgcacgacaagcagcgccgcaggagagcgcaggcaccaatcaggcaccgaagacgggtgccaccaccccggcgaagaagctggccgggaagaaggctgccgacaagaagccggtgagcaaggcagcaaaggccccggccaagcgcgccaaagccaagtga

SEQ ID NO: 530749 - DNA, 564 bp, Stenotrophomonas maltophilia
atgaagaccaagcccacccttgccagccgccgctcgggccgtgccctgttgattggcgccggccggcagcgcggcgcgacgatgctggaaatcatggcgtggcttgccatcgccgctctgatcattggcggcgccattgccatgatcgcctccggctggagcagttcgaaggagaccaaggaaggcgagcatgtcaccacgctgatcgccaacaccaagaagctgcagtcggtcagcggctacggagcctcgggtaccaatcttgtcccgtccctcattgcgaccaatggcgttccaggggacatgaccgtttcgggcaacacgctggtcaaccggtacggcggtaccgtcactgtcgcttcgaccggcctcggctataccgttacgaccccgggtttgcccacgaacgcatgtatcgcagtagctaagagtgttagctccgcaggcggtgtgaccacgaagatcaacagcggttcggcgtcgaccaccccagtcgacactgccactgcgacggcggcgtgcacctcggcgaccaactcgttggcctttaccctggcgaactga

SEQ ID NO: 530750 - DNA, 669 bp, Stenotrophomonas maltophilia
atgaaaattgcggccatcgaggcgggcgacgcctgcgaccgaaccattgatggacataatccaacggaggtgagcctgttcgagaatcagttcttcagcatcacgaactgcagaggcacgctccagataatagcgttgggagtagctggaaatcacggcgaggtaaccatcacgccggcgacagcggaacagatttttgaggctgtcagctctccagcgataagcgaggtgagagcacttatccgagatccctggggcatcggaccggaaaggccttgcctctaccggaatgatctgatcgggtggccggatgacgacgatgagtatcagcgtcccgttcagtcaaaagaaccatgccagctttaccttgaggcgaccttcccaggacgcggcagaatctacttcggggaggtccaccaagaggcagcgcagatcgcaagtttcctgtcgatgaggagcgccctgatcgatttgctcgctgcgaggagcagtccgcaggcgaggtcggcagcgaaagaacgggcccgcataatcagcgctgctgccgagcgaagtttcctgcctccaagcggattctgttggacatgcgaccaggacgttacgccctaccttggtggcgagacccacatcaccagctgccctctgtgctggcgatcctgggatgactga

SEQ ID NO: 530751 - DNA, 474 bp, Stenotrophomonas maltophilia
atgcacgcagtttttaccgataatcagttgcgccgacgaagggtaatcattcctgccatctcttgcaccgcaattgcggcgatcggcatagcaggtgcaatcattttgcccgacctggaacagagacgtgacttcgccgcatttgccacggctgcatcattcgtcggctgtgtaatcgcgcttgtctttgtcactttaattgcaagaatcaactacgcattcgcaagcgaccccgatgttcagcgggttgtgaaaatgctggaaaccggggtgccgggcattgaacccattgcaaaggcaatgcaacagggggctcgactggcatacagggacgtagaattcgcgacccgcatggagcttgcatggaagcgaagcagggaagaaaaggctcactccataaagaacaatgccctaatcagcaagggaaattccgcagcgagtcgttacttaaatcagcgagacgaaggcaattga

SEQ ID NO: 530752 - DNA, 219 bp, Stenotrophomonas maltophilia
atgaccagggaattccgcaaagacggcactgtcatctcatcggggcgccaggcatcacccatcttcaaaacggtcggcgagttgaaggcgctactgcaggacttgccggacgaagctgctattgaaatcgacaagcttccgactggcatgaagagtcgtggattggtgctcattccagagctggctgccgaggtggtcacaatctgtgaatcgacctga

SEQ ID NO: 530753 - DNA, 288 bp, Stenotrophomonas maltophilia
gtgaacaccaaagactcctctaacgtccattacctgaagaatgccaagaggaccgaagaagcgtcttcccagcctcaacctgcatcgaagatacgcagtaatctgaatattggcgccccgttgaccggtgtcgtttgggcggtgattttctatttcgctggtccgtggtctgcatcactgctggacttcacgccgggccccgcatggctctacgctgtgttcggatttgggattggcacttacattggcgtcgatttgttcggccatttccaggagccaatcgagtag

SEQ ID NO: 530754 - DNA, 321 bp, Stenotrophomonas maltophilia
atgaacaccagcgccgccgtatctgaagaacccatcagcattgctgctgccgcgacgttctacctcggcgccgttgccgcactggccttgctcgtcacgcttagctttggcgcttcctgggtgccgatctggttcttgccactcatgtacctggtcgccggttgcgcgctcaatcgagtcgtcctccgccggctggtggagttccacccgctctacaatacgttgggcgtcgtggccaagaccaagctcgtgtatgtccttttctggccatttgcctacgcatatctgctcgtgatgctgctcatcgatcgcgtcctgtaa

SEQ ID NO: 530755 - DNA, 204 bp, Stenotrophomonas maltophilia
atgaccaaccaagctcccaagagtggtaacaaggcagttcaatcacagtccacggctatcccttttatcctgacatcgggaaggccgacgcagggcccgctacctctgatcgatctaggacacaaggtgtttcctgacttgaagggcaaccccgttataaatgaagcgttggatcagctttcatcaagcatcggcagtcgttag

SEQ ID NO: 530756 - DNA, 1107 bp, Stenotrophomonas maltophilia
atggagcggagctcccccaacaccctctacaccattcaagcactgcgcgctttagctgccgcttgggtggtcatctaccatcagatcaacgcggaacgtgtgtacggcgcaggtgtgtcggtgctgggcggcctggctcacttcggctttgctggcgttgacctgttcttcgtcatttccggcttcatcatggccacggtgacgagcgggcgttttgggaaaccgtctgctgcagtcgacttcctcggcaaacgcgtcattcggatctacccgctctactggatctgcactgccgccatcattgcagttctggctgtccggccgtccgtgctggacccgggattggctgagaaaagcgtgttggattctctgcttgtcctgcccgtacagggggggccactgcttgtggtcggctggaccctaacctacgagatctatttctatgttctgacggccatcgcccttgcagtggcatcgcagcggacggtgccttggttgctcggcgcctgggctgttggtcttgcactcgcgcaactgcttcctgcgcaatcaccctgggcgatcctggtgacaagtcctttggcccttgagttcatcgcaggagcagtagctggtctttattggcgccgactttctgtggtgacagcatgggctatgctgggcgtgggtattgtttggcttctctgcgcctttgccgtgctaacggatttgccaagccatggtgagtctccggggactagaacgctggctttcggccccgcagcggcattcattgcagctggtttggctcggcttgagttggctggcaaagttcaagccccgagaactgcggttgttctgggcgatgcttcctactcgttgtatctgacgcatctcttcgtactgtctgcatgcggtaggctgggggctgcgcttggacttcctggctcgattgcgggcaactgggtattcttcctagtgagtttccttaccgcatgtggtgtggcgttgatcgttcatcgtttgatcgaacgaccactgctcaggcttggaaaatgggcatggcggagcctgcaagaagcgaccgttggtaccaaacacaaacagtcgttgaactccagcaactga

SEQ ID NO: 530757 - DNA, 828 bp, Stenotrophomonas maltophilia
atgaccggaaaggattccaccatgcgcctgtcagcacccgccttggccctgctggctgctgtggtcaccgtacctgcaattgccgctgacaccccgaagctgcgcgcggaccagtgcggtatccacaccgactatgacgtgctggtggacagtggcggcatctggctgcggcatggcccgcaggcgccgcacgaggtggtgttccacgatggcgtgctgagcctggacgacacgatcgtgccggtcagcgaggccgacgccgcccgcctgcggcagatggaggccggggcgcggcagctgatgccggcggccaccgcgctggcccatgaagtgagcgggttgagcttcgacgtgctcgacggggtctatgagagcctcaccggcaccgccaacagccgcaaggtccggcgcctgcgccggcaggccgatgactggatcggcggcacgctgggcaagggctactgggaacaggcggtgttcgggccgggcttcgaggccaaggtgcaggacatggccgagtcgctgtccgcgtccatcgcccgcagcgtgctgtggcaggtgttcaccggccgcagcgatgcgatggaagaacgcgccgaccgcctggacgcgcagatggaacagcagctggaaggccgcgccgagcgcatcgaagcccgcgcgcaggcgctgtgcccgctggtgcagtcgctggccgacacccacgacgcgctggaagtgcgctaccaagggcagccgctgcggctgatccagcgcagtgagggcgtgcaggtggcggccagcgtgcgcgagcagccgcaggatgatgtggtggtgccaagcagatag

SEQ ID NO: 530758 - DNA, 261 bp, Stenotrophomonas maltophilia
atgagccaggaaatcgacaagcacgttgcgcgagccctcgttgacctcgccatatttctcgagttttcggcggatgatgtagtggatcccgatgctgcaatccagcggctcgaacaactggcttcgacactgcagatgatggacttggagtcccgatcatcgttgtgctcgcagttcagaagcatcgcagtggactattcagatgagcaggcaggctttgtggaaagcctgggcgaagcgctggggctgatcgagaagtaa

SEQ ID NO: 530759 - DNA, 963 bp, Stenotrophomonas maltophilia
atgtctgattctctcgatattggcgtggacgtggactccaaggagttcgtaccggcagtggccgaccgcaaggccggcgacaggatcgccaacacccgggccggcatagcccagtggctcaacaccttgccccagcgatgccggattggcatggaggcgacggggcggtactacgagttgttggctcggatggctggccaggcaggccacgttgtctatgtgatcaatccacgtctgatcaagcactacggccgggcgacgggctcgcgtggcaagacggacgccatggacgccgaagcgatcgcccgatacgtgaagaaggagaacgatcgcctgcgtgaatacgtaccgcgtaccgatgagcagcagcagatgcacgatttgctgcgcaagcggcagacgctggtaaagacacgcgcgcgcctggagcaatccttcggggtaagcaaaagtgcccccggggagctgtcagatctgttctgcgctctggctgggacgctgtccgagctggaaagcgaactgcagcgcttgggtcgcgatggagagcatggcacgctctacaagcgcctgttgaccatccctggtatcggccccgctgtcgccgctcacctgatctactacatgacgcgctggccgttggccaacgccaacgcgtggatcgcctgcacgggcctggatccccggcccaacgagtctggcggaagaacgggacggcgtcggctgtccaaacagggcgcgccagtgctgcgccagatgctctacatggccgccatggggctcaagcggtgtcgtcgggggcaaccgctctacgacgagctgtcaaaacgcggtcaccccagcaccgccgtcttcaacatcctggccagaaagctggccaggatcgcctggggtgtcttcaaaagcggccgggacttcgatccggccatgctgaaggtgggtcaagcctgcttccagcaggcttga

SEQ ID NO: 530760 - DNA, 1038 bp, Stenotrophomonas maltophilia
atgagacattgtggacaattggctagctttttgctagccgcccctagctggcaagctggagtgccgccgccatgggcacctgagccccgtcactgtggtgctcaaagcacaagtcggctagcatccgggacacaccacaggacacaaatccggtttgtggacgcctccggagctaggcgggacggtcaaggtactgtttccccctctctccgccagataactgaaaaaggctgcccccaggggcggcctttttcagttatctggcgcgggacgcgaagtgcgctgcgcgcgcttcgccccaaacgttgctgcgcaacctttgggcccctccctttgccggcctctccccgcccctgtcggggcagcccctcaacagaggggcttgttcctccagatgcgcgacatgcacggacagatcaccgcaggcgggtcccgaggcgcaacgcgcatcgggatcgggtgcatggatgcacacgacaatccccccctctccgccagataactggaaaaggctgccccaaggggcggcctttttcagttatctggcgcgggacgcgaagtgcgctgcgcgcgcttcgccccaaacgttgctgcgcaacctttgggcccctccctttgccggcctctccccgcccctgtcggggcagcccctcaacagaggggcttgttcctccagatgcgcgacatgcacggacagatcaccgcaggcgggtcccgaggcgcaacgcgcatcgggatcgggtgcatggatgcacacgacaatccccccctctccgccagataactggaaaaggctgccccaaggggcggcctttttcagttatctggcgcgggacgcgaagtgcgctgcgcgcgcttcgccccaaacgttgctgcgcaacctttgggcccctccctttgccggcctctccccgcccctgtcggggcagcccctcaacagaggggcgtgttcctccagatccatcagtagatccacgccacgcgtggatgcttttgatcgccttacgcacgctcgttggcactccaaaacaaagctga

SEQ ID NO: 530761 - DNA, 678 bp, Stenotrophomonas maltophilia
atggacgccgaagcgatcgcccggtacgtgaagaaggagaacgatcgcctgcgtgaatacgtaccgcgtaccgatgagcagcagcagatgcacgatttgctgcgcaagcggcagacgctggtaaagacacgcgcgcgcctggagcaatccttcggggtaagcaaaagtgcccccggggagctgtcagatctgttctgcgctctggctgggacgctgtccgagctggaaagcgaactgcagcgcttgggtcgcgatggagagcatggcacgctctacaagcgcctgttgaccatccctggtatcggccccgccgtcgccgctcacctgatttactacatgacgcgctggccgttggccaacgccaacgcgtggatcgcctgcaccggcctggatccccggcctaacgagtctggcggcagaacgggacggcgtcggctgtccaaacagggcgcgccagtgctgcgccagatgctctacatggccgccatggggctcaagcggtgtcgtcgggggcaaccgctctacgacgagctgtcaaaacgcggtcaccccagcaccgccgtcttcaacatcctggccagaaagctggccaggatcgcctggggtgtcttcaaaagcggccgggacttcgatccggccatgctgaaggtgggtcaagcctgcttccagcaggcttga

SEQ ID NO: 530762 - DNA, 288 bp, Stenotrophomonas maltophilia
gtggccaccgcggacgtggagtacgcccaggcggcggggaactacgtgaacctgcgggtacgcggccacgactacccgctgcggatcaccatggcggtactggaacagcggctggacccgggcgagttcctgcgtccgcaccgcagctggctgatccatcggggccagctgcgctcgatcgagccgctggacggcggcgaggccctgctgcacatggccgacggggcgaaggtgccctgcagccggcgccagctaccgctgctgcggcaggcgctgggggcagggtga

SEQ ID NO: 530763 - DNA, 636 bp, Stenotrophomonas maltophilia
atgggcgaggttgacggcgcgcgacgcgcggcgaccgaaccaccagccggccagcagctgcaacggcagcgatgccagcagcgaaatgacgaaccagagtgggaaatccgcgccggcgctccacatcgcgtaaccgcatccgagtgcgatcaacgaccagatcgagaacccatgcgaacgcggccagcacggtgcgtagtaggtggcgaaggaaatgccggcgacgccgccgagcacgctgaaggccaggtcccaccccagctgcacgctgttgttgtccggcgacatgcccaccagcgggggcagccagctggcgacgctgctgaccagcgcaagcgacagcacgccgccgatcagggcgacgagggacaggaacagggtcttgagcaggtcgggcatgcgcgcattgtacggctgccacagagtgcccgggttgccggccagcggccggcactaccgaaccgactggggtttgctggccaacggccggcaccaccgggggataggcatggccgccgcgtccgtgggagagggggacggagcgacggcggccatgcacaggcggtcaggcggcgaagtcgagcaccacgcggccttcgatcgtgcccgcatgcatgcgcgcgaacacgtcgttga

SEQ ID NO: 530764 - DNA, 678 bp, Stenotrophomonas maltophilia
atggacgccgaagcgatcgcccggtacgtgaagaaggagaacgatcgcctgcgtgaatacgtaccgcgtaccgatgagcagcagcagatgcacgatttgctgcgcaagcggcagacgctggtaaagacacgcgcgcgcctggagcaatccttcggggtaagcaaaagtgcccccggggagctgtcagatctgttctgcgctctggctgggacgctgtccgagctggaaagcgaactgcagcgcttgggtcgcgatggagagcatggcacgctctacaagcgcctgttgaccatccctggtatcggccccgccgtcgccgctcacctgatttactacatgacgcgctggccgttggccaacgccaacgcgtggatcgcctgcacgggcctggatccccggcccaacgagtctggcggcagaacgggacggcgtcggctgtccaaacagggcgcgccagtgctgcgccagatgctctacatggccgccatggggctcaagcggtgtcgtcgggggcaaccgctctacgacgagctgtcaaaacgcggtcaccccagcaccgccgtcttcaacatcctggccagaaagctggccaggatcgcctggggtgtcttcaaaagcggccgggacttcgatccggccatgctgaaggtgggtcaagcctgcttccagcaggcttga

SEQ ID NO: 530765 - DNA, 345 bp, Stenotrophomonas maltophilia
atgagccgagagacctcacgagacccgctgcgcgaaaaccacccgcccattcccggcgagcagcgcggcaagcgcgatgccgacaatgccgactaccgcggcaccggtgcaccgttcttcgatgccgagcatgccggagagcatctgccggtgaagcacgagtctgaacaggccgcgctggaccgcaaggacggcggcgaccgccatcgtggcggccaggaaagcccgctcaagcggcgtgagcgcaagcagcgcgccagcgacaaccaggatgaggcgctggaggagaccttcccggccagcgacccgacctcgccgttcgtaccggccaaggcccccgactga

SEQ ID NO: 530766 - DNA, 399 bp, Stenotrophomonas maltophilia
atgccccgtcttgaacgacccgcaccgtccgtgttcaacgccctgctcgatccgctcggccagcgcaccgcgcagcgccgcacgcaccgccaggaagatccgcaggcggtggcgcaggactacctgcagtacatgctcagtgactacgaagagcgccgaggccagagccaccgcaactggcgcgatctgtgcccggtgtatgccttcgcgctgaccacccatgccgcggattggccacgctgtgacgccgccgatacctgcgaggaactggccgagcactgggagcagatgcgcgggcagtcgcggttgagctggtcgcaggcgaggccgttggtggaggacgcctggcgcgcactggaccatattccggcggcggcggtgaggccgttgctgcagtag

SEQ ID NO: 530767 - DNA, 906 bp, Stenotrophomonas maltophilia
atggcccgcccgatctggaccggcacgttgtcgtttggcctgctcaacgtgccggtgtcactgatgtccggcgaacgcaaggtcgatctgcagttccgcatgctcgactcccgcgatcgcaagccgatccgtttcgaacgggtcaacgccgacaccggtgaggaagtgccctggaaggacatcgtcaaagcctatgagtacgacaagggcagttatgtcgtgctggaggaaggtgatatccgttcggcggcgccggaaagccacgaagcggtggaggtggaatcgttcgtggatgcggcgcagatcgacccacgctactacgagaaaccgtatctgctggtgcccggcaagaaggccgaaaagggctatgtgctgctgcgcgaaacgctgcgcagtaccggcaaggtgggcatcgcgcgggtggtggtgcgcacgcgcgaatacctgtgcgcggtgatgccgcatgaggacgcgctggtgttgatgatcctgcgctatccgcaggagctggtggatcccgaggactacaagctgcccaccggaaaactgtccgactatcgcatcaccagcaaggaaacggcgatggccgaacagctgatcgagtcgatggccggcgactgggatccgtcgcagtaccacgatgaattccgcgagcgcctgcagcaggtgttgaacaagcgcatcaaatccaagggcggcaccgcccgggtggacgatgaaccggcaccgcgcgaggacgccagtaccaatgtggtcgacttcatggcgctgttgcagaagagcctggatgcgaacaagcgaacgccagcgaagaaggccgcaacgcgcaaagcagccgccaagtcgccagtgaagaaggccgccaaaaaggccgtaaagaagaccacgcggcgcaaggcaggttga

SEQ ID NO: 530768 - DNA, 2487 bp, Stenotrophomonas maltophilia
atgtcgctgcaccagtaccggcgcaagcgcagactgggtggtggcgccgggcagacgccggagcctgacgacacgcccgcacgcgggaatccgaagcggcggccgaccttcgtcatccagctgcatcacgcaagctcgcgtcactatgacttccgcctggaaatggacggcgtactgaagagctgggccgtgcccaaggggccttcgctgcgcgtcggtgagaagcggctggccgtggaggtggaagatcacccgttgtcctacgccggtttcgaaggagacattcctgaaggccactatggcgctggccacgtggatgtcttcgatcatggcacctgggcctgtgaaggtgatccactgcaggcgctggcggctggaaagatcgacttcgtgctgcacgggcaacgcctggccggtggctggaagctggtgcgtacggcaatgaaagggcgtcaggtgcagtggctgctgatgaagcgcgacgacggcgaagcgcgcgacgcggaggcggatgacctgctgacggcacccacgccgaaacgagcatctgcggcgaagaagcgttccacagcgaaggcggcgcgtgttgcacccgtcgcacgcacgaccacgcgcaaggccgatgcgcgttggcatgcacgcgcgctgcaactgcacggcgcacgtgatacgccctgtccccttgggttcaaaccgcagttgaccgatcatcgcgacagtgcccccgacggcgagcgctggctgcatgagatcaagtgggacggctatcgtctgctggccgatctgcacaatggcgaggtgaaactccgctcgcgcaacggcctggactggacggccgattttcccgaggtcgcgcaggccgtgttggcgctgccggtgcgcgatgcgcgcctggatggcgagctggtggttctggacaaggaaggacgcagcgatttcgcagcactgcagcgcgtgatcgatggaagctcgaagcaaccgttgcgttacatcgtgttcgatcttccgggtgtggccggcgtggacatcagtcgtgcgccgttgctggaacgcaaggcgctgctgaaggatctcatcgggccggcgcccggcacactggccttcagcgaacacgtggtcgaccatgggccgcaggtgttcgatgccagcggcgaggccggcttcgaaggcatcgtcagcaagcaggtggatgcgccgtacgtaaacacccgcgcgcgcagctgggtgaaggtgaagcacgaagacaccgacgagttcgtgatcgtcggctatacggcacccaagggttcccgggtgggattcggctcgctgcttctggccacgccggacaaaggcggcttgcgctatgtgggccgtgttggcaccggtttcgatgacgagagcctgcgcgcgctgctcagggcactgcagcccttggcagtgaagacgcccgtgctgcagctgccggcgcatgtgccgttccgcaccgccagcgtacgctgggtgaaaccggtgacggtggcggaggtggccttccgtggctggggcaaggaaggcttgctgcgccaggccagtttcaagcggctgcgcagcgacaagcagaaggaggacctggcaatgagcaccgcagatgccggaaccggagacgaggtccagatcacccatccggagcgggtggtgtttccaaagcagaaactgagcaagggcgacgtggccgactactaccagcgcatggcgcgctggatcctgcctgaaatcaccgggcgtccgctgtcactgctgcgctgcccggacggcgtcggcaaggcctgcttcttccagaagcaccatggccccggcctgggcgatgcggtacatgcggtgcccctgcagcagaaaagcggccgcgaggactacgtttacatcgacgatgcaagaggactgctgcagctggtgcagatgaacaccctggaactgcatccctggggggcgaccgtggctgaccccgagcatccggatcgactggtgttcgatctcgaccctggtgacggcgtcagctgggcacaggtgaaagccggtgcacgcgatgtgcgtgaccgcctgcagcaggtgggtctggagagcttcgtacgcctgtctggcggcaagggggtgcacgtggtggtgccactgcagcccaaggctggctgggacgaagccaaggcattctgcgaggcgttcgcacaggcgatggcggagcaggcgccggaccgctacgtggcgacgatgagcaaggccaagcgcaatggcgtcatcttcatcgactggctgcgcaacacccgaggcgccaccagcgtgtgctcgtggtcgctgcgtgcacgcgattctggcggcgtggcggtgccgctgcgctgggaagaactggcgcgggtgagcgcggccgacgcgtttccgatggccaaggcgctggcgcgtgccaagcggctgaagggtgacccatggcagggcatcgcgcgattgaagcagacgctgccgtcgctgaagcggtag

SEQ ID NO: 530769 - DNA, 636 bp, Stenotrophomonas maltophilia; identical to SEQ ID NO: 530763

SEQ ID NO: 530770 - DNA, 1029 bp, Stenotrophomonas maltophilia
atgaattcgaccatgaaggccgccgtggtgcgtgagttcggcaagccactggtgatcgaggaagtccaggtaccgcgcccgggggcgggcgaagtactggtcaagatcgaggcctgtggcgtctgccacaccgacctgcacgccgccgagggcgactggccggtgaaaccgaacccgccgttcatccccggtcacgagggcgtggggcacgtcgtggccgtgggaggcggggtagggcacgtcaaggaaggcgacagggtcggcatcccctggttgtactcggcgtgtggccattgcgaacactgcctgggtggctgggaaacgttgtgcgagacgcagcgcaacaccggttactcggtcaacggcggctttgccgagtacgcactggccgatgccaactatgtcggcctgcttccgaaggacgtgggcttcgtcgagatcgcgccggtgctgtgcgccggcgtgaccgtctacaagggcctgaaggtgaccgacaccaagcccggggactgggtcgccatctccggcatcggcggtctgggccacatggcggtgcagtacgcccgcgcgatgggcctgaacgtggctgcggtggatgtggacgacaacaagctggcattggcccggcagctcggcgcgcagatcaccgtcaacgcgcgcaccaccgaccccgccgccttcctgaagaaggaaatcggcggcgcgcacggcgccctggtcaccgcggtttcgccgaaggccttcgagcaggcgctgggcatggtccgccgtggcggcaccgtctcgctcaacggcctgccgccgggcaacttcccgctggacatcttcggcatggtgctcaacggcatcaccgtgcgcggctcgatcgtcggcacccggctggacctgcaggagtcgctgcagttcgccgccgaaggcaaggtcgcggccacggtcagcaccgaccgcctggaaaacatcaacgacgtgttcgcgcgcatgcatgcgggcacgatcgaaggccgcgtggtgctcgacttcgccgcctga

SEQ ID NO: 530771 - DNA, 639 bp, Stenotrophomonas maltophilia
atgtccagcgctgatccgcgcctgcgcgcgctgttgaagctggcaccggtgatcccggtgtacacccccgaagatgtgaatgaagcggtcgaagtggcccaggcgctgttccgcggcggcctgccggtgatcgaagtgacgctgcgcacgccgcaggcgctggatgcgatcagggcgatggtcgaggccgtgcccgatgcggtaatcggtgccggcaccgtgctcaatgccgcgcagatgcaggcagccaagcaggccggtgcgcgtttcgcggtgtcccccggtgccacgccgacgctgtatgccgccgcgcgtgatgccgacctgccgtacctgcccggtgccgccactgcctccgacctgattttgggcctggagcacggccacgacaccttcaagttcttcccggcggtgcaggccggtggcgctgcgctgctggcggcctggcagggcccgttcgccgatgtgcgcttctgcccgaccggcggcatcagcgcgcagaccgcgccgcagttcctgcacctgcccaacgtgctgtgcgtgggcggctcgtggctgaccaccccggcgctgctgcagacccgcgactgggatgcgatcgagcgtctggcccgcgaggcctcggtactggccggctga

SEQ ID NO: 530772 - DNA, 591 bp, Stenotrophomonas maltophilia
atggacctgcagacttctccgtttccggtgttccgtggccgcgacaggttgatcgctgcggtcgacgcggcgatgacctccggtgatgccgagcgcatcaccgccgacctgcagctggcgctgcaggaagccatcgcggacagccgcatcgaattgcccgagtgcgtacaccgtccggtcagtgatcattacgcgcgacgcccgctgtaccacagccgcgaacacggctacagcgtgattgccatgagctggggcccagggcagggcacgccgctgcacgaccacgatgccatgtggtgtgtggagggagtgtggtcaggcgagctggagatcacccgctatgaactgctggagcgcaacggtgagcgctgccgcttccgccgccacgccgtgctgcgcgggggctgcggcagtgccggcagcctgattccgccgcacgagtaccacaccctgcgcaacgccagcaacgaagcgctggcgatctcggtacatgtgtacgaggcgcagatggagcgctctgcggtgttcgatccgctcggtggtgactggtaccaacgccgcatccaggcattgcaggccgacccggcctga

SEQ ID NO: 530773 - DNA, 1056 bp, Stenotrophomonas maltophilia
atgtcagtgcgaattattagcgatgccgcgttgccggcatcgaagggcaaggctgccacgatcaacgacatcgcacgactgtcgggagtttccaagaaaacggtttcaagaatcatcaacaactcgccgctggtgcgcaaagacacccgcgacaaggtcgaggcgttgatgcgcgaggtcggttacgtgcccgaccccctggcgcgcggcctcgcgttccgccgctccttcctgatcggcctggtgtatgacgacccgggcgcccaatgcatcgtcgacctgcagcacggcgcgctggaagcgctgcgcggcaccggctatgaactggtcgtgcatccctgcgacagcctggctccggactgtgcgtacggcgtgcggcgcttcgtgcagcagcagaagctgcatggcgtgatcctgggcccgcgtgcctccgagtcagctgcgttgacggagatgctcgacggcattgaatgccgctacgtccgcatcaacgcgcatgtgtcggatgacgaggcacaggccgtggtcacccatgatcgcgacggtgcagccgcggcagcgggctacctgctctcgctcggccaccgcgatatcgcggtgattgccggtccgggtgaccgccgtaccgcacgcgagcgcacccatggcttcctcgaccggctggcgcaggtgggcctgaccctgccgggtgaacgcgtgctggaagcgggcgatacgttcgagtcgggcgtgcatgccgccgaacggctgctgatgggcggacaacggcccagtgcgatctttgccggcaacgacgaaatggctgccggcgtgtatcaggtggcgttgcgtgcgggcatcgcggtgccgcagcagttgtcgatcgtcagctacgacgacagcccactggcgtcgcggctgtggccgccgctgacctcggtgcgccgccatgtgtccgacatcgggcgcatggcggcggcgatgctggtgcaggccgacgtgccggatgcgccgaccgcaaccagcgtgcacccgcagctgatggtgcgcggttcctgccgggccgtggacgcctga

SEQ ID NO: 530774 - DNA, 894 bp, Stenotrophomonas maltophilia
atggacctcgcccagccccgccgcgtcgaacaccagcagaccgacaagggctacgtgccggtgtataccaccgcgctcgtcgagcagccgtgggacacctacagcgccgacgaccacgccacctggagcacgctgtaccagcgccagcgcgaactgctggtcggccgcgcctgccaggaattcctagatgcacaggacgagatgggcatgaacgcacacatgattccgcgcttcgaccagctcaacgaagtactgggcgcggccaccggctggaccctggtgggcgtggaaggcctgctgccggaactggatttctttgaccacctggcaaaccgtcgtttcccggtgacctggtggatccgtcgcccggaccagatcgattacatcgccgaaccggacctgttccacgatctgttcggccatgtgccgctgctgatgaacccggtgttcgccgactacatggaggcgtacggccgtggcggcgtcaaagcccacgcgatcggcccggatgcactgcagaacctgacccgcctgtactggtacacggtggagttcggcctgatcgatacgcccgacggcctgcgcatctacggcgccggcatcgtgtcgtcgaaaggcgaatcgctgtactcgctggagtcggccgcgcccaaccgcatcggtttcgacctgcagcggatcatgcgcacgaagtaccgcatcgacaccttccagaagacctacttcgtcatcgacagcttcgaacagctgatgcaggcgacctcgccggacttcaccccgatctacgcggcgctgtctgatcaggcgcatctgccggcgggcgatgtgcagcgcgatgaccgcgtgttccagaagggcaccggcgaaggctgggccgacggcggcgacgtgtag

SEQ ID NO: 530775 - DNA, 483 bp, Stenotrophomonas maltophilia
atggccggagaagtccagttcgatcgcacggatatacgtctgctggctgaaatccagcgggatgggcgcgccaccaacgccgagctggcgacgcgggtgaacctctcgccctcggcctgcctgcgtcgcctgcagcggttggaaagcgagggcgtgatcgtcggctatggtgcgcggctggagccacggcagctgcggctgggcctgcaggccttcgtgcgcgtgcagctggaaaagcacgaccaggccgccatcggccacttcgtggacagcgtgcagggctgggatgaagtggtggcctgccatgcactgaccggcgacatggactacctgctgcacgtctacgtgcgcgacctggagcacttctcgcacttcctgctggaccggctgctcaatgccggcggcgtggccgatgccaattccagcttcgtgctgcgcacggtgaagggcttccaggcattgccgctttcgcagctggaataa

SEQ ID NO: 530776 - DNA, 2001 bp, Stenotrophomonas maltophilia
atgtccgaactccagcacccgctgcccaccaccacgttcctgccgctgcagcgcaagtcgctggcgcgctacgttgcccatggcacgccaccgcagaccgcagtggagcaggccgggctgatggccgcgcagctatgccggacgcgcctgcatccggcggccgagatcgagcgcctgctgcacgatgcctgcgcgttgtttgccggcaacgaaggcgcggctgcacagctggccgggcccggtggcggtggccaaccggaactggatgcctggctgagcgcattggccggccacggcgtgctgctggcaccggcggagatcctgcaggacgtcatcgcgcagtcgccacgggagtacccgggtctggccctgcagcaggcctgtcaggaaaccctggtcgaacatgagatccgctttcccgccaccttttccagtgacgatgacgaggccacgcaggatgaggttgtcgccgaggatgcacggtcggtcgaacaccatggcctgtacacctccgagcaggcccgcgtgctgcgcgccatcgccgccaaccccgatgagctgatcgacctcgatggctatgccggcaccggcaagggccacctggtgctggcgctgatggaggcgcggccgggccgctacacctacgtggcgccctcgcgtgggcaggtggaagccttccgcgcccgcgtgccgaccagcactgcggtgcgcctgctgacccagatcgagttcgccaaccgcgtggcccagcacgccgcgcgcagcggccagaccggtggcttcgttgccagctaccggcgcagcacccgtacgccgcgcgagattgccggccgcatcggcctgcagggcatcggtgggcgcagcccggagcaggtgctgctgaccgcgttcgaggccatcaaccgctggtgcgcgtcgtcggccccgggcttggcgttccagcatttcgaccgttcggtgcccgctgcgatgctcgatgtgtcgccgtacatggcggccgccgagcacgtctggcgctgcatgttcgacgccgagctgcagcggggcacgctgctgagcctcagcccggcgcacatcggcaagtggctggcgctgcgcggcgtcaccccgccgcaggacatgggcatgctgctggtggacgaggcgcatgacctgagcccgtcgtggaagcagttgctggccggccatgcgcctggcgtggtcagcctgggtgacccgcaccagtgcctgaccggtacgttgccgcgctgggccgcgtcgaaggtgctggaaatgcaccagtcggtgcgccagggcaaccaggtcgagggcctggtcaaccagaccctggcactggatggactgggccaggaaagtgggccgttcgtcggtgccaccgaccgcgccaccggtgtgctgcattaccgcgactgggcgcaggtgccgagcgagggcctgcgcatccatggcagcgttgccgatctggccctggacgcggcacagctgcacgcactcgggctgcggccctacctgcatccggcatcgctgcgcgcgctgcgcagcgtgctgcagcggccactggatgggtggcgccggcgccgcgacagcgcatcggaccaggaatgggagcgcttcctggccacgcaggccgacgaagggcagggcgcgctggtcgaactgtttgcgtctgccgatcgggtgcagtcactgctgcaagcgctcgatgaccaggacacgcccgctgaagggcgggtggcgctgtgcctggccgaacacgcgaagaatctgcagttcgacgtggtctcgctgtcgcccggttgcttcagtgcggggcagggcgggcgcatctggcacaacccggtgcgcgcggtctatctggcgctgacccgtgcgcgacgccagctgcacgtaccggccgatggcatggaacagctgcagcatacggcgacactgcaggagcaggcgcgccagaagcgcaggcgcgagcgacagcaggccagcggctaccggcccgcgcgctag

SEQ ID NO: 530777 - DNA, 993 bp, Stenotrophomonas maltophilia
atgagcctgttccgcccccgcatgctgctgtccgtcgccctgatcggcctgctggccggctgcggtggcgatccggtccgtcccacgccgccgccggcacccaccgtggtgccgcaggccaagccggtgaagatcggcatcgccctcggaggcggcgcggccaagggcttcgcgcacatcggcgtgatcaagatgctggaagccaacggcttcgagccggccgtggtgtccggcaccagcgccggcagcgtggtgggtgcgctgtatgccagcggcatggacgcgttccagatgcagagcaaggcggtcgcgctggacgaagccagcatccgcgacgtgcgccttttctccggcggcctggtgcagggccagaagctgcaggactacgtcaacgagcaggttgccaaccgtcctgccgagcgcctgaagaagccgttcgccgccgtcgccacccagctggagaccggcgagcgtgcgatcttcgtgcgcggcaacgtcggccaggcggtgcgcgcgtcgagcagcattcccggtgtgttcgagccagtgaagatcggcggtcgcaactacatcgatggcggcgtggtcagcccggtaccggtggatgccgcgcgccagctcggcgccgacttcgtgatcgccgtggacatctccagcaaggccagcggcaaggcgccgaccgacatgctgggcatcgtcaaccagtccatctcgatcatgggccaacgcctgggcgagcaggaactggcacgcgccgacatcgtcatccgcccgaaggtgctggacatcggcgccgccgatttcagccagcgtggcaccgccatcctggaaggcgaaaaggccgcgatggcagccatgccgcagatccgcgcgaagatccagcagctgcagcgcgcacgtgccgcggcggccgcaccggcaccggtggccgcgccgaagtgcgaggaagcctcgcgcctgggcaagctgatgggccgcaaggacaagtgctga

SEQ ID NO: 530778 - DNA, 1017 bp, Stenotrophomonas maltophilia
atgacccagtggtacttccatgcctccgcccaggccgagcgtatcggcccgcttgatgacgaggccgcgcgccgttatgcgcaggccaacccgcgcgccctggcctggtgccagggcatgaacgggtggacctcgattgccgaggtgcccgaactgcagtccgcggccccgggcatgccgaacaccccgccgccggtccccgccgcggccagcggccgcgccgacgacatcgaattccgcatcgtcggccatgaaatgcagttcgtggaaatcgagctcgaccccggtgagagcgccattgccgaggccggcgcattgatgttcaaggatgccaccgtgcagatggacacggtgttcggcgccgccaacggcgaccagggcggcggcttcatgggcaaggtgatggccgccggcaagcgcgtgctgaccggcgagagcctgttcgccaccgtctacacccagagcggccacggcaagggcaaggtcgccttcgccgcgccctaccccggcaccgtgctggcaatgaagctggaccagcatggcggccgcctgatctgccagaaggacagcttcctggccggcgcgcgcggcgtgcagatcggcgtgcagttccagcgcaagatcatgaccggcctgttcggcggcgaaggtttcatcatgcagaagctggaaggcgacggctgggtgttcatccatgccggcggttgcgtggtggagcgcgagctggccgccggcgagcggctggacgtggataccggctgcgtggtggcctaccacccgaccgtagacatggacgtgcgccgggtggccggcatcaagagcatgctgttcggtggcgaaggcgtgttcctggccacgctgaccggtccgggcaaggtctggctgcagtcgctgccgttctcgcgtctggccggccgcatgtggatggccgcgccgcagggcggtggccagaaccgcggcgaaggctcggtgctgggcggcctgggccggatgctggacggcgacaaccggttctga

SEQ ID NO: 530779 - DNA, 2271 bp, Stenotrophomonas maltophilia
atgtctccgacccgcacttcccgtggccgccttccggtcgcgcgccccctcgttgccgctctttccgccctgttgccgctggtagcagccgcccaggaaactcccgctgccaaggatccggttgcccttgatgccctgcaggtgaccgcgcagcgccgcgtcgagaacgccaaggacgtgccggtcgcgatcagcgcgatccagggcgagaagctcgatgtgctgggttcggcgggcgatgacatccgcttcctggccgcgcgcgtgcccagcctcaacatcgagtcgtcctacggacgtgccttcccgcgcttctacatccgtggcctgggcaacaccgacttcgacctcaatgcgtcgcagccggtgtcgctggtgtacgacgacgtggtgcaggaaagcccgctgctgaagggcttcccgctgttcgacctggccaatgtggaagtgctgcgtggcccgcagggcacgctgttcggccgcaacaccccggccggcgtggtcaagttcgattcggcgcgcccgtcgcaggatgccgatggctacgtgcgcgtcggctacggcagctacaacagctggaatgtgcagggcgcctatggcggcccgctgaccgaccgctggtcggctcgcgtctcggccatctaccagcgccgtgacgactgggtcgacaacacccgtgccggtgcgcccaacagcggtttcgaaggctatgacgaagccgccggccgcgtgcagttcctgtacgaaggcgacgacttcgaagcgctgttcaacctgcacaagcgcaagctcaacggtaccgcgcgcctgttccgcgccaacatcatccagaaggggggcaacggcctggtcgagaacttcgatcgcgacaaggtggccaacgatggcgtcaacttctccgacctggagacctggggcggcagtgcgcgcctgcagtggaacctcggttcggtgaccctgcactcgatcaccggttatgaaaccgccgaatcgctcaatcgtggtgacatcgacggtggctacggcgacgcatcgctgggcgctggcaactatggcccgggcttcatcccgttctcgtcggagtcggccgacggcctgccgcaccatcgccagtggacgcaggaattccgcgttgaatccaacgaatggggccgcttcgactggcaggccggcgtcttctatttcgacgaagacgtgaccatcaacaacttcaactacaactcgttgaagccgggcaacccgcagaccggccatgtggtgcagaaccagcgcaacaaggcctgggcggtgttcgcctcgggtgacttcgatgtcaccgaccgcttcaagctgcgtgccggcgtgcgctacacccaggacaagaaggacttcaacgccagcgtgctgcaggccgtgccgttcggcaccccggtcagtggcccgtacctggccaacaccgacgtcaacgacgtcagctgggatgtcagcggcgtgtacaagctgaccgacaacgtgaatgcctacgcccgcgtggccaagggcttccgcgcgccgtcgatccagggccgcctggccttcgcgccgggcctgtcgcaggccgattcggagaaggtgatctcgtacgaagccggcatcaaggccgacctgttcgagcgccgcgcgcgcctgggcctgagcgtgttccgctacaacgttgacggccagcagttgatcgcggtgggcggcaccaacaacaccgccaccctgctcaacgccgacaagaccatcggccagggcgtggagctggacctggaagcctatctggctgacaacgtgctgctgaccttcggcagcagctacaacgacaccgagatcaaggacaaggatctggcggtagcgatctgcggcggtggctgcaccatcaacgacccgaccaccgtcatcaacggtggcacctatgcgctggtgaacggcaaccctctgccgcaggcgccgaagtggatccacaacgcgaccctgcgcgtgggcttcccgctcagcgatggcagcgagctgtatgcctacaccgactgggcctaccgcagcgcggtgaacttcttcatctacgagtcgccggaattccgcggccgtagttcgctggaaggcggcctgcgcctgggctacaactgggattacggccagtacgacgtggccgtgttcggccgcaacctgaccaaccagacccgcgtggtcggcgcgatcgacttcaacaacctgaccggcttcctcaacgagccgcgtacctggggcgtggagttcaccgcgaagttctga

SEQ ID NO: 530780 - DNA, 840 bp, Stenotrophomonas maltophilia
atgtcgctgatttcccaccctgcccgcccgctgctcggccttgccgtcatcgcggccctggccggttgtgccgccaccgccgccaagccgaccgccgtcgaagccaacatcaccaccaaggcggtgggctatctggacaagagcgcggtaccggccagcctcgacctggtaccggcaccaccggtggccggttcggccgcgctcgccctggacgagcaggtcagccgtgaagcccgcgcgctgcgtggcagcccgcgcttcgcccaggccggtgtcgatgcggaactcggcttccccgaaggcgccaaccacttctcctgcgccgccgacatcgacgtcgatgcggtgaagaccccggcgctgtaccgcctgctggagcgcagccggatcgacgccagcgccgccaccaaggccgccaagaaccactaccagcgcccgcgcccgttcatggtcaatggtgaaccgacctgctcgccgaaggacgaagaaggcctgcgcaagaacggctcgtacccgtccggccacacctcgatcggctgggcctgggccctgatcctgtcggagatcgcaccggatcgcgccgatgccatccaggcgcgcggccgcaactacggcgagagccgcctggtgtgcaacgtgcactggcagagcgacatcctcgaaggccgcttcatgggcgctgccgccgtggcccgcctgcacgacaacgccgcgttcaacaaggacctgctggccgcacgcaaggagatcgctgccgcgcgcaaggccggcctgcactccagccgcgactgcgcggccgaggaagcggtgctgaaggtgcgcccgcagagcgcgctgtaa

SEQ ID NO: 530781 - DNA, 879 bp, Stenotrophomonas maltophilia
atgcgcagcaccgcaacaggaagtaccgtcctggccctgctcctcgggctggcagccgcgccggcacaggcgaccgacgtggtcggcgtggccttcgtgcatggcaccggcgcacagaccaatgccacccaggactactggcagccggcgatcatcgataccgtgcgccagggcctgcccaacagcagcaactacgtcgtcatcaactgtgacttcacccagtacatgtggaagccggaagcggccggctgcctggccaaccagctgaccagcttcatcgacagccgcggcatcacccagctggtggtgatcacccactccaacggcggcaacgtgatgcgctggatcctgtccaacccgacctatgacagccgctatccgaagatcatccgcacggtgcgcaaggtcaatgcgctggcaccgtcttcggccggcacgccgttggccgatgcggtgctcaacggcaacacctttgaaacctcgctgggctggctgctgggctacaagaacgacgccgtgcgccagcagcaggtggcgagcatggccacctacaacgcgcagaacctctacggcaccgctggccgcccggcgctgcccaaaccgttccgcgcggtggtgggcagcgatgtggaatcggcggtgtgggacagcaacagctactgcggtggctatgccgccaacgtcggcctggagttcacccagaactggctgtcgtcctgctccgatggcttcctggagtgcagcagccagaaggccgccggcaccacctggttcaccgacaaggcgcgtacccagggtgcagaaccgctcagccacaaccagagccgccgcgagtgcttcggcctcggcaccctgctgcgcaacgacctgacccagtga

SEQ ID NO: 530782 - DNA, 1203 bp, Stenotrophomonas maltophilia
atgacgattcaatccaccctgctggccggcgccaccctggcagtgctgtccctttccgcagcgcaggccgcgcagccgctgcaggccgcccgtgcgggcgatcaggtgcctgccgccctggtagccgcgccgcttcccaccgatgagagcgaacacgcgccactggcctttgcctgggcactggaccccgcacaaccgctgcaggcggccacgccgtatgcctcggtcagccgcagctactggcagcaggttgatggcacgcagctgcagcgaggcctggacctgccactgacggcgccggatgcggtgatccagctgagcccgaccgcaggtgcccgcgcgctgccggccaacacgctacaggtgcgcgacccggccggccgcagcagcgtggcgcgcagtgttgatgcgcgcgcgctgcaggacgccggcatgccggtcagcgatggcagcagcatgctgcgtaccggcgcgaccagtgccgtcggtgcctacacgctgcagagcgcgcaggcccagggccgctacgtggtacaggtgctggagccgaacagcccgctgcggctggaagtgcaggccaaccaggcgcaggtgctggccggtggcaacgtgcagctgcaggcacgcctgctggaagacggtgccaccaccgcgcagctggcatcgcgtcgtggcggcctgggcggtgaagccctgctggtcgcgccggatggccgcagctggccgcagcgcctgctgcgcactaccgatggcagcctgcgcgcgcaggtgcgcatcccggccgatgtcggtactgcacaggggctgtgggaattgcaggtgttcgcccaggccgacggtgtgctgcgcgatggcaaggtcgccttcgcggtggcgcggccgaccgcgcgcttcagcggccaggcggcaccggatccgtccagccgccaggtggcactgccattgcaggtggccgccgcaggccgctatgaggcacggggcacgctgtatgccaccgcccgcgatggtcagttgaagccggtcgcgcaggcacatgcggccgcgtggttcgatggcccgggcgcaggccagctggtgctgccgttcgaccaggccgcattgccggtcgggttcggtgcgccgtacgagctgcgcgacctgcagctgcaggaccagagccggatggcaccgatcgagtcgcgcgcactggcgttgcggttctga

SEQ ID NO: 530783 - DNA, 822 bp, Stenotrophomonas maltophilia
atgaccgccgccccgcccctggcggagcagccccccttgatcgaactggaccgcgccaccgtggtgcgcggccaggtgaaggtgctgcacgggctcagcctgcgcatcgcgcagggccagcacaccgcactgctcggccccaacggctgcggcaagtccaccttcatcaagctgatcacccgcgagctgtacccgctggcccagggcgacggcgcggtggcggtgaaggtgctgggccagaaccgctggcaggtggaccggctgcgctcgcagctgggcatcgtcaccggcgacctcagcagcaacctggccgacatgcccgggctgaccgtggaacaggcggtgctgtccggcttcttcgccagctacgtggtaccggccttccgcgaggtgaccgccgacatgcgtgcacgcgtcggcgagacactggcgatgaccggcgcgctgtcgctgcgtgagcgcgcctacgccgagctgtcggccggcgagacccgccgcgtgctgatcgcccgcgcgctggtcaaccggccgcaggcactgctgctggatgagccctccaacggcttggatctggtcgcccgcgagcagctggtggcgaccatgcgggtgctggcgcagcagggcatcaccctggtgctggtgacccatcacatcgaagagatcattcccgagatcgaacgggtggtgctgctgcgcgacggccgcgtactggccgatggcacccgcgccgagctgctgcgcaacgaaccgctgtcggcggtgttcggcggtgcgatcacggtggtcgagcaggaaggccggctgaccgcgtacgcgggatag

SEQ ID NO: 530784 - DNA, 1203 bp, Stenotrophomonas maltophilia
atgccagatgccctgatgtccctgttgaccggtggtgtgctcggcgtgggctggtgggccatgctggcggtgctgctggtcttcacccagatcaccatcttctcggtgaccctgtacctgcaccgtagccaggcccatcgcggcgtcgatttccacccggcgctggcccatgtgttccgcttctggctgtggctgaccacttcgatgatcacccgcgagtgggtggccatccaccgcaagcaccacgccaaggtggagaccgaggacgacccgcacagcccggtcacccgcggcatcggcaaggtgttctggcacggcgtggagctgtaccgggaggcacgcggcatgcgcgcggacatcgagcagtacgggcgcggtaccccggacgatgcggtcgagcgccatctgtataccccgcacgccacgctgggcccggtgctgctgctggcgatcaacagcgtgctgttcggcctgccgggcgtggccctgtgggcgatccagatggcatggatcccgttctgggccgcgggcgtggtcaatggcctggggcactggtggggctaccgcaactacgagtccgccgacacctccaccaatctcacgccgtgggggttctggatcggtggcgaggagctgcacaacaaccatcatgccttccccagttcggcgcgcttcgcgatgcggcgctgggagttcgatatcggctggagtgcgatccgcctgctgcaggcgctgcgcctggccaaggtgctgcgggtggcgccggccatggacgtgcgcccgaacattgccgtgcccgatgccgaaaccctgaaggcgctgctgtcgcaccgcttccaggcgatgaccgattaccagcgcaatgtgttcatgccggccctgcgcgaggaagccgtgcaggccggggccaagctgcgccgcctgctgccgcgccggctgcgccgtggcctggtcaacgatggccgctggctgaagccggacagtcgtgcccagctcagcgaatgggtggcacagcgcccgcgcatccgcaccctggtcgagtaccgcgcgcggctggcggcgctgctcgaggcccgcggccacgatgccgccgagcgcctgcatcagttgcaggcgtggtgccgtgaggccgaggaaagcgggatcgctgcgctgcaggcctatgccgcacggttgaagggctacagcctggtgggcgcgtga

SEQ ID NO: 530785 - DNA, 303 bp, Stenotrophomonas maltophilia
atgctgctgccgggcgcggcgctggcccaggtcaccgacaccaccagctacctgcagcggatggacagcgatggcgacggccgggtgagtgaatccgagtacgtgcagtggatgctgtatgccttcgaccgcatggaccgcaatggtgatggcgtgctgaatgccgatgagctgccgggcggcaagggccgggcgatcagccgcgagcagcagcggcaggtgatcgtgcagcgtttccacaagcaggatgccaacggtgatggcgtcctggatgcccgtgaactggcggcaccgccacgctga

SEQ ID NO: 530786 - DNA, 813 bp, Stenotrophomonas maltophilia
atgcctgaactgcccgaagtcgaaaccacccgccgcggcctggcgccgcacctgcagggccgccgcgtgcatggcgtgatcctgcgccgcgccgacctgcgctggccgattccgccggaagtggccgagctgctgccggggcagcgcatcgaggagatccgccggcgcgccaagtacctgctgctggataccgccatcggcagcgcggtgctgcacctgggcatgtccggcagcctgcgcgtgctgcccggtgatacgccggtacgcgcccacgaccacgtcgacatcagcctggacaacggccgcctgctgcgcttcaacgacccgcgccgcttcggcagcctgctctggcagcccgccggtgaggtccatccgctgctgcaggggctgggcccggagccgatggacgacgcgttcgacggcgactacctgttcgcccgcagccgtggccgcagcgcgccggtgaagaccttcctgatggaccaggcggtggtggtgggcgtgggcaacatctacgccgccgagagcctgttcaaggccggcatcagtccactgcgcgaggccggcaagatctcgcgcgggcgctatcagcggctggccgacgcggtgaaggaaatcctcggctacgccatcacccgtggcggcaccacgctgcgcgatttcatcagccctgacggcgcaccgggctacttcgaacaggaactgctggtgtacggccgcgacgggctgccctgcccgaactgtggtcgcgcgctgaagcacgccaccatcggccagcgcgccagcgtctggtgcagccattgtcagcgctga

SEQ ID NO: 530787 - DNA, 1605 bp, Stenotrophomonas maltophilia
atgcaacgacgcgacttcatccgcaatgcctccctcgccctggctgcattcggcctgccgtccctgcccgcatgcgcggccagcaagagcggccagatgggcctgcgccgcctcggccagccgcagccgttcgacttcgccaccctgaagggccaggcgcgcgcgctggcacaggcaccctacaagagccacaagcgggtgctgccgggccgcctggaaggcctggactgggaccagtaccagtcgatcggctaccgccaggaccatgcgctgtgggctgaccagcctggcaagttccaggccaagttcttccacctgggcctgtacttccattcgccggtgcgcatgttcgacgtggtcgacggcaaggcgcaggagctggcctatgacggcgcggcgttcaactacggcaagagcggcatcaaggacggcgagctgccggccgatctgggcttcgccggcttccgcctgaacacccgcaaggacaccgaccgcgacttcgccgccttcctcggcgccagctacttccgcgcggtcggcaaggaaggccagtacggccagtccgcgcgcggcctggcgatcgacaccggcatgggcaagccggaggaattcccggacttcatcgcctactacctggagcagccgtcggccgattcggagacgatcgtggtctacggcctgctggattcgcccagcgtggccggtgcctaccgcttcgcgatcaccaatggcgacgtgctgctgatggatatcgacagcgcgctgtacccgcgcaaggcgatcgagcggctgggcatcgccccgtgcaccagcatgtaccaggtgggcgagaacgaccgccgcatggcatgggactggcgcccggagatccacgacaccgacggcctgtcgctgtggaccggtgccggcgaatggatctggcgaccgctgctgaatccgcgcaacctgcgcttcaacatgttcgtcgaccgcaacccgcgtggtttcggcctgctgcagcgcgaccgcaacttcgaccactaccaggacgacggcgtgttctacgagaagcgcccctgcctgtgggtggagccgaagggcgaatggggcgagggctcggtgcagctggtggagattcccaccgtggacgagaccttcgacaacatcgtggcgttctggaacccgaaggaaaagccgcagccgggccaggagctgctggtcggctaccgcctgtactggggcgccgagccgccggcacggccgccgctggcgcactgcgtggccagccgcaccggcctgggcggcgtggtcggcaagaagcgcgagtatttcagctggcgcttcgcggtggacttcgaaggcggcgaactggccaggctgatcgacaagggcgaggtcgaggccgtggtggaagccagccgcggccgggtcgagatcgtgtcggcgcgcccgctgcgcgagatcaacggctaccgcgcgatgttcgacctggtgccgccggaaggcagcaccgagcagatcgacatccgcctgttcctgcgcagtggcggcaagaccctcaccgagacctggctgtaccagtacaccccgccgccggcaggtgcgccggagcgcacgctgtactga

SEQ ID NO: 530788 - DNA, 705 bp, Stenotrophomonas maltophilia
atgcgctctgccctcctgctgctgccgctgctgttgctgcccctgctggccaccgcggccgagcgcccgtcaggtgaagacgatgcggcggtgatcggcgccggtttcatggacagccacccggacatgatgtaccggcaatggggcgtcaacgcgctgcgtcgcaacgatgtcaacggcgcgatggacaacttccggctggccgcgcggtatgcggacaagcctgcccagggctacctcggcgagatgtactggtacggggtagagcagccgcgcaatccggtcatggcctatgcctggatggaggtggcggccgaacgtggctatccgttgttcgtcgagctgcgcaacgagtactgggccacgctgccgctggagcagcatgatgcggcgcgcgcgcaggcaagcgcgctgcgcgccgagtatggtgacgaagtcgcgcgcccacgcatggccgaagtgctcaaaaaggggcgccgcgagatgaccggcagccgcgtcggctcgatgtccaacaacgtcgacatcgtgtacatggacggcggaatctcccgcaccatcaaggccgatcgcctctacgacccgaagtactgggacccgaagcagtacgaacgctggcaggacgaaacctggatgaagatccgccggggcacggtggaagtgggtgtgccgacccagtcgcacgccaccgacagcaagccttga

SEQ ID NO: 530789 - DNA, 621 bp, Stenotrophomonas maltophilia
atggccaagctctacttctactattcggcgatgaacgccggcaagaccaccaccctgctgcagagcgcccacaactaccgcgagcgcggcatgcgggtggcgatcctgaccccgcgcctggacgatcgtgccggcgccggcgtggtcgcctcgcggatcggcctgcgtgcggacggcatggccttcgaccgcgataccgacctgcagcgctgggtcgagcaggatctggcagccaacggcccgatgggctgcgtgctggtggacgaggcgcagttcctgacccgcgcccaggtctggcagctcagcgaagtggtcgaccagctgcgcattccggtgctgtgctacggcctgcgcaccgacttccgcggcgagctgttcgaaggcagccagtacctgctggcctgggccgacgagatgcaggagatcaagaccatctgccacagcggcaagaaggcgacgatgacggtgcgtgtggacgagcatggccacgcggtgcaggacggcccgcaggtggagatcggcggcaacgaccgctacgtgtcggtcagtcgcgccgagttcaagaagatcacccgcggcgaagggcggatcgatccggcgcaggcgccgctgccgctgtag

SEQ ID NO: 530790 - DNA, 1977 bp, Stenotrophomonas maltophilia
atgcacggtctcaatcccccccaagccgccgccgtcctgcacatcgaaggtccattgctggtgctcgccggcgcgggcagcggcaagacgcgtgtgatcgtggaaaagatcgcccacctgatcggttgcggccgctatccggcgcgccgcatcgcggcgatcaccttcaccaacaagtcggccaaggaaatgcgcgagcgcgtggccaagcgcctgcgcgagcaggacgccgacgaggtgaccatctgcaccttccatgcgctgggcctgaagttcctgcagatcgagcacgcggccgttggcctgaagcgcggcttctcgatcttcgatgcagacgatgccgctgcgcagatcaaggacctgatgtatggggccaagcctgatgacatcgaggacatgaagaacctggtgtcgcgcgcgaagaacgccggcctgtcgcccgagcaggcgatggccgccgcgcgcagcaatcgcgagaaggaagcggccagcgtctacgagcgctaccagctgcgcctgaccgcgttcaatgcggtcgacttcgatgacctgatccgtctcccggtgcagatcctggaagaaaatccggagatcgcgctggcctggcgcgagcgcatcggctacctgctggtggacgaatgtcaggacaccaacgacgcgcagtaccggctgctcaagcagctggccggtgacaagggcaacttcacctgcgtgggtgacgatgaccagtcgatctatgcctggcgcggcgccaatccggaaaacctgcagcagatggggcgcgactatcccaagctggagatcatcaagctggagcagaactaccgctgctccaaccgcgtgctgcgcgcggccaatgcgctgatcgccaacaacccgcacgagcacctgaagaagctgtggagtgaccaggccgacggcgaacgcatccgcgtgtgggagtgccgcaacagcgaacatgaggcggaaaaggttgccgccgagatcgccttcgtggcgcagtcgcgcaacgtgccgtggagcgacttctgcatcctgttccgcggcaacttccagtcgcgcccgctggaaaaggcgatgcagctgctgcgcatcccctaccacctgaccggcggcaccatgttcctggagcgccaggaagtgaaggacacgctggcctggctgcgcctgctggtgaacccggacgacgacaccgcgttcatgcgtgcggtgcagtcacccaagcgcgacgtcggtgccggcacgctggccaagctggccgaactggcgcaggaaaaggacatgccgatggcgcaggccgccgaggcgatcggcgcgctgcagcagctgccaccgcgcgcggccaacagcctggcgcgcttcaccgacatcctgcgcgacctgcgtgcgcagacccgccaggtcagctccggcgacatgatccgcaaggtggccaaggaatcagggttgttgagtgagctgcgccagcaggccaaggaagaggccagctaccagcgccgtgccaacaacatcgaggaactggcgcagtggttcgaaagcggcccgcgcggtgccaccgccgccgatctggccggccagctggcgctgctgtcgcgcagcgacaaggacgagggcggcaaccaggtgcgcatgatgaccatgcacgcctccaagggcctggaattcccgtacgtgttcatcgtcggctgcgaggatggcgtgctgccgcaccaggtcagcctggacgagggcaacctgcaggaagagcggcgcctgctgtacgtgggcatcacccgcgccaagatccagctgtggatgagttacagcaagctgacccgcaagttcggtgagcacgtgcggttgaagccgagccggttcttcgaggagattccggcggaggagatccagcgcgatggtgctgatccggtggccgatgcggtgcgcaagaaggaacgggcgagtgcggggttggcggcgatcgaggcgctgttcgattga

SEQ ID NO: 530791 - DNA, 834 bp, Stenotrophomonas maltophilia
atgaatccgagcgtcgacatgggcagattgcaggctgcattgaacaacatcaggaatgcagagggcgaactggtatctatggttccaatggttgccgaaatcgctgctggcaacagttgtgcgcagttctttgcagacttcttctatcgccagaacaaagggcgacccgctcttgaaagggttggcaacctactcaccatctttgaagagaatggatactcggttgcattgggtgtggaggcagctggacgcgcccgcccccaggaactgtgcagcgttccgcaggactgtgtcattgctttggtgagtgactgctgcgttcatttggaggtctttcgcagcccttatggggcgtacaaagaatttgaaggcagtctcgcggtagaacatggctacaccaaggtgttgaagcgtggcagcgctctgtttttggacggaaatcgcgatcatatagtgacctggtcggagcagccgtacgtaacgctggtcgtaagccgacaggcgttcggtcgacacttggtaacccggcatgactcgagtacaggtcaggtaatttatgccacggcggcgagtcagtgtctttctcgcctgcagcatgcttgtgaatacatcgcgaatttcggagatgtgacgttggtcccggtgcttcaaactcttttgcgccatccggcacatttcattcgctggaaggcagtcgaggcactcctgaatgtcgatctcgaaattggcttgcgcgccctggatgcgctgcgcgaggacccgcatccacacatcatggctgccgcgaacacagcgtgggcgcgatttcagcaggactataccgcatgccgctaa

SEQ ID NO: 530792 - DNA, 819 bp, Stenotrophomonas maltophilia
atgccgctaatcaatgccgccactgacgaaatgatggatctgcaaagtttctgcgactgggtggaagcacaagatccccttcggctacagaatattgccgcttggcctgagctctggaagaatttccatgcgctgcacaatacccccggtcttttttctggctttctggccgctgagcttgaagatgggttggcgtcgtttcagagcgacaaccgctacagcggccaaagcttcattctgacgcggcgtaaggggttctatcttagggtaaatctatggcctcccgccgacgacccgtacgctgaagtaaatcaggatcactttgatcggttctacgtatacggtacccagtacgcacacgatcacaactttgatttcctgaccatcggcttgcatggtcctggatatgagacggacctgtggacctacgaccattccagcgtcgtgggctgtgtcggcgagcaggttgtactgaccccgcaaggccggaagtgccttacacccggcaccatgctgctattccgcaagagtttggatgtccacgctcagtggccgccagaggagctgtcggtttcgctgaactttatccctgaagtcactccggtatccgagcagtacctcttcgacatacaggccggccgcatcgccagcattgaagagctgcttccctctatccggaaccttgaagtactggtccgtgagctaggcgattcccgaatgaaatcccatcttgagcagatgatctctgaacgtatagagcagaaagaggctcggcgggccgagcgcagattgaaaggtagttcaggaggagcagcatga

SEQ ID NO: 530793 - DNA, 702 bp, Stenotrophomonas maltophilia
atgacgactgccagagccggggttctaggtgatctggtggtggcgccgcaccaggcatgggaccggatcagtcacgacggaggctcggtactgcctttgctgctcttggtagtggcgacggtcgctgcgtggtcggcctacttcgcaacggtagacgtcgcttggttgcaggaccgtctgctggccgagtccagcggcataagcggccaggagctccggctggcacgtgatctgatgggacgaggccttctcggcttggtcacaatcgtctcgtctctggtgatcggaattgcggtcgtgctgtcgacggcagtctatctggggctcgtcgcgcgattccagtgtgttgagcgtgttgggccgtcctggttcgttttctctgcgtggctgaccgtgcctgactcctttgcgctgttgctgacggccatgcggtctgcactcagcaattctcaccagattcctccagagtcagctagtccgttggcattggcccagttagtgggtctatctgcagacagtccctggcttgcgctggctggcgcagtgggaatccagacggtgtgggccgtcgcgctgtgcgccattggtgtatcgcgctggatgaagctcagtgggctgcgagcagtgatcattgcaactacgccgatcgtgctgatctacatcgtctgggtagtcatggtccttgcgggaactggcgtatga

SEQ ID NO: 530794 - DNA, 1152 bp, Stenotrophomonas maltophilia
atgctcaaacgtggcgcgccgccccatgttgagttggaagttgtctccccgcgcgccttgcgcgccactgtgctgggctctggcacattcgacttccaagatgccgccgctctctcgccgcaggtaataggtcgcgtacgcgaggttatggtcaaggaaggagacactgtccaggaagggcaacttgtaatgatccttgatcaggaggcgcagaaggctgaagtcgaacagcgtgagtcccaggtccgccagaagcaagtagatatccggctgcaggaggctatgctgaggctcaggcagcagcaggcccggcgtagtaaggagctcgttgctgagcgcttggttgacgtcgccagcgacgaaaaaatgcagcatgaagccgagctggcgagtttgaagctggccgccagtcaagaggagctgcgccagtcgaaggccgctctggcgcaggcaagcgagagcttgtcaaagacgctaatccgcgcgccgattagcggtgtggtgaccacagtcgccttgaaggtgggcgagaccgcagtgccgagttccactggaattgtcggttccagcctgatgaccatttctgatctctccactatgaccgccaccatcaaggtggatgaaatggatgtcgctcgggtagagccagggcagacagcaagggtctttgctggctcggtcgtggacaaggcgatcactggcgtcgtggagaggatcgcgctggcaccgccgcggaaaggcacggatcccagcagtaccgaacgtagttacgaagtggagatttcactgcaggaagatgatcatggttcgttgcgtacaggcatgagttgtagagccgagatattcgtagatgagggtcgtgagccaattgccgttccagtgcaggccgttctgacagagacgatcgaagatgccgacgatacttcgcatcgcgacaggaagcgacaccgccgtcagtatgtcctggtggagttgggaggggccgtacttagacgctacgttgaatcaggactgtccgacgacacatacgtggagatcgtctcagggctggagtcgggagaacgtgtggtggtcgggccgggcaaagtcatgcgacatttgcgcgacaaccaatcagtcagggccaagttcgccggttccagtgcgccatga

SEQ ID NO: 530795 - DNA, 699 bp, Stenotrophomonas maltophilia
atgatacatccgaccctgcagctgagagcggtgcacaagtactacgaaatggcgggcgaaagtctgcacgttctacgcggaatcgatctgcagatcagcgcgaatgagtacgtcgcgattatcggtcattctggctctggaaagtcaacgctgatgaacattcttggctgcttggatcgcccgacagagggacagtatcttcttggcggacaggatgtgtcaggtatggacgaacccgcgttggccagagtgcgcaacgagcgaatcggcttcatctttcagagcttcaacctgatgccgcgtgaatcggctctcagtaatgttgcccgcccgcttcgataccgtggcatggcacgcagtgaacgggaagagcgcgcgatgaatgcgctgcagaaggttggactctccgagcgcgcttggcacctgccgagccagctgtcaggcggtcagcgtcagcgcgtggccatagcccgggctctgtgcggagagcccagtatcctcctggcagatgagccgaccggaaatcttgatgcatccacctccgaagaaataatgggcttgcttgatgtgctctggcgggagggcagcacaatcgtgatggttactcatgagcaggacatcgccgatcgatgtcagcgcataatccgcatagagaacggatccatcagtagcgatcggtggagctcatcagatggctga

SEQ ID NO: 530796 - DNA, 1227 bp, Stenotrophomonas maltophilia
atggctgagcttctcattcttgagggcgccttaaacagcattcgcgcgcatttgctacgcagcctgttgacggtactggggattatcattggtgtcgcatctgtcattgccgttgtgtcagtttttcagggtatggcggcatcaatcacagagcagtttgctggtctcggcgccaacagcctgagcgtgcgtgctgaaacctcgttcgaggaccagctacagggccgccgtagtcgtatctctctcctcgatttccaacaactgcaggacagcgtgcagtatttggctgacatctcacccacgctcgacgtgatgggtgaccatggcggaaccgtcagcgcaggtcgtgtgcaggcattcacccgcgtaattgcgagttcgccctcttaccagcattcgcgtctggtctacccccgcttggggcgcttcattaccgaagcagacaacgattcgcgccggagggtgtgcgtgcttggcgaaaccctgcgagagaatctgaatttgccgaggaatccactaggctattacatccgaattaactcggaatggtgcaaggtggttggtgtcatggaggagcgggggaaggtattcggcttcagccaggatgactttgtcttgatgccgttctcaaccgggttggcgctggtacgtgacgttgcacagatcgacctgcgtatcgacctccaagtacgggatcgcacgaacattgaactcgtaaggcaacgcgcagagcaggcgcttcgtcggtcaaggcgattgagcagcgatgctgtggatgacttcagagtcgaaactccagatcagctgggagactcgttgaaaaccatcatcaatttggtaggcaccgtatttgccagcctggtcgggatctcattgctggtcggtggaatcggaatcatgaacatcatgctggtttccgtcaccgagcgaacccgcgaaatcggcatctgtaaggcgcttggcgcaacgtcgcgctcgattctgctgcagtttctcggggaggcgatagtgctgagcgctctaggcgggctgataggcgtggtgatcggctacgcaggaggggcgctggcttcggcgttgattcccgggctgcccgcggctgtagtgccatggtgggcggtggttctatcagttgcgttctctgggctggtgggcgtgatatttggaattattcccgccgcaaaggctgcccggctcgatccaattgaagcgctgcgttacgagtag

SEQ ID NO: 530797 - DNA, 135 bp, Stenotrophomonas maltophilia
atgaaaaatgcaaacattgaagcgcttatcgcggatctggagatgcccgtcggcctaagctgcgacggtggaaacatcggtggctggaaatgcgccgcgatcaagggcgcggtgaaaattataaccaacctttga

SEQ ID NO: 530798 - DNA, 921 bp, Stenotrophomonas maltophilia
atgcatatgaacgctgccatgcgaccgcagagcggcccacggcgacgcacaattgcgggtctgaatgtcggtgatcgtgcaggtgggcttgctagtattcttgcgatactggattctcgatcaacaagaattgaggactacgtgcccccgttaaaggctgccgctgctgccgaattcaaagatttggcggagttgctactgtcctgcatggatgacaattcgttgaaaggaaggggggcttaccaaaccgatgatcacatagagattttccgggatgaggtaaagaccatgctgcttgccaaggttccacaaatgggccttgaattcagtgctgttagatccgatggcggctccagtttctcacggacccagttgagtttgttggccaatgacgcatgtttcatgtttctggggagtggcaccatgcaacttcgtcatcttgaggtcgtgccggactctgatggtgaggaactgcggcatagcagagtagtttcatattccggtggcgacgtggtgaccatacgtcggggtgaggatgcattcgaaaccatgtctgtgaacggtacgatctggctgcttcagctgataatcaacgagcattcggacttggtgagccactacgaccgccattctctacggcgaactggagtgtcttcagcgagcgtccatgccagccgcctcgaatttgcaatggacatcctggctcgatttcctgcagaaggagcgctggataggttggagatgatctacgaaacaagccggttctacttcgtccgctggaaggcggtgaaaacgcttctgcgcttggacctccaacgtggtgcaggagtgctgatgcgcgccaggtcggatgctcacccgcaagtgcgcgcggcggcagatcgcacaatccagagcttgcggcagcatggtcacatttga

SEQ ID NO: 530799 - DNA, 792 bp, Stenotrophomonas maltophilia
atggcatattcctgggatttggatagtgaagaatcgatcagccttgatgagctgatcgattttcttgacgagcaaggaggcaatgtcctcaatgacaaactagatgtagcggcgatgatgatgcgcaagttgtttaacaatcgcacatttttatctgagaccatcctgcgtcaattggcagacgagagaagcttcgactcaataaacccttacacgccgcaggtgtttatgctccaccgcgccgatcactacttcatccgtgccgctatctggacgccgcctacaggaatgacgggagatgagatcttcttctatgaggacccacatgatcacaactttgctctactaacccttgggtacgaggggcagggttatgaaacgttgctattcgaatacgaccgtcagagcgtgatcggcgacgtcggcgagtccgtggaggttcgctttcttgagcggacacgcttgtcgcgtggacgggtaatgttctaccgggatagtcgggacattcatgtccagttcccttctgaagatttctctatctccatcaatgtggtcgtccctaaaattcagatgaatcgacagtattcattcgagctggacctgtcgccggacacgacgtgcgcaaccattcgtgagaatcttatttttcacacgccgactgtcatcagtcggtttgctcatgacctcggcgtgcagaatgttccagagatcctgcggcgccatgtagctgccagtagcgatcagtgtgcccaacgtattgcagatgaatttctgcgcgcacttgaagtctag

SEQ ID NO: 530800 - DNA, 879 bp, Stenotrophomonas maltophilia
atggatgaagcagtctgggtccaagacctgcacaaggagtaccccggtcgggtaagggcgctggctggcgtgtcgctgcgggtgcttcaaggggagtcggtcgcgatcgtgggacccaatgggtcgggcaagaccacgttgttcaagaccatcgttggcctgatcgagcctacttctgggcaggtccgcttgcttggcgggccgctggtggggggcggccggcgcggactcgaccgtaccgggctgctgctggaaggtcggaccaacctctatgaccggttgagcacccaggaaaactacgagtacgcctgtcgcctgcgtggtaagcgggtggatcgaggctacgtccaagccttggctgtacgacttggactgcacgcattgcagcgaccggcacgccgcctatctaccggcaatagacagcgcgcttcgctgctgtgtgcactggcccaccgcccggacctgatcatgctggacgaacccacgttggggctggacgtggagagtatccaggccctgcagtccgtgctgaaggaagagcaggcgcgtggcgccagcgtgatcaccatttcccacgatgccgggtttgtcgcggcaacggccgagcgggtggtcggcatggaggcagggcggtggtcatttgagcgcgccggaacctttgccagcactgctgtcgagcgctacctcctcaccgtgcaggccatccatccattgcccgcatcggtgctggaagccctctcgcggaccgatacgtttgccgcccagcttagccagctgcaggccctggcacgaatctaccctgatctgtgccatgcaagcatcacgtcagtagatgctgtagcagaggctatcgctccacacaccaaggatctgcgatga

SEQ ID NO: 530801 - DNA, 765 bp, Stenotrophomonas maltophilia
atgaccctgctgcgcttctaccgtgcggaggtcctacttcatctccatcggcaacgccgctacgcgtttgaattggtcgtcagttcctgtgtcctgctggccgcattcgcgggcctggcctatggcatcgcttggctgcccactacggattttttgccgaagcagtcatcgctggctttaggcttcgtcctgtggagttttgccagcgcgtcgtacagcggcgtggccggagaggcagcggacgaggtgcgggggcggacgctggaacagctttgcgtggtggggcgtccactgactgtcatcctgcttgtgcggagcagtgtgcagattgcaggtgccttggcggggacgctggtcctgctgcatgtgacgttctggattgttggtcgtccgcttgacgtccccgtgcttccgctcatcacgatcctgctggtgtcggcgccctccttgctgggccttggtctgatcatgggcggcctgagcgtcctattcaaacaggctgaggcagtcaatgcgctgatgctgtttggagttatcgcgctggttggtttgccggcctaccccggcaacatgctggcgctgcttcccttcagtcatgctgccgcatggatcattgccgaacagggcgggcttatgctggatgacgaaggggcacggctgctgttcgttgctggcaatgcggcggtctatctggcggtgggcgtggccgtgttcaacgcctgctataggacggccaggcgacgcggaacgctgggtcacaactga

SEQ ID NO: 530802 - DNA, 336 bp, Stenotrophomonas maltophilia
atgaactggatgcatgcaaattcctgtgcgctgctggtcggggtttcgtccactgcaggcgcggcctcggccattgcctacgatgtagatggcgcctacggctactcgatgaaccaagcgacggtgagcgcgtcgatgcagaacgcggtgaagtactgtgcggcccgctcccgcaactgcgggcagtcggccgtccccacctgcgagggctactcggccatcttcaccggaacagtgtccttgggcttcgccctggcaaggccagtccggaagccgcgcagcgcaaggcagaaaagatgtgccgggaacgcgccaacgactgcacgctggcggtga

SEQ ID NO: 530803 - DNA, 246 bp, Stenotrophomonas maltophilia
atgccaaccaaggttggcatctaccaagaacggtacccggtagccgatgccgcagagcccatcggcgggccgcgtttagagctggatctgctggaaattctcgacccgctcatggctgttggcggcctggccggtgcgcggcagcgggtagtcatccaggcgatcaatcaggcgggtctgcaggccggcttcgcgggcagcatccagctcttctccgccgctttggtaggtgtcaaccttggttga

SEQ ID NO: 530804 - DNA, 3777 bp, Stenotrophomonas maltophilia
atgtcaaggatggcacgcgtgaacgctgaaaaactgcgcattgctgcagcggtgctgctgggtttagtcctcatcttccttggacaggtggcccaagcccaggcctggattgagctcaccgggccggcccagacctcctatgtggcgcctgcaacctttcagttgcagcttaagagtgggcgcacaggaagcggttccaaggcggagtatctgaggggtatagagctgacgcgaaatggtttggtgatctcccgcctccccaacgcgacagttaccgagaacggcttgtcggcagggacatatcaatatgtctacagcgccttggctgtgcgcaatatcaatggtgatgaggtcgtgcgagagctgaaatcgcctgtggtcaccatcaccgtgtcagcgccgccaacaccatttgatggtgcagaatatgtttcagccagttggccttcatcgggagatagaggggcaccgtttagcgggactgtcacattcagaaacacagggaatacgatctggcggtcgggtgacggttaccggcttgggcaggccgagcgctacgtttccagcgccgtcaggttgggcattgccgaagtcgctgttcctcatgacgtggctcccggtggcacggtgtcgttttctttcagtggcgttgcagctcctgagaacgggccaacgacggtccagtggcaaatgaatcgtaatggtgttcgctttggtagcaccagcagcgagcagacctttacgactacgggaaggctcaaccgcggcgtcatgtatgagcaggatgtcccgaccagcatggagacggggcacacctatcgggtcaagctgaagttcaccaatacgggtaacacaacgtggtcggcgtcggcgggttatgcattggggtcttggaatcccaatgacaacgtccggtggggcagggcgcgggttccaatgccgaatgacgtgatcccacagctgcctgcgatctttgaattcgatgtggttgctccttcattgccgggtgtctacagcttccaatggcgattgctggaagagggaaaagagtggtttggtcgggaaagtgacaatgtccaggtcaccgtcaacgggccgccgtccaaggtaatcggcaatatcgatggcgtcaccagcgacggtcagatccgaggatgggcgtgttcgacgggcattgattcgtcgatcgacattcatgtctacaccggtggagccgccggcagtggcgggacgatcttcctgaccggtaaggccgacttggcgagtgagccggccgtagctacgtcctgcaaggccggaggcaatcatcgcttctcgtttccaatgagcaacgagcagcgccgccagcgggctgggcaaccgatctatgtccatggaatttcccccgttggacaacccaacaacaccattggcggctcgggcgcctttgtggtccctgcggctccaagtggcacgctttccgcatctccagccatgtgccagattgcatcgggtgcccagacatgcaacatcacgttggcctggtcggcaacggactcacgcgcagagctaaagcgtgatcgtggctcggtggttggtagtggggccagcggctccattgttgtgccgatcagcgctggagtgaaccggttcactctctctgtgactggcgacgtgatagccagtgtgcttgccaccgcaaagggagctccaatagcacctgtcgacccagacaacccagccccaacggtcacccgtcgatatgtttacgacgacaaccttcggttgtgcaaggtgatagagccggaaactggttccgcagtgtttggctacgacgaggctggcaatcttgtctggagtgcgcagggactgaacctttcagacccttcccgctgtgatcgagaaacggcactgacctcatcacggcgagtagtgcattcgtatgacggattgaatcgcccaattcagacaagccaccctgatggtctcggtgacttgcgggtgcaatacaccgcggacggaaaagtaaaatctgaggttgctctcaatcaagatggggtccctgtcactaccacgcttgcgtacaactcgctgggacaggtaacaagtcacaccagaattgtcggaaccgccagcccgcgaacgctgacattcggctatgacagtttgggttatcaaacccgagtcggctatccaggaggttactctgtacagcagaccctaaatgcgttagggcagtcgacgaaactggaggatggaaacggcgcactgcttgccggatccattagctatacgccgagcggcaatgttgccagcatgctttacggcaatggcatcgcacgtagcgtacaggagaatgcccggcaacgagtgagcaagattagggacggagctgctcttgatttaggctacagctacgatggtgccggcaacatcgtagccattgaagacggcgtgcgcggagaggatggccgggtgtcgctagtctacgataggctggatcgtctcatacaggccaaggcatctgcctatggtgggactggtaattacagtttttcgtatgacactctggacaatatcattgcgatgcgcttgcccggcaagcgtgagcgcagctttcattatgatgggcgcaataggcttgagctgctgcgtgatccgcagggaagtggtgtttcaggtttcgcatatgacgttgcgggcaatctaactacccgaaacggggtcgcgtttaactttgatgtggcagggaggttgcgctccgccggcgcggcacagaagtacctttatgatggatccggttatcgggcggccgccgagggaagtgtcggaagtagttggcagtacatgcctgacggacaactgctggagtcaacgcgcgcagatcagacctcgcactatatctatctgggtaatagactgatcgcagtcagggcaagctcgcctagcggggcgaaggtcacctatcttcatcatgacgcgatgaatacgctggtcgcaacgagcgatgccagtggatcggtcatttcccgtcacttctggtccccctatggcgagccggatgctgctcccgatgcgtcaattccgggttactcagggcatctttctgatgctgaagttgggctgatctatatggggcagcgcttttacgacccacagttggcgcgattcatttcatctgatcctgatgctgtaaatctgaacgaagcctctaatttcaatcgttatcgttatgcaaacgataacccatttcgatacatggatcctgatggtaggcaggcgctgcctatgccactgcccattccacttccacctccggcaccgatcctgcccggtgatggcccggtggaaacaacaccacagacggtggaccttgccccggtcttagttcaagcggtgcaaaatagacagcaagagaagacctacgtgacgtacacgatgagcagaatggaaagcgtccgtaccatcacctatgttggtagagcaagcggatacggctctcctgagcaggttatgatgcagcgatacgcgcgacattggcttaggcggctggagggctacgtcaacccgaaactggacaaatccgggcgtgggcaaccgggcaggttggctattcgaggacgtgagcagcaaatgatcgattacaagggcgggattggtagcgaaaaggttggaaatttaatacgtggtgtagcgaaggccaatccagcggggccaatctatcatgaggcatcgaatgcgatgtttggtgagataaactcgtataccggctatcagctgattgattttggtgaatga

SEQ ID NO: 530805 - DNA, 1302 bp, Stenotrophomonas maltophilia
gtggacgctgtctatacaaagcagaaggaacgcatgcgactgaatcgcagcagctggcgttacgcgctcatgtccgccatcttcattggaatttccgcaataatgccgtgcgcctggtcgctggacctggatatcatggcggaattccgcccgaacgcactcaatccctcgcacgatcgcttcgtgaacacaacgccggaatcaggcctctgtgtcgtctgggcgagctactacaactgcaaggccaacggtgtcttttcgctggcgctgccaatcgatgtcagctttattgatatacctgcagatggtgatgcccggcaatcgttccatctgaaaattccatccaggaagagaacgctgaaggtctccaatggctcgcatgaatccgaagttgccattcgcattggaatcctggcgggtgatgccgtcttccccgcggatgtaagggagttggtcggcgcggatccctctagcggtgtctatgctgcacactatgcgctatgggacggcgactacggcctgttcctcgcgccagcaccctgccgaggtcgtggccctcttcttggcactgcattcagcgcgctgttcatatgggaattcgttgatgatggcagctgtacgaagcatgcgcgccacgcaattcccgggaaaatgagcataacgcgcggcctcagcttctcctatgagctggttacgccgaatccactgtccatgcagagtgggatttacagggggcgcctggacttggacatagggccgggtggagactttgacttcggtgacaacgcggtggtgtccgacaggctgctctctctgaacttcacgctgcatgtcgcccatgatttccaggtcaactttgctggtgagcagcttggcgtgcagttggtgccggagggaggctggtcgcaatggcgtggccacggtcggccaccccgatggttgcgccaggagcttccgttccaccttaccacgtcgatggatttcagcatgaagctgcgctgcgagttcgaggctggcgggcgatgcggtatccgcaacgccggcgctgacgttgtggttccagtggacctcgacgcgaccattccgggaatgagcaatctgcgagatggacgcccggcgcagtacacgctgctgtcgtccgacgatgcacaggcaccgcgcttcacaccggacgggtacttgatgcagcgtcgctccacgttgcgattcaccgcgggccgtgatgcagttacggagatgctgaagtcgcccggctcccattggcagggcaacatgacggtggtgtttgacgccaatccatag

SEQ ID NO: 530806 - DNA, 360 bp, Stenotrophomonas maltophilia
ttgaatccattggtacagtttttgctgagtctgctggcgggcgcgttcctctttctgttggctgtggggcacgactactggaagcgcctgcgttggctcttcggatgggatcccaatctgggccatgaatctgcagacaagctcatttccatcgccaacaggacggtgcttggtgacggccgccttgctgttggtctgggcggtgacaggcccatccccgtaccggaggaactgggagatggaggtttggggtttggcggccggcacgttgattgcgtatgtggcgctcatcctcagcgcatcgacgcgggcccgcgcctagatggcatggagctcgccggcatggaacgagccgaatag

SEQ ID NO: 530807 - DNA, 237 bp, Stenotrophomonas maltophilia
atgcgcagtgcccgccagatgcggcgcgcggtggccacgatccacagccagcgtccggcccagaccgccttcgcctacgcattggggcatcccggtgtggccagcggcatcctcggcaccacccgcatccgcagcctggacgaggtcttggcaacgcgcgtggaggcgctgagcccggcggaacggcaacagctggtcgatgccttcggtgatggccgtggttcgcccagtcagtga

SEQ ID NO: 530808 - DNA, 201 bp, Stenotrophomonas maltophilia
gtgcaactgctcaaccgcgatgcagcacccgacgcggacagctactacgcgcgcgttgccgcccacccgctggcactcaaagtgaagcgcgccgatctggatgacaacgccgatccacagcggctggcgatgctggacggaaccacggcagggcgccttcgcgacaaatacgctcatgtccgggcggcgctgggcatctga

SEQ ID NO: 530809 - DNA, 714 bp, Stenotrophomonas maltophilia
ttgccccttggtacagttaccattgctgacgtgatgggccaggaagaaccaagaaagtacgagttgatggagaagctgtgttggtgggcccttgcgctcagctgcttttccatctgcatattgactgcacggcgcaatgctcatcgctcaattgacgggcgttggcatgccagcttcattgatatgaatggacgccgaaaccttctattcatctacatccggagttccatgatgattcgaccgctggttgccgtcgggatgctcgttttttccgtcaatgcgcatgcgactcctttgggatatgacaagcaagccgaagtttcccttattgatgggcggcctgcgatctgccttccgaaaaaggcccgatcacctttccccataggctgggcaacgttgtctgaagccagtgatcagaacgatggggtctggagcattgaactgaaggatggtgctgcaccattgatgctgaaacccggtgactgcttctcatatgggcgtgtgcccagctcatacgctgtcgaacccttgagaggaaaggagagagtgttggaactgcggccaggcttggcgtacgtgttcaggctgaattcttctgtgcactcagcagaggcctattcggtgttgttctgcactggccggaagcagacggaaggtcgcgaaattgaatctatcaagaaggtagacgacaggacgaggcagtcctcatgctga

SEQ ID NO: 530810 - DNA, 300 bp, Stenotrophomonas maltophilia
ttgtttgactcagtgttcttttccctggtaccgctcctggctctaatagtcgcgatattcatcccgttgcatcagattcggaaaccgcagtccccaatactgctgagccgtcgcctacgccgcttttatcaatggcagggcaagcagaagggttggactgcactggactacgaccaggtggtgcccttcgttacccgcctgaccgtggtcagcaccgccggcaccagcacctcgttcttcctggatgtcggtgtgttcgagcctggcacccgtatcagaggtaccgctacaggcttttaa

SEQ ID NO: 530811 - DNA, 942 bp, Stenotrophomonas maltophilia
atgcccacccagtccgatttgcgcttcaccttcgtcgtcggcgatgtcgacttcgacgtcgtcgagttcaccctcgaagagggcctgtccgagacctaccgcctggacctggcgctgagcagcttcgaccccgccatcgacttcggccaggtctcatccacggcgccatcgacggcggcccggtgcgctacaaccccacccccggcggcgatgcgcccgcgccccccaggtccgtggtacctgccgcatttcggtccggagcgctatcttaaacacatcgaccaggcggcgtggcaggaagcactgcaggaaagcgcccggcatacagagctgaaacagcaggaactcgacaccagtaccgacttctgcacggtcatccagtccacgtcctggaaacagcaacaacgcaccgacttctcgccccatccagcctctgccctcggccacgaagacatggtggccagttgcatggccggctctggcgtcaccgagcaggagcagcaacaactctgggacccggtgctgaatctttcggatgatgacccggacaactggctggcacgcgcgctcggcagcttggatacctcttacgcggcgcacttgaaacagacgcccgccgagcaggatgacgcctacgtcgccgcgaaagaggctgtcaatctcacccggaccttcctggccaacggcgagaagaggatacgggaaattcgcgccaacatccgaacccagcgcgccgccaatgccaacaccgccacgctcattgaaaccagcgcgggccacctgttccgactacgcggcaagaacccccaaggcttatcgcaagttgatacgtcaggtcacgcttgccctcatcacccgcgccgacctcgtccctacccctacattggtacgcggcaccgtgcagcaaacgacacaaatgtggatggccgtgctgcacggtga

SEQ ID NO: 530812 - DNA, 867 bp, Stenotrophomonas maltophilia
atgctcttttttgtcgcactgcccttcgtcctaaaaatgctaggagatatcgacagactaggggcttggcttgcagttgtcggcgttctgcagttggtcgttggactgagctttgctcttggagtgccgcttcgaatgcttcgcaagccgcgctctcctatattgctgagtcgacggttacgacgcttctaccactggcaaaacaagaagaagggctgggtggcgctgagttatgacgacgtggtgccctatgccatgcgcgtgacctcagtcagccaagccggtacagctacgtcgtatttcctgcacgtggggcttttgaagcctggcacgcggaaagtcatccagtccatccgcctcagcgacccatcccgcggaagcatcctgccgcttgcggagctgtgggagtttttacgggcctatatggacggccccgcctcccaggtaccagccattggataccgtatccccgaggggcagcagcgtggcatccatgctcgtatggaccgcgacatgctggccgacttgcttgatgaccaacatcgccttcagcccggtttgttttcgaaaatctatttcgccatgcagactatgacgttgtactggtcgggccgtcttctgccctggctggagcgtaagcgtccacagccaccactgccaccggaactggccgaagccatgcagtgggaaggcaagaatccttatcgcatcatccctcccatggacatcgagcagaaagccatcgacggccaactgccctacatgaatcgccggtggttcgtcggcatgctgctgtccacgttgttctggggcggcagctttctgtggatgtccacgctcggttggcgtgacctgctggggccgtga

SEQ ID NO: 530813 - DNA, 855 bp, Stenotrophomonas maltophilia
atgctggaccgggagacgtcatggcggcagggagatttgctgaccagcgatggatcgctgcaactgggattggtcgagtcactggaggatggccgcttcgctgtcgtgatctcccacgactgtgacattcctcacccgcacgaaccctgtattgaggtcatcgtggcggacttgatcggcgatgcccgtgaggatccgcaactgtcccatgccaagaacccccggcggctgcatcttgcgtatgacaaggcggatggaggatcgatggtgctggagttgcggcatgcggagaaaaggtccatcccgagagtcgagtttggccggggcgcgtctcggtttcttgaagcgtcgctttcggatgaatcgaagcgcaccctgaagcaatggctggcggcacgctatggccggcccgcgttccccaacgccttcgagaaccggcttgcgaagcgtgtcggcaagagagacgtcaagagccggatcgcccgcatcctcgctcccgaagcccgacatctggtgggattgttcttcgatctgggtgagcagcgaggcatcgaggcttctgatggtgaaccctatgcgctgtccatatcggtggcctatgacgccatcgagggtgggccaggcgcgcgtgagtccgccgaaagcgtagtgcaacaattgcgagcgcttttcatcgaagcgtacggccctcccgatgcggcaacggaaatcgccctcgacgcctgcgagccagtcccggatacgcacatgaccctcgccgatcttcggcgcgtggatcaatggcgacttgagtacctcagcctgcatgacgatgaacatggtggcttcctgccggacggcgttgcccctgcgtga

SEQ ID NO: 530814 - DNA, 645 bp, Stenotrophomonas maltophilia
atgtacaccgagacattcccgacaatcaggacttcgccgtcgatcgtacccgttcgagtcgcggccacggctgccttcgccctgatggggatcacgcagttggttggcggtactggcagcgtgttcgatgtgacccgggcgggggaatggcgcaggctggtggaggcgcggactcccattcacgtcgaaatcgaggtggatggcgaggaggcagttcgtcccgatctgcgaagcgcttcggagcatctggccaacatccgtgaggtgctcaatccagcaatcgctgatctcgccgggacctttggtgtttcccggcaagcgatctacaaatggctggggggggagtcgacgccagaagcggacaacttcgctcggatacaggcactcagccaagtggccgacgcctttcgcgaagcaggcgtcaaacgggcgccaatgatgctgaagatgaaggcgtttgacggcaggtctctcctggatctcatcgctgcaaaccagactgtcatggagcatgtccaaacgctgatttcagaggctcaggccatggatgcggcatacgaaaggtcgggactggccaagagcaaggccgcgccaacggatgattggcgttccgctgcttccattcctggctatcccgagcagtga

SEQ ID NO: 530815 - DNA, 789 bp, Stenotrophomonas maltophilia
atgtccaatgcgccggtgtactacgcgctggcacaggcgcatttcaatccggtggcggccatggtcaagtatgtcgaccaaatacaagatcgactgcgtcgtgaagggtatcccttgttcgagccgcagcaggtcactcacttggtcgtgtccgggccaggccaagcacaacaagccgaaccaaagatccagcaaacggtatcctggctcctgaccaggagtgatcgatctgcgggcttcatcctgtccccttcgacaatcacgtttcatacgacgcattacgacacccacaagacattcattccggaattactgcgtgggttggatgccgtgcatgatgcggtcagccttgaccacgtggggcggcttgggttgcgctatctggatgcggtggtgccatcagacggagagtccgttgaacagtaccttgtcggtggcgtccatggggtgggattcgacgcggttcgccgacacgcaatgagtgagtccgtgttttcaaccgatgttggtccactcgttcccgtcggaaccttggttgcaagggtatacagagcaacggcgcagcttggtttccctcccgatatgctgccgaacgggctggcactgaatccgcgtttcgccatgtccacgccacgtgagcatggtgtgctcgataccgaccatttctgcgaaggtcgcatgcctatcgatctcggcaagctcgaagaacaactgcgctcgctgcatgtcccaatcaagtccgtgttcaaggcgaccaccacggatcacgcgcgccgggcatgggcgtaa

SEQ ID NO: 530816 - DNA, 300 bp, Stenotrophomonas maltophilia
atggccgcacagacttcgatgctgcatatccgagtggacgacaagctcaaggccgatgccgccgagaagctcgccggggtcggcctcacggtttcggatgccgtgcgcatcctgctgacccgcgtggtcaaggaaggcgcgctgccggctggcctcacggccgacccggaggcctacgatgcttggttccgggcgaaggtccaggaggcgctggccgacacacggccgccggtgccgcaccagcaggtcatggacgaggcgcaggccctgatcgacaggaagcggcgtgcgcgtacttga

SEQ ID NO: 530817 - DNA, 288 bp, Stenotrophomonas maltophilia
gtgcgcgtacttgagtggcggcaagctgcccgcgccgacctgctggcgattgttgactacatctcggacgacaaccccgatgccgcgcagcggttgaaggacgatatcgaggccaaggccgcaaagctgccggagcgcccgaagctctaccggcctggccgcgtggccggcacgcgggagatggtcgtgcgtgcgaactacgtggtggtctacatggaggacacccgcgcggtgtccatcctgcgcgtgttgcacgccgcgcagcagtggccgccggcacgggagtga

SEQ ID NO: 530818 - DNA, 192 bp, Stenotrophomonas maltophilia
atgaatgccaaggagcctgacgcagccaaactcaaggcgctgcaggaagcagcttgcatgggctgggccgacatcgccgtcggccgccatgccgatgtcgccgacggccaactcgaaggtttcattgcacagttgggacagcaagcggcgcttgccgtcgctacccgccgcgaggctatccccaggggatag

SEQ ID NO: 530819 - DNA, 189 bp, Stenotrophomonas maltophilia
atggatacccaagccatccgcgcacagatgccgaagctcgttgtcggtcatgtgccttccaacgtccgttcgttcaagttcaacatcttcgacggtcagcccaagatttcgacgctggcctgcgacatcgcagcgtattccaaccattggcgaagtgacagcgcagaagctgatgcagaagttcggtga

SEQ ID NO: 530820 - DNA, 750 bp, Stenotrophomonas maltophilia
gtgaaagagcccgccgcgaccgccgagcgacagcaggcacgccaacgcggactggtcgccagcgtggtcacgctgccatggcgcctgttcggcgtgctggtcgcctcgctgctgctgtccatcgtcatcgaatgcgttggtatgcacctgttctggcccgatcagggctggcgccacgcgcagggcatgctcgactacgaactgaaccagctctccacccatttcacccggagcgccgttgtgcaggagccgggacgcaccgcgcgctggctggtggagggcacctacgagtgggttttcgtggagacgggcttgttggactggatgcgcgacgcctcggcgcaggctagcgccggcagccatcgcccgaccaaggctttccgctattacattggcctggtctacgtgaacgtggagagctacctgatcgcggcggcttatacgacgctgatcttcctcgtgcggctgctggtgctgtgcctgaccctgccgctgttcctgatgaccgcgttcgtcgggctggtggatggtctggtgcgccgggacatccgccgcttcggcgcggggcgcgagtccgggttcgtttatcaccgcgccagggccagcctgatcccgctggcggtactcccgtgggtgacctacctggcgctaccggtcagcatgaacccgctgctgatcctgctgcccagcgccgcactgctcggcgtggcggtgtgcattgcggcggcgacattcaagaagtacctgtaa

SEQ ID NO: 530821 - DNA, 870 bp, Stenotrophomonas maltophilia
atggacgaggcggatgtcaggcagagagcgcgcgcgtttgtcgcgagagtcgatgtttcgaacatccgagaagacctgtccccgtatgtgaacgcggctaacgccaaggtcaagaaggatgagcttggcgatggggagtccggctataccgttaccaagccgaacgggaagcacatcatcacggtgaattcgctggaaaccgaagagcgccagcgcttcactgtctgccacgaaatagctcatatcgtgctcgacttggaatcaagtcacgacgaggtgccgtcatggtcctatgcaaagcgacatccgaacgagatcgcctgcgacacgtttgccgctgaactgctgatgccctatcagcaatggctctccgctgttcccaaggaagagccctccctggatctcatccaacacatggccgacttgttcggcacatcattccctgcagcggcgtcaaggtttgccagtcttagtgacatgccgtgcgcattcgtcaccatggagcgcggtgcggtgcgatatgccgcacgctcaacggccttgcggcaagctggggcctggatacctcccaggtcggtcattccagcaggctccgtagctcaccgaatccgctcttcagggaatagcgctactgagacggggggagtttcacaggatgtctggttcgacaactgggagaagggccttgatctatgggaactttcaagacattaccagcgcaccgataccaccatctccttgctatggttcgacggcgacgatttgccggaggttgaggtaaaccgcttcggcacacgtgtcgaagacgatggaggcttggctgaattgacgggagagctgccatggccggggcgaagcaggcgccgctga

SEQ ID NO: 530822 - DNA, 288 bp, Stenotrophomonas maltophilia
atgctgaacttgagcccactcttcttcaccacccttgatgacgaatcctgcatgcacgacgagctggatctgacgcctgggcagcgcgcctggatcgccagcgcacgcactgacgtcagggactgcctgcgcacaggcatcccccgcgtgcttagggcaaacggatacacggaagacgtgccgcagccgcgcttcttcacgcaagggtcgtgggcatacaagacgctgaacgcctttcacaacaccctcagcaggcggatgtcgacgatggctgctatctgccaatga

SEQ ID NO: 530823 - DNA, 1632 bp, Stenotrophomonas maltophilia
atgagcagcgccgcagcggtcgcagacgtgatcgaggccttcaagcagcgaggcttcgcgtttgttggcaagacggatgacggctggttcaggctgcacggacggttgacctcgccccaagcggacaagggttgtccgtgcgaagtccagctcgaccccacgttcttcgacttgcctcgcatccggctgctggaaatccctcctgagctgcccgcagcggttcctcatcttggcgcagatggcgggctttgctatctcgccaaggggaccgtcgttctggacatctacgatcctgtcggacagtcgctggcgtgcctgcaacgcgcggccgtcgtgttcgggcagatcatgcagggggagatgatcgaagacctcgcggaagagttcttcgcctattggcacggctggcattgtttcgtggacatgcaaggcgaggatctagggcgacagaactgcatcgtcgcgcatgccaatgggtaccccttgtggttcatcaccgacaacgaagatcgaacaactgagaagctgaagtcgctcggctaccaggtcaccgatagaacggtgctgacttaccgagtaaagaccggtgctcaaccgcgccctctgactagcaattggcctcctgaaacagtcggagatatcctggcgtggcagagcactcttgatccccggtgccggcgcaagattcacgagcgtatcaaggagggggagaggaagaaggccaacggagttctgatcgtcatcgagtctccgctgatgacctatggctttgcggttctctacgaccgccaaagtcttgtccaaaagagcaagctcatagatcgcagggattcgagctatgggttgaaggtgatgcccatctcggtggtcagaattgacgatcggtaccttgcccagcggaacatgccgaactcaaagacgcttgcagggaagaacatcgccgtcgttggatgcggcacgattggtggctatctgtcggacatgcttgtcaaggctggggcggggacatgtggcggaaaactcacgttggtggatttcgattgccttctcccgcaaaacatcgggcgccatcgcctcggattcccggacctgctgtcgaacaaggcggaggctatggcgaaggaactcaagcgcttggcgccaggcgccgagattcgcgcgctgcccgtggatgtcaggcatgcccaactgggagagctggacctgctcatagatgccaccggggaagaatctctcgggcattggctgtgcggccactatccgcctccgacgcccatgctttcggtctggatcgaggggccgggaacggctgtccgtgcgctcctgaggacgaaagcatctgatgcgtgctatcgatgtctttggcatagcaacagaagaggcgagttccgttctatcactgatcctcttcctgccattctggcggggcatggatgcgaaggcttgtacgtgccattccccgcttcggtgtcggtgcacgctgccagcctgggcgctgagatgaccctcgattgggtcaacggcgtttatacccccgcgttacgaaccaggttgatcgaccgcgcccagcagcttgccacacccgattgcaatcctccgcgggatcgggagtgccccttatgcaattcatga

SEQ ID NO: 530824 - DNA, 2073 bp, Stenotrophomonas maltophilia
atggagcagaccgacgaagagttcttccacgacttccgacaggaacttttggcgggcgccgaagccaatggcagcttccagctctccgaattcatggaggccatcgcaaacgaccttgtcgagacaggcttcacggaagggttcgaactctgccatttccgggcgcagcgtggtatgcgcgtggacggctactggttcaatgacgaaggagttctggacctcttcatcgcggacttcgactcccgaaacgagctggcatcgctcaccagaacggaagtggccgcggcattcaagcgtgttgccaacttcttcgaggccagcgccaacaagggcctggccggcgaacttgaggtcacatcgccggagtacggccttgccaggcagattgcggatcgcaaggacgccattcggcaggtcaacctggttctcttctccgagcgcacgctcagcgagaaaatccaggcccttcccgatacggaagtggcaggtgttccggttgctcaccacatctgggacatctcacgacttcatcgtcagcgaagctcccgcagccacaaggagccactcgacctcgacttcgagcagatgttcggcaagggcatcgcctgccttcccgcacacctggggaccgatgcctatcaatcctatctcatggtcatgcctgccgaggtgctggcgaccctgtacgaaagattcggagcgcgtttgcttgagcagaacgtccgtacgttcctgcaggcgcgcggcaatgtgaaccagggaataagggcgacgatcctgaacgaacctgggatgttctttgcctacaacaacgggattacggctactgcacagagtgtcgagacagggatgacggattccggtctggcgatcacgagggttgtcgatctccagatcgtcaatggtggccagaccacggcatcgctgttccacacacggaagcgggacaaggccgatctttcccagatattcgtccagttgaagctgtccgtcattgacagcctgcagagcgaaacggtcgttccaaggatatcggagtatgcgaacacccagaatcgggtgaatgccgccgacttcttctcgaaccacccgttccatgtgcggatggaagggttttcccgacggatctgggcacccgcgcagaagggcgccccgcgcgagacgagatggttctatgagcgcgcgcgcggccagtatgccgatgcacagtccaagctcacacccgcggagcagcgtcgcttcaaggcggagcatcccaagccacagatgttcacgaagacggacctcgcgaagttcgagaatgtctgggatgaccatcccaggtgggtgaatcttggctcccagaagaactttgcgcgctacgccgcccgaatcggcagcgagtgggagaaatcatccgacgcgttcaacgagttctatttcaagagggctgtcgcacgtggtctgatcttccgcgccacggagcgcatcgtttctgcgcagccctggtacaacggcgggtaccgagcaaacatcgtggcctacacgctggcggtactcggtgacatcacgaagcgcaggaaggagagcatcgactttctgggcatctggaatgcacagaaggtcgatccggtgctcgaaagtgccatcgctgtcgtgtcgggggtcgtgaacgacgacatcatcagaccaccgcaaggcatttccaacatttccgagtggtgcaagaaggaggcgtgctggacgaggatacaggctcgtaccgacgccattgccaatctcctcccgcccgagttctacgatcgacttgttccgcaagatgatcaggcagcgatcgtgaagactgcgaagcagacgcagaggatcgacaacggcatcgaggcgcagcgaaaagtgctggctgttcccgctgcggaatgggctcgcatccatcagtcgctgcttgagaaagatctgctcaccctgaaggaagacggcgtgctcagggtggccatgcagattccctccaagctcccgacagaaaagcagagtgtggtgttgctggatattctggagaaagggcgtctcgaaggcgtggttgtgagcgagccctga

SEQ ID NO: 530825 - DNA, 966 bp, Stenotrophomonas maltophilia
atgcctgagtcctctccgtgggatgacatcgccgttccgggagcggacttcaatgtccgccaggttgcggcgggaacggccgtgccctgtttctggggacgcgatgccagtggcgcctgcctgttcatcgtggagcttcagggcgaccacgcagcccagtaccggatgaacgcggtcacggtgaacggcatcgatgtcgatcttcgtgccggagatcaggggcagcagcacttggtcctcgctcttgaaaggcaggtcgaccgcgatctcttcgaaggactgtgccgcacccttgcatcctcgctggagcacgccaccgactcggcgagttctctcgcggtctctctggcacacatccgccgttggaagaccttcctgtcaggccggagtcagcacctgtccatcgaggaagtccgcggtctcttcgccgaaatcgtctttctgacggaactgatcgatcggcagatgtcgagcagtgacgccgtcgaggcctggctcggtccggaacgatcacatcaggatttcatctttggcaacacagccgtcgaggtcaaatcgctctctggcgcagagcggagcagcgtccgcatttcatcggaagaccagctcgaatccctgaacgatgcgctgttcctgcgcgtgtaccggctgagcagtctgaccgacgcggcaggagctcgatcgctcaacgagatcgtcactgcagtccaggcacggctcggcgaggcggacgccgtcgaggcctttgaccggaagctggttgcgcacggctatgcgccgctccctgactacgatgagcctcgctttgtcgtcagcgacgtgcgcagctatcgtgttggtgacggatttccgcgtctgatgcggtcgcaactgccgccagggattgacaacgtggcctacgacatcaggctggaaacgattgctccgtacaagtgtgacgaagcatccatcttcggggaggattga

SEQ ID NO: 530826 - DNA, 2661 bp, Stenotrophomonas maltophilia
atgagcctcacagtcatcacggaagaacggaacatcgccaacgcgctcatctcgggccttgccaacatggccgagacgccgacgcgcgagcaggtggaggagaaggcgagacagatcgccgcgatcttcggctatatgggtgatctccgcaatatcgtcaccgaggcgatgatctcggtcgacacgcgcatgggcgccggtgtttcgctggtggatgtcactgcgaagcatgatgatcagtgggtccacaagcgtgaggatgtcgcctggacctatgcggaatcctatggaaactttcttctcaaggaaggttggccaccgcagatggtccagtcgctgagcgatgtgacgacccgcattctcggccacctgcaggacccgttgagcgagggcacaacttggaaccgtcgcggacttgtcatcggtcatgtgcagtcgggcaagacggccaactacaccggcctgatagcacgcgccgccgacgctggctacaagttcatcatcgtcgtcgccggcattcacaacaatctgcgcaagcagacacagcagcgcatcgatgaggctttcatcggccgatccagcgatcccgaggatcgtcgtaacatcggtgtcggcctcgcgccgggctatccgcatccggccaccctcaccaacatcaacgaggacttcaacaagaacacggcggaaaagagcggctggaagatcaacgacttcagcaagccgatcattctggtcatcaagaagaacgtcacgacgctcacggctcttcacaagtggctgaaggagctgaacgccgagggcgatggccggatttccgacgtgccgatgctgctgattgacgacgaggccgacaacgcgtcgatcaacacgaacaaggaggatctggatccgacccgaacgaatgcgatgatccggcgcatcctcgggctgttcgcgaaatcgtgctatgtcggctacacggcgacaccgttcgccaacatcttcatcaaccccgacgcctatggcgatgatgtgcgtgaggagctgttcccgcgcgacttcatctattgcctggacgcgccaacgacgtacttcggtgccgagaaggttttcctcgacgaggcgaccagtcaatcgatcgtgaggccgatcgacgattgcgaggatctcatcccgtacgcccacaagcgtgacgatcccgtccacgagttgccccccagcctctatcgcgcactcgacgaattcatcgtcgcccgcgccatccggaacctgcgtgggcagaccagcaagcattgctcaatgatggtcaatgtgtcgcgcttcgtgcccgttcagaaggccgtgcgtgacttcctgagtctcagggagaagaagatcagggaagcggttctcgccaactacgcgatgccggaagaggtttcctcaagaaacgcgtacatgcagggcctgaagcatgccttcgatgccgagtatgccgatgctggatttacctgggcggaagtgaagactgccctcagcggcgtcttcgagcacctccacctctatgtcatcaacagcaagagtgacgaggtgctcgactacgcccgctacgcgaaggaaggagtcgggttgaccgcggtcgcggtcggtggtctgagcctctcccgaggcctgaccatcgaggggttgaccgtcagctacatgtaccgcaatacgaagatgtacgacaccctcatgcagatgggccgctggttcggctaccggccgggcttcgaggacctctgccgcgtccatctctcgcgcgactcgatcaactggtactcccacatcgccgatgccgccgaagagcttgtacagcaggtcaagcgcatgcggcgcgatcgcctcagcccgaaggattttggcctgtacgtccgctcgcatccggacagcctgctgatcacggcggcgaacaagatgcgatcgggccaggaggtcacggtcgagcagagtttcagtgggcgactgcgggagagctacattgtctccaccgaccccgacgtgaatgccaggaaccttgcgctgatcgccgatcactggcggagtggattcggcggacgaccggaggagtccaccgaaaagggcgtcatcttcagggacgtgcccgtcgaggtgatcgacgacttcctcacccggttcgaatgccattcgacctttgccggacagaagtcggacgtggtgagctatctcgaacggattgcgacaaagcgcccgctggccgatgttctgctgatttccccttcgagtggctcaggcggtgaaaacccgttcaccctgaggaatcaggtgcgcgtcgtcgggaaggatcagccgaacggcacttcgtggcgcctgaacaaggacagggttgcctcgcgtggcgacgagaagcttgggctcagcgacgcacaacgcaatgaggccaggacgctggctggcggcgaagatggctcaggagcggtatccgacacacattaccgtatggtccggaacaagccgctcctcatgattcacagcctagagcccaagggcgaggccgtgacgggaccgatcgccgccttcggcgtcagttttccctatggggactattcgacgaccatcaatgtcgtcgtgaacaaggtctggctccagcagatgcagggttacgccgacgatcctgacgaggaggatgactacgatgcctga

SEQ ID NO: 530827 - DNA, 1620 bp, Stenotrophomonas maltophilia
gtgccagttcccataattgatctttttgctggcccaggagggctcggggaaggatttgcttccctgcagggccacaagcggcagccattcttcgagatcgccctttccattgaaaaggatgctgtcgcacatcgcacgctgacgctcagggcagtgttcaggcgtttgcgtggcaccaaggacgtcaagcactactacagctacatacggggcgagatcgatgaggccgctttccgcaggatccctgccgtggccagcgccttcgagcatgctgccgccgaggcgaggtgcctggagcttggcaagtccgacgaagccagtatcgacagggaaattcgtgctgcactgaaggggcaggaaacctgggtactgatcggcggcccgccctgccaagcgtattcgctggcggggcgctccagacgcgccaacgacaaggactttcacaaggatgaaaagcacttcctctacagggagtacctgagaatcatccaggtgcacaagcccaccatcttcgtgatggagaatgtcaagggtctgctttcctcaaagcactccggcgacccgatgttcgagaagatcattacggatctttcgctgccgaccgaggggctcgaatatgagatccgatccttcaccaagaagggcgacggcagttcgctggaacccaccgactaccttatccattctgagcgccatgggatcccgcaaagcaggcatcgcgtgattctgctcggcgtgagaaaggggctggacatgcctcaacaccagttgctggcaccagtagcaaggcctgtcacggtcaaacaggccattgacgatcttccccgaatccgcagcaagctgtcgcgtggcgattcagtggaggcatggcgcaaggctgttcaggctgccccctcttacgtcaagggatggaggacagaaaacgagtccgtcatgatcgggacaatgcgtgcctttgccgcagcggcaaccagcaccacgaccggtggcgccttcattccacgaggctatagaaggccgaagaagccgaccgagcttcagcaatggcttcacgaccgaagcctgggtggtgtctgtcagcatgaagcgcgcgcgcacatggcatccgatcttgctcgctatcttttctcggccagcttcgctcatttatggggatattgcccacggctggatgtgttccctcccaagctgcttcccgatcacatcaatgtgcatgtcgatcgggaatccgaagcgatcccgttcaaggatcggttccgcgtgcagtgcaggaacgaaccgtccaccacggtggtggctcacattgccaaggacgggcactactacatccactacgacccctcccaatgcagaagtctcacggtcagggaagcagcacggctccagacgtttcccgacaactacgtcttcgcgggcaaccgcacggagcagtacacccaggtcggcaatgcggtgcctccgttgcttgcccacaaactggccaagatcgttcgtagtcttctgaacgagatgagcaggagaaggcggaggcaggctagtgatgccgtacagaagaggccggcgggaagcgtgccgcgaaacctgccagaacagcgtccggtgcttgccgaagcgggctag

SEQ ID NO: 530828 - DNA, 366 bp, Stenotrophomonas maltophilia
atgggacagaccaaccgccgcaaatccgcatggcctgcgcttgccatggtgttggctgtgtcgttttcggcgctgcagcctgccgtcgccgccgacagcctcgccttggagcgtgagcagctcgccgcgctcgcccgccaactcgacctgatcgaccgcctcgccgagcacgccgccaataccgctccgcaggaacgcgcccgctaccacttcgaccatgcccgcctgcgcgatgacctccagcgcgttcgggcgggcatccaggactacctgacgccgccgcgcgcccagccgcgcgattcggtcgagctgtccggcgactaccgccagtccagcccgccctccgaacaggaggcaccccaatga

SEQ ID NO: 530829 - DNA, 1653 bp, Stenotrophomonas maltophilia
atgaggcttgatatgaaaacgttactcgcacttcgtcgcagggccgcagggctggtttcgcttgcgttcgccgcgggtctggccggatgttccctggccccggtgtatcaacgcccggaagttccggttgcggcggtttatcccagtggagccacccaggccgctgaagtcgcctttccggccggggaaacggctgcggccgacatcggctggcgtgacttcttccgtgacccgctcctgcagcaattgatcgccatcgcattggataacaatcgtgatctgcgcaaggctgcgctcaatgtggaagcggcccaggcgctgtaccgcatccggcgcgccgacatgctgccgaacctgggtgcggtcgccagttcggcagtcgagcgtgttccggctgatctgagtacggcgggtgtcacccggatcaatcggcgccacgaggcagcgggtgttgcgtctgcctgggaactggatctgtgggggcgcattcgctcgctcagcgaccgggcgctggcatcctatctggccttggccgaaacccgcatcgccacgcagatgactctggtggccgaagtggccaatgcctatctgtcgctgtgcgccgatcaggcactgctgcatctgacggccgataccctggagacgcagcggcgctcctacgagctgaccgtccagcgagagggcgccggcgccgcgacccggctggatctgcgccgggcggaaatcacgctgcgcaacgcagaagcccagcatgcggtctacacccggcagacggccttggatcgcaatgccctggtgctgctgttgggacagccattgacgcgggaacttgccgcgcagctggacgcagccgctactctgccggatgacgtcgtgcccgcgacgatccccagcgggctgccgtcagacctgcttgcgcgtcgacctgacatccgcgccgccgaacagacactgcttggcgcgaatgccgatatcggcgctgcgcgtgcggcgttctttcccaccatcagcctgacgggttcggccgggacggccagcgcagacttggacaacctattcaacgctggctcgggagtctggagctttctgccgaggatcactctgcctttgttccggggaggcgccttgcgggtcaacctggatctggcgcatgtgcaaaagcgcatcgaagtcgccaattatgaacatgccatccagaccgccttccgtgaagtggccgatggactggcaaggaaaggcacgcttgacgcgcagatccaatcggaagaactgtcggtgcaagccggtctcagcgcctacgaactggccgagcaacgttaccaggaaggcatggacgactatctggccctgcttgacgcccaccgcacgctgtacggagcgcagcaggcgctggtccgtacgcgtctggcgcggctgaccaatcgggtcgacctgtacaaggcgctgggtggcggctggtcggagcatgggatccgtacacaggcacgcaactcatgccttaagtccgaatcgcttgccagcaacggcgcagggcatgtcctgtgccacgctgatcctggccgttcgtcctcacgcccgttccaggatgcgcggtccgggtccctgctctccgaacgcgtcctggggattgcgcaaggggcactggtccagtga

SEQ ID NO: 530830 - DNA, 3189 bp, Stenotrophomonas maltophilia
atgaagtttccccactttttcattgcgcggccgatcttcgccatcgtgctgtccctgttgatgctgctggcgggtgccatcgccttctggcagctgccgctgagcgaatacccagccgtcaccccacccacggtgcaggtcaccgcgagctacccgggcgccaatcccgaggtgatcgccgataccgtggccgcgccgttggagcaggcgatcaacggcgtcgaaggcatgctgtacatgaattcgcagatggccaccgacggtcgcatggcgctgaccatcgcgttcaagcagggaacggaccccgacatggcgcagatccaggtgcagaaccgggtctcgcgcgcgctgccgaggctgcccgaggaagtgcagcgcattggtgtcgtcacgcagaagacctcgcccgacgtgctgatggtggtgcacatcgtttcgccgcaaaaacggtatgacgcgctctacctgtcgaactttgccatccgccaggtacgcgacgaactggctcgtctgcccggtgtcggcgatgtcctggtctggggcgcgggcgagtattccatgcgcgtctggctggatccgtccaaggttgccacgcgcggcctgaccgccagcgatgtggttgctgcgctgcgcgagcagaacgtgcaggtcgccgccggatcggtggggcagcagccggatgcgtcggccgctttccaggtgacggtcaacatgctggggcgcctgaccagcgcggaacagttcggcgagatcgtcctcaagaccggcgcggacgggcaggtcacgcgcctgcgcgacgtggcccgcgtgtccctgggcgccgacgcctatgccctgcgcagtctgatcgacggtgaaccggccacggcactgcagatcatccagagcccaggcgccaacgccatcgatgtctccaatgccgtgcgcgccaagatgcgggagttgcagcaggacttcccgcaggacatctcccatcgcatcgcttacgaccccacggtgttcgtgcgcgcctcgctgaaatcggtggccgtcacgctgctggaagccattgtgctggtcgtcatcgtggtcgtattgttcctgcagacttggcgcgcatccatcatcccgctcgtcgcggttccggtgtcactggtcggcaccttcgcggtgatgcatctgttcggcttttcgctgaacacactgtccctgttcggcctggtgctgtcgatcggcatcgtggtggacgacgccatcgtggtggtcgaaaacgtggaacgccacatggccctgggcgagccgcccgggcgggctgcgcgcaaggccatggacgaggtgaccgggcctatcctggccatcacctcggtgctggcggcggttttcatcccgtccgccttcctgtccggtctgcagggcgagttctatcggcagtttgccctgaccatcgccatctcgaccatcctgtcggccatcaattcgctcaccctgtcgcccgcgctggctgccatcctgctcaagccgcatcacggcacgatgcaggccgactggctgacacgtgccattgaagccgcgctcggtgggttcttccatcgtttcaaccgtttcttcgagcgtgcttcgggtgcctatgtgggcgccgtgcgccgggccgtgcgtggcagcgccgtcgtgctgttgctgtatgccggcttcgtcggcctgacctggctgggcttccacaaggtgcccaacggtttcgtgccggcccaggacaagtacttcctggtcggcatcgcccaattgcccagcggcgcgtcgctcgaccgcaccgaggcggtcgtcaaacagatgtccgacatcgccctggccgagcccggcgtggaaagcgtggtggcttttccgggcctgtcggtcaatggtccggtgaacgtaccgaattcggccctgatgttcgccatgctcaagccattcgacgagcgcaaggatccgtcgctgtcggccaatgccatcgccggcaggctgatgggcaggttcagccagatcccggacggcttcgtggggatgttcccgccaccgcccgtgcccgggctgggcgccatgggtggcttcaagctgcagatcgaggatcgggccgggctgggcttcgaagccctggcgcaggcgcagggccagatcatggcaaaggctatgcaggcgcccgaactggccaatatgctcgccagcttccagaccaatgcgccgcagctggcggtggacgtggatcgcgtgaaggccaagtcgctgggcgtgccgctcaccgatgtgttcgaaaccctgcagatcaacctcggatcgctctacgtgaacgacttcaaccgctttggccgtacctacaaggtcatggcccaggccgatgcgccgttccgcatgcaggccgaggacatcgggcagctcaaggtgcgcaatgccgacggggacatgattccgctcagtgcgttcgtgcgcatctcgcgcggatctggcccggaccgcatcatccactacaacggctttccgtcggcagacatcagcgggggccccgcgccaggctactcgtctggccaggccacggacgccatcgagaagatcgtgcgcgagaccctgccggaaggcatgacgttcgagtggacggatctggtttaccaggaaaagcaggcgggcaactcggcgctgtacatctttccgctggcggtactgctcgccttcctgatcctggctgcccagtacaacagctggtcgctgcctttcgccgtactgctgatcgcacccatggcgttgctgtcggcaatcgcgggcgtctggctcgccggtggcgacaacaacatcttcacgcagatcggttttgtcgtgctggtcggcctggccgccaagaacgccattctgatcgtggaattcgcccgtgccaaggaacacgaaggcgccgatccactggcggcagtgcaggaggcggcgcgcttgcgcctgcgcccgatcctgatgacctcgttcgccttcattgccggtgtcgtgccactggtgctggccagcggtgccggcgcggagatgcgccatgccatgggcatcgcggtgttcgccggcatgttgggggtgaccctgttcgggttgctgctgacgcccgttttctatgtcgtggtgcgcaagttggccttgcgccgcagtgaccgccgcgctcgcgatggctcagttggtcagtccgcaacggagcaaggatga

SEQ ID NO: 530831 - DNA, 1233 bp, Stenotrophomonas maltophilia
atgcatagaaactacaagattgccgtgatggcgggcatcgtcgccgctgccgccgggctggcttttgcggtcggtgatgcgccggacaacacggcgcaggacaaggccacgtctgccggtccgccgtcggcgccgcaggtgccggtggcggaagtcatgacccgtgtcatcgcgccgtcttccgagttcaccggcttcatcgctgcgcccgagaccgtagaactgcattcgcgggtgagcggctccgtcgatgtggtccgcgttccggagggcggcctggtccgcaagggacagctgctgttccagatcgatccgcgaccgttccagattgcgctggataccgctgccgcgcaattgcgccaggccgaggcactggccaaccaggccgaggtggatttcgcgcgcgccgagcgcctggtgtccacaggcgcggtctcgcgcaagatccatgacgatgcggcggcaacgcggaatgcccggcgtgccgaagtgcaggccgccaaggcagccgttgccgccgcgcaattggatctgacgtactcgcgcatcacggctccgatctccggccgcgtcgatcgcgtgttcgtgaccgagggcaatctggtcagtggtggtgcgacaggcaccgccagcttgttgaccaccatcgtttcggtcgatcccctgcatgtgtacttcgacgtcgatgaagccacctatctgaacgcggtcaggcatcgccggcccgatggtacgggtgggcggccagcgctgtcggtcgacgtgggattgagtacggacaagggcttcccgtatcggggcgagctcgatttcctgggcaaccagatcgaccgcggcaccggcaccattcgcgcacgcgccgtcgtgcccaacccggatggagcattgttgcctggggcgtttgcccgggtccgtctgagcaccggcgcagcgcgccaggccgtactggtcgccgatctggccgtgggcaccgaccagggcaagcactatgtgctggtcgtggacaagaacaaccaggcccagtatcgcccggtggaactggggccgatggcggacggcttgcgcgtcatccatggcggtttgcaggccggcgaaaaaatcgtcgtcaaaggcctggtgcgcccgggcatgacggtcgctccccgcccggtggccatgcaggcatccaccgacacgtccgatgcgcatgccccgagcggcgccaaggcggacgcgacggaggcccggccatga

SEQ ID NO: 530832 - DNA, 270 bp, Stenotrophomonas maltophilia
atgcagaacacagtccccacacgccgtcttctcctctacacgacgccgacctgccccgattgcctggcgctcaagcgctggctcgcgtcgcaggggatcgccttcgaggagcgcgacctgaccgacccgcggatcgcggccgaggccaagtcccgcaccggcgtgcgggtcgcccccatctcggtcatcggcaacgaggtgttctacggcagcttcgaacgccagaagccgggcctcgcgagagcactcggcctgacggcggggaattga

SEQ ID NO: 530833 - DNA, 1029 bp, Stenotrophomonas maltophilia
atggcggtgaagaccctcttcatccggcaggcgcccgccgtgctggaagtcgcggacgggcagaccttgctcgaggcggcgctggcgcaggacgttccttatccgcatggatgccgtgccggccgctgcggcgcttgcaaatcgcgcctggtcgcgggcgaggtggacttgttgccgcattcccgccatgccttgacggacgatgagaaggccggcggcctgatcctcgcgtgccgggccgtgcccaggacggacgtggccgtggcctgggtcgcatccgacctggccgcgctgccgccttcctgcatgcgggaaggcgtggtcctgtccatcgacgcgttgacccacgatatccggcgggtccggatcggcctgaccgatggcgccccgcttgccttcgctgcggggcagtacgccgatatccggttcgggaatgcccccgcgcgcagctattcgatggccaacccgccaggcgacccggtgctggaattccacatccgccgcgtgcccggaggcgtggtctcgggacacgtccatactgtcctgaaaccaggcgatccggtgacgctggagatcccgcgcggcgcatcgcacctgcgcgacggccattgcgggccgatgctgtgcctggccggcggctcggggctggcgcccatcaaggcgatcgtcgaaaccgcgctggcgctcggcatgcggcagcccatccacgtctatttcggcgcccgcgaagagcatgacctgtatctgaccgggcatttccaagacctggcccgccggcacgccaacttgtgcttcgtccccgtgttgtccgaggcacgcgccacccgccatcgtcgcggcctggtcacccgggccgccgcggaagacctgccgcgcctccacggctggaaggtctatgccgccgggccgccggcgatggtggacgcagcgatggaaatggcgttcgcccgcggcctggcggcggaggatctgcacgccgacgtgttcttcaccccggatgccctggcgccagccggcggcgaggcctga

SEQ ID NO: 530834 - DNA, 2496 bp, Stenotrophomonas maltophilia
atgaacatgccaagctccggcggcacgccaaccgccacaatccgcctgcccatcgagggcatgagctgcgccagttgcgtgggccggatcgaggccgccctggccaaggtcgagggcgtgggcagcgtgtccgtcaacctcgccaccgagcgggcggaaatccaccccaccggcccggtggatcaccgggcgctggtgcaggcggtggaacaagcgggctacaccgtgcccaccggcaacgtcgaactggcgatctccggcatgacctgcgcctcctgcgtgggccgcgtcgaaaaagcgctcagggcggtgcccggcgtcaccgaggccacggtcaacctggccaccgagcgcgccaccgtgcgcggcacggccgccgtgcaggcactggtcgccgccatcgggaacgccggctacgaggcccgcccggtggataccggcgcgcaggcggaggaagccgccgcgcagaaaaaggacgccgagcgcgccgcgctcaagcgcgacctgatcctggccaccgtattggcgctgccggtcttcgtgctggaaatgggttcgcacctgattcccggcatgcacgcatgggttgccaacacgatcggcatgcaggaaagctggtatgcacaattcgtgctgacgctgctggtgctggccatcccgggccgacgcttctacaccaaggggttcccggcgctggtgcggctggcgccggacatgaactcgctggtcgcggtcggcacggccgccgcgttcggctactcggtggtcgccaccttcgcccccggcctgctgccgtccggcacggtcaacgtctattacgaggcagccgccgtcatcgtcgcgctgatcctgctgggccgctatctggaagcgcgcgccaagggccgcacgtccgaggccatccagcggctggtgggcctgcaggccaagctggcgcatgtgcagcgcgacggccgcagcgtggacatcccgatcgccgacgtggtggtgggcgatgtcgtggacgtgcgcccgggcgaacgggtgccggtcgatggcgaagtgaccgacggccgcagcttcgtggacgaatccatgatcaccggcgaaccgatccccgttgaaaaggccgcaggcagcaccgtggtgggcggcaccgtcaaccaaaagggcgcgctgacgctgcgcgccaccgcggtgggtgcgcagaccatgctcgcgcagatcatccgcctggtcgaacaggcccagggctccaagctgccgatccaggccgtggtggacaaggtgaccctgtggttcgtgcccgccgtcatgctggcggccctgctgaccttcctggcctggctggtgttcggccccgcgccggcactgacgttcgcgctggtcaacgcggtggcggtactgatcatcgcctgcccctgcgccatgggcctggccaccccgacctcgatcatggtcggcaccggccggggcgccgaactgggcgtgttgttccgcaagggcgaagccctgcagttgctcaaggacgcccgggtggtggccgtggacaagaccggcaccctgaccgaaggcaagcccgcgctgaccgatctggagctcgccaccgggttcgaccacgccgatgtgctggccaaggtcgcggcggtggaatcgcgctcggagcaccccatcgcccgcgccatcgtcgaatccgccgcagcgcaaggcatcgtgcctgcggccatgacggacttcgaatcggtcaccggcatgggcgtgcgcgcccgggtggacggggttcgcgtcgaggtgggcgccgaccgctacatgcgtgaattgggcctggatgtgggcggctttgccgacacggccgagcgcctgggcaacgaaggcaagtcgccgctgtacgccgccatcgacggccgcctggccgccatcatcgccgtggccgacccgatcaagcccagctcgcccgccgccatcgcggccctgcaccagctcggcctgaaggtcgccatgatcaccggcgacaacgcccgcaccgcccaggccatcgcccggcaactgggcatcgacgacgtggtggccgacgtgctgcctgccggcaaggtggatgccgtgcgccgcctgaaggcagcgcatggccggatcgccttcgtgggcgacggcatcaacgacgccccggcgctggccgaagcggatgtgggcctggccatcggcaccggcaccgacgtggcggtggagtcggccgacgtggtgctgatgtccggcaatctgcaaggcgtgcccaacgccatcgcactgtccagggccacgctgggcaatatccgccagaacctgttctgggcttttgcctacaacacggcgctgatcccggtggccgccggcgcgctgtatcccggctggggcgtgctgctttcgccgatcttcgccgccggcgccatggccatgtccagcgtgttcgtgctcggcaatgcgctgcgcctgcgccgcttccggccgccgatggccggctctgccaatcccaccacctga

SEQ ID NO: 530835 - DNA, 429 bp, Stenotrophomonas maltophilia
atgaacatcggcgaagcatccatggcctcgaacgtgtccgccaagatgatccgctactacgagcagatcggactcatcccgcccgccgcgcggaccgaatccggctatcgcaactatgcccagaccgatgtccaccggctgcgcttcatcggccacgcccgcgatctggggttctcggtggccaagatcggtgatctgctgaacctctggaacgaccagtcgcgccagagcgcagacgtcaagcgcctggccgaggcgcacatcgccgaattggaccggcgcatcgacaacatgcggcaactgtccgacacgctcaagacactggtcagtcactgcgccggcgacgaacgccccgactgcccgattctgaattccctggaacggcccggtcatggctgtgctgcccctgagcgcgggcaggccacttga

SEQ ID NO: 530836 - DNA, 228 bp, Stenotrophomonas maltophilia
atgaacacctcaacccccaacaaggagtttttcatgcaattccatctcgatgacatgacctgcggcggttgcgcccgcacagtgaccaaggtgatccaggggatcgaccccgccgccagcgtcattgccgacccgccgaaccgcacggtccaggtgcagaccacggcatccgaggctcagatcgccgccgccctgcgcgaagcgggctttcccccgcgtgagcactga

SEQ ID NO: 530837 - DNA, 1674 bp, Stenotrophomonas maltophilia
atgcagccctccggtttcaatggccgggcgcgaggactgttcgtactggtcgtggcaccgctggtgagtatcggcgtagccgtcgggatgacatgccttgggtccggctccgatccactgaatcgcctctatgcagggctgttctgcgccgtgctcacgcagtgtgcgctgctcgcggtcggcctggtggctggccgtccggccggcttgccactgcgcagggcgctgtccaccagccaccactggatgggcgcgatgctcggcggcatccttttcgtcatctgcctgagcggtgcgctgtcggtgctgaagccggaattgcgcagctgggaaatgcccaccgaacggcagcttgcccaggcccccatcgggctggatgacctgctcgcgaaggcgttggcagcctttcccgaggcagattcacttcagttcgacaggcccgaggccggccctgggtcatggcacgttcaacccatgcggtcgcaacaacgatgggcaggccctgcgccaaccctgtctgtgccacccgtgcctgccgtgcatggcgacctgaccggcatcgtcacccgcctgcacaacacctttttcgcgggcttccccggtcgcgtcttcgtaagcctgttcgggtttgcgctgggcgccctagtcgtcggcggcgtggtgttgcatccccggcaggaaggcacgctgtggcgtttgcgcctgggtgccgggttgcgtaccgcagcctacgatgcccaccggctgttcggcctgtggctggcgccgctgctgttgctgatcgcggtcaccggcgtcttctcgggactcggggcgctggccacggtccagttggcaccgctcgccttccccgacaagccgggccaggtgatgcaggcattgatgcagccctatgcgcgcccggccagcgggcatcgtgcgcccatggccagcatggacgaattgatgctgcgccatcgtcagatgaatcccgactttcgtgtccagggcatcagtgtccaccactggggcgacgcgcatgcctacgccacgctgcgcggcacgcagcgctggcaattgagcacggccatcttcgagcgctatcactatgccctcacggacctgagcctgctgcggcacgacagcgcggccaaccagggcccattcacgcaaggcttcatcgctatccaacccctgcacttcgcccgctacgccgacgccgccagccggtggctgcacgcgctggcgggcctggccggcgcgctgctggccgccagcggcacctggctgtggctcaagcgacgcgccaatgacgaggtcgctcggcatctccgcccctggctgagcggcatgacactcggccttgtactggcgtgcagtgccttgttcgccatcacggcgttgacgcctgactcatggccgtcgcgcgagcgctggcaggccatgggattcgggctggcctgggcgggtgcgctggtttgctgcctgctgccggggaaatggcgcgcacgactgcccaccacattgctgcggctggctgcggcgcttctcgccgtggcggccgcagccagccttgcaacccaatggcgtggcgcctggcaagcgccatggccagccctgtcgatcaatttcctgctcctgccgagcgccatcgcgctctggggcaccgcccgcaaactgaaaacaacaccatga

SEQ ID NO: 530838 - DNA, 405 bp, Stenotrophomonas maltophilia
atgacaactgatcccacccagatgctgaaacccttctccctgactcgcacactggcagtcctgcaacccggttccgcgttgcagttggtccccttcagcgaacgtggccgcgtgcagtccgactggatcatcggcatccgcgccttccgcgattccacttcggtccacggcagtcactgggaacgtcacccccgcggcgacgagatgctcacagtgcttcaaggctgtatcgacgtcgtgctggatacgccccttgaggaaacgcgcctgcacgtcgatgccgggcattccctcatcgttcctcaagggtgctggcaccggctggaagtggtgcagccagggcaattgctgttcgtgacaccggcgaccgacagcgagcatcggcaacgagattcggaacgctga

SEQ ID NO: 530839 - DNA, 1377 bp, Stenotrophomonas maltophilia
atgaactcgtgtgacgcgctgagcgcgctatggccgctgtccggactgccatcgcaagccctggattggatccacttgacccgacaagacccggtgtttccctcgtccttcgccgtcggcaccgccgcgcagaccagcattgccgcggccgcgctcgccgcctgcgaagtgggccatgggcggggcgttccgcgccagcgcgtcgccgtggacatggcccacgccgccgccgaatgcaccggctggttcacgctcgacggccatgagcccgagctgtgggacccgttcgccggcctgtaccgctgcgccgatggccacgtgcgtgtccacaccaacttcccgcaccaccgcgatggcgcgctgcacctgctgggtctggacccggcaactgccacacgcgccgacgccgagcaggccctgcgggcttggaaggcgctggacttcgagcaggccgcggccgaccacgcgctggtggccacggcgctgcgcagcttcgccgagtgggatgccacgccccagggccaagccgtggccgcgcaaccgctgatgacgatcacccggatcgccgatgcgccaccgcgcgcactgccgcccctggcggtcgatgaacggccgctcgccggtctacgggtgctcgacctcactcgcatcctggccggacccgtcggcgggcgggcattggcatcgttcggcgcggacgtgatgctggtcaattcaccgaacctgcccaacatcgccgccatcgccgagaccagccgcggcaagcgctcggcgcacatcgacctgcgcaccgaggctgggcgcgagacgctgtggcggctcgtggaagacgcccacgtgttctcgcagggctaccggcccggtggcctggccgcgctcggcttctcgcccgaggccctggccgcgcgccggcccggcatcgtcgccatttcgctcaccgcctacggcacccgaggcccctgggctggccggcgcggcttcgactcattggtgcagaccgccatgggattcaaccacgccgagggcgaggcggcgggcgacggccggccgcgcgcgctgccgatgcagatcctcgaccaggccagcggcttcctgatggccttcggcgcggccgcggcgctccggaggcagcagcatgaaggcggaagctggcacgtccaggtgtcgctggcacaaaccggacactggctgcgcggcctggggcgcatcgagaatggcctgcgggtcgacaagccggatgtcacgccctggttcgccgaagacatctccggcttcggtctgctgcgcgcggtgcggcccagtgcgcaactggcgcgaacgccggctggctatgcgcggccgtcggtgcagccgggcaccgatgacccgcattggtga

SEQ ID NO: 530840 - DNA, 909 bp, Stenotrophomonas maltophilia
atgggtatcgaccagcccgccgcgcgaggtgttgaccagcatcgcgccggtcttcatccgcgccagcgaggcgtcgttgatcagatgctgggtatcgggtgtcagcgggcaatgcagcgacacgatatcggcgcgcgccagcagttcatccagcccaaccatgtcgcccacgccggcgaaggccggcgatggatacgggtcatgccccagcacggtgcagcccatgccgtggaagatgcgcgcggtggccaggccgatcttgccggtgccgacgatgccgaccgtgcgcccatgcagagtgcggccgagcaggccatcgagcatgaagttgccctcgcgcacgcgattgtaggcgcgatgggtctgccggttgagcgtcatcaccagcgccagcgcgtgctcggccacggcttcgggggaataggccggcacccgtgcgacgaacagctccagcgctttcgcggtggccaggtccacattgttgaagccggcgcagcgcagcaggatggcgcgtacgcccagcgcatgcaacgcgtgcagaaccggcgcgtccaggcgatcgttgacgaacacgcagacggcggcgcagtcttgtgccagcgctgcggtatgcacgtccagcgcggcatcgaagtacacgaatgcaaagccctgcccggccgcatcgcgctggttggcctcgtcgaggaagcgacgatcgtaggggcgggcactgaaaacggcgatctgcatggacgggcctggcgggaattccctgccgaccataccgcagcacctgccctgatgggatggccccggcgatacggatatcgccggggccgagtgccctttagaaccggtagcccaggcccagcatcacgccgttctggatctgcccatcgcggcgttcgcccacgtagtcggccatga

SEQ ID NO: 530841 - DNA, 201 bp, Stenotrophomonas maltophilia
atgctgttgtggttccatgcgaaaaacccggcttcggccgggttttttttgttccccggtagtgccgaccgctggccggcattcctcggggttgccggccagcggccggcactgctggatcgcgcggaccccgtggatcgctggcaacaaaaaacccggccggggccgggcttttgtctgcagcccaaccccgaagggtag

SEQ ID NO: 530842 - DNA, 387 bp, Stenotrophomonas maltophilia
atgattccgcgcctcgttcgcttcctgctgtccggcggttcggccgctgcggccgaatacctcgtgttcatcgcgctgcagggcgcgctgggcagcggctggcttgtactgagccagtcaaccagcttcgcctgcggcttcgtcgtcagctttatgatgaaccggcattgggtgttccgcagccagggcagctggcgcagcgagctggcgcgctacggtgcgctggccgccatcaacctgctgcttggcaacctggccttgctgttgctggtggaccacctgcacctgcatgtgctgctggcaaagttcgtggtcatgggcatgatcgcggcttggaactacctgatcttctcgcgcctggtgttcaagcccacgacgggcgcgtga

SEQ ID NO: 530843 - DNA, 1005 bp, Stenotrophomonas maltophilia
atgtctgacgccacgatggaagcgccgcgccagcaggtggccgtggtgattccctgttacaaggtccgccgccacattctgggcgtcatcgatgccattggtccggaggtcgatgcgatctattgcgttgacgaccgctgcccggatgcgagcggggacttcatcgagcagcaggcgcgggacccgcgcgtggtggtgctgcgccacgaacagaaccagggcgtgggtggagccgtgatgacgggctaccagcgcgcgattgccgatggcatgtccatcctggtcaaggtcgatggcgatgggcagatggatcccacgctggtgccgctcttcatcggcccgatcctgaaaggccaggccgactacaccaagggcaaccgtttctgggatctgtccaacatccgccgcatgccgctggtcaggcgcatcggcaacctcggcctgtccttcatgaccaaggcatcgaccggttactgggatgtgttcgaccccaccaacggctacaccgccatccatgccaatgtcgcggcgcggctgccgtacgcatcgatcagccggcgttacttcttcgagaccgatatcctcttccgactgaacatcatgcgggcggtggtgtgcgacgtgccgatggacgcgacctacggcgacgaggagagcaatctcaagatcggccaggtgctgactgagttctcctacaagcaggcacgcaacctgttcaagcgcatcggctaccgctatttcctgcgcgacctgtccattgcatcgttcgagctgctggctggcacgttcctgctggccagcggcgtgctctacggtggctggcactggttgcaggcgctggaggctcagcaggcctctgccgtcggtacggtggtcctgccgtcgattgcggtcgtgagcgggctgcagttcctgctggccttcatcgggtatgacattgccagcgtcccgcgccaggtgctgcatcccctgttcgccccgttccggccgcgccggcgggactga

SEQ ID NO: 530844 - DNA, 1455 bp, Stenotrophomonas maltophilia
atgaagcgcacggcgcgctggctgttgccgatcgagcggccacgcatcgcactgctgcttctggcactcggcgtgctggtgatgatagttgcgcggctgttctcctggccgggcttcgcgacgcacgatacggtgttcatcacccaagaagcgctgcgtggcgagtacacctcctaccacccggtcctcaacgcactgctgatccgctggctggccgtgcccttcgaatccttcagcatctacacctcgctgcagatcctgttctgcgcgacgctgtacctgcgcagtgccacgctgttcgcgcggatggtcagccggcccgcgtggatcgtacttggcgtggcgctgtgggcggcaatgcccagtacctacctgtaccagggcatgatctggaaagacgtgctctgcgcgtattgcctgctgttcctggcaacgctggtgctgcagtcgcggcagaccggcgtgcttgcgggccgtgccgatgcagtgctgctaggcctgtccctgttcctcatcgttgccactcgccatggcatggcgatcaatttcctgctgctgccgctggccatcggtgtgcgccagctgtgggcggcacgcccgtatcgagcggccttcgtggcgtcggtcgtcggctggctgctgatgtcgttggtcgcggcttcacctctggtgaagaatgatgtcgcgcacctgtccaagctgaagatctcggcggtgtccgggccgttcctgggcatggtggccaaccgcagtggatacaccagcaacgaccccggccaggaccaggcgctggccgcccgtgtgttcgggccggactacgcggagaagtaccgtccggactacctgatgaacgaggtggtgctgacggatccgcaggagcttgatgaggcgtacggcctgatcctgcgccgcaccgcacggctctgcctgctcaatgtctcccagtgcggctcggaccgcctgcagatgatgctggcgacgctgcaaccgagcaccgccttcggtggcatgaagttctacgacctggcgatcatggagaactgcccgacggtgttcggcatggacccggacaagtgcgatgtactagaacgcttcgagcgtggcgaacgccccggcgtgctggttgagttccagcgcaagttcgtttcccgtttcgtggatacccgcggcactgtacagaacgtattcgtgtggaacctgctgccggccttcgtgctgctgctggcgctgctggtgttcaccgcacccggccgtccgctgtggatcctttcgctgttcatcctgatgcagatggtgctgccgatggcaacgtcgatggccaacgatttccgctattactacttcctggcacctctgagcacgctgctggcggtattcgtgctgggtcgagcagtgcacggtcgcagcttctggcgcgatcgcccaacgcaatccaatgaggcaagccatgtctga

SEQ ID NO: 530845 - DNA, 1071 bp, Stenotrophomonas maltophilia
atgaaacagcgattcggcacggagcttcgtcctgcgctgcgctcgcagtaccccctgcggattgcggtgatccccgagcgctacggcacggtgatgtcgccgtgcgcgagcatccgcctgcacgcgttcaccgagcgcttcgctgccgatgtccgctacctgatgccggaagagctgtccgcctttgcacccgatcttgtgctctggaaccgcggcgccgtcattgctggatcgggcctggcgatgatcgccgaggcgggacggcagggggcagcgctggtctacgacctggacgacaacctgctggccatggacgagcatcccgaacgggacgcctatgccgcagtcattgaagcggtccgcagctcgatcacccttgccgatgtcacctggtgctcgacgcgcccgctggccgaggtgatcaacgctgccggcggtaccgccgagtggatgcccaacgcgctggatgccgatctgtggcaggcagcgccaggtgaggcgctgtcgcttccggcaaccggcacggtacgcctgctgtacatgggaacgcggacccacgacgacgatttccgactgctcgacgcggcactgcagcaggtctgggaaaagcgtccaggcgcgttctcgctgaccctggtgggcgtcaacgctgcggacaccggcagtcggccctggatgcaaggccagagccccccggcccatgtcggcgcgtcctatcccgctttcgtgcactggttctcccgcctgcgcggcttccatgcaggcatggcgcctctgctcggctcggatttcaatcgttgcaagagctccatcaaggtgctggactacgccgccatgggcttggccacgctggcttcgaacgtgccttcctatgcggatgacgcgcacgacgaccgcatcttgatcgacaataccgccgatgcctggactgatcggatcgtttcgctggtcgatcggcagctggcggtggatgagatcgctgcacgcgccgtatcgcgcgtggggccggacatgttcgacgaggcggtggcccgtcgctgggagagttgcatgcaggtgatggggaaatga

SEQ ID NO: 530846 - DNA, 648 bp, Stenotrophomonas maltophilia
atgcggaagccgctacccaccccagagaacttcctgatctatgcagctgttagctgggtagccgtgagctttattggaatgttcttagccgatgccggcatgtatggcgccaaaatcgtaactgaggcggcagcgttctctctcttggttgcgctgtttcctagcgagccgcacagaccttggtcagtagcagtagtctgcatcgcattagctggcgccgcagtattctttgccatgtggcttgtatttttcgcgctccccgaagccaagagcttttcctttccagatcctcaaagcttaaatcgccttgacatagttgctggatttttggggactgcggttgtttcaccactttttgaggaaaaattggcgagacacttggcactaaggggtatcgagggcgttacaccgccttggctctcgaggttagtgtcgcctcgaatacttgccaccttgattgtctcaacaatatttgcgtgggcgcacggcgatatggctgtccctgcgtttatcttctcgctcactttaagctggctcaccctgaagcataggttcggcctcttacagcgcgcattgttgcatgggatctacaatggcgcggtcatgttctggttcctgtcctatggtttcggcttctactcaggatga

SEQ ID NO: 530847 - DNA, 951 bp, Stenotrophomonas maltophilia
gtgaatgttccaagagtcacgtcttccggtcgcgattctgtgtctaccttgctcgatgcccagaagagccgaatcgcaagcgtaagcgcaatcagtgagttccaggatagacagtttgcagtccagctggacggcgccaaagcgcagcgtagcgagatgttgcgggagctagctcagattgagtctgagataaaaaggcgcggcgagcaggttaggatcggtcgcgaaacggtgtctcgctacagaagcgtggaagatcagcgttatgtgagtctcgttcagatcaaccagcaagagcaatcaacacttgagatggtcaacgcacagcaggcgctccaacgccaggcgacgtcaattcgtaggagtctgactgaactggagcagcgccttgcggagattccacagcagaggctgtcgaccaaggccgcgtctgagcgtgacttggcggcgctgcgccaggaggccattcggatggaggccgacggtgagctcctacttcgggcccccgtagctggactcgtcgcgaatcgtctggttgaagctggtcaggcggtgcaggccggtcgagcgattctcagcctgttacctgaagggtctaagctgagagcgcagctgcttgtcccgagttccgcaataggcttcgtaaaggtgggtgatcgagttctactgaggtaccaagcgtatccataccaaaagttcggtactcatgaggggaccgtaattcgtatatccagaagcgcactgttgaaaggcaaggacagcagcgatccaaaccaatccctctatcgtgtcctcgtttcgctggaccgccaggacgttctagcatatggaaatcgggagccgctgcgtcctggcatgcagcttgaggcggacatcatgggggagcgccgaaggctctatgagtggttgcttgagccactctactctgtcacgggaaaatttggagaatag

SEQ ID NO: 530848 - DNA, 1293 bp, Stenotrophomonas maltophilia
atgagcgatgcttccttgttctcgcaattcaggcagaacctgtcggtaagcaatgccgacgaaatctccacgaaatacgccaacattacgacacggctgaacctggacttttgggagatcgaaagcgacacgcgacacagccttcaggttggctcttatggccgaaagacagcaattgatggcgtgagcgaccttgacatggtctttgaactgcccattgaagactatgaacgatataagaagctggagggaaatggcccatccacgatgcttcaagaggtacgaaactcgctcctgaagcgttacccaaaatcagacgttcgagctgatgggcaaattgttgctgtcaacttcgcgggctatcgcgtagaggtcttgcctgcttttctcaatgaaaacggcgactacatctatggcgatacaaacgatggcggaacgtggaagctgacgaagccgcggccagagatcaaagcagtcaacgatctcaataacgcgaccaatcagaatctgaaagatgcctgcaagatgcttcgcgcgtggaagaacaaggttggcgtcggaatcggcggcctactgattgacacgcttacatacaacttcttcaatcagacagatgactacgacaacgccggttgggccgacttcccagccatgtttgtttcgctattcacctacctcggcggcctcgatccggaccaagaatactgggctgcgccgggaagcgggcagcgagtaaagcgaaaggcgaagtttcagagcaaggcgaagaaagcggccgcgcgctgccaagaggcaatcgacacggaaggtgaagccgcccgcgcgaagatttggcgaaaggtgttcggcaagcaattcccgaaggcagaaacagtcgcgaagtcggcacgctacagcttcgataaagaagaatttattgaagatcgctacccagttgatgtgcgttacaacatcgaactcgattgcgaaatccgtgaggggacttcgtttcaagacctcttgcggcgtaagctcaggaatcgggagcgtgtaccgactgggcgccatcttcgtttcactgttacagcatgcaatgtgcccggaaattaccagcttttctggaaggtccggaacagagggcaagaggctatcaaccgcgaaatgcttcgcggtgaaatcactcctgacaagggcaacggcagagagaagatcgagacatcagacttcgcaggcaggcactacgtcgaggtatacgccgttaaggatggggtctgcgtcgcgcgtgagcggatcgccgttccgattgaagcgtag

SEQ ID NO: 530849 - DNA, 300 bp, Stenotrophomonas maltophilia
atgggtggtccctatttcctttgcgatgtcatcagaaccattgatgccttggatgaggcagcatcccatctgaagatcatcgttagtgacgactatgaggaggggaagtactacgacctgaccggcgacgcgcgtctggcattcaagcgggaggccatcgttgacgctcacgcgttccggctcccctactacgagggagtcttctgcgaccacatcttcaagaacgcagtagaaggtgccggcatcgtgaccgccggaacatgcaacgggctctggttcgaagacgttgtgaactgttga

SEQ ID NO: 530850 - DNA, 1182 bp, Stenotrophomonas maltophilia
atggcacgaccccgcaaggccgcacccaacctgccgaagcacatcgaccacacccgcctcccggtggggatctattgggatcccaccggccgcggcaggtggtatgtccgtgtgccacatgaagagggctacgggtccagaaccaagaccgttgccggtcccacagcgcgcatgtctgatttgcacgcgatcatggaagctcgccgaggggagccacagcgaggaaccgttgctttcgtcatcgaccgacatgccgagagcttggcgttcgcgcagctcaaaccctcaactcaggagggctacagagactacgcccgagctatcaaggcctatgccctcaagaacggaaccacgctcggcgacgcgaccgtggaccgcctgacgcccggcttcatccggcgcctaatcgacgtgatcgcccaggggcgacctgggcagaaggccggtgatcccgccatcccgggctaccctacgaaggctaaccactggctgcgctacctccgccgcgtgttcggctgggcgcgtgaacatgaccatatctccacaaacccagccgcaggcatcaagcaggtcaaggagaaaggcgatcaccgtatgccggccgtcgatgtgttccggcgagtgcaagcctacgcgaagcaatgcagtgcacgcgggcctcgcgctaagggcgcagttccggcgtacctgtgggcagcgatggaactggcgtatcaggcccgcctacgcggcattgaggtgctaactctaacggacgctcacgtcgacggcgagctgctgcgcacgaaccgccgtaagggcagccgcgacaatcttgtgcgcaaaggtgtccaaaccgaggaggccatcgccatgctgcggtctcgtcggtgggcgatatgggagaaaagcgggggagtggttccgatccgagccgaggaccgctatctgttcgtcagcgaagacggggagcggttgaccgaggatggctggcagactgcctgggggcgcatgatgcgcaatgcagtgaaggatgggattctaagccaagacgagcgattcggcctccatagcctgaagcaccgcggcgtgaccgataccaagggcaataagaaggaagccagtggccacaagactgatgcaatgttgcacgtctatgaccactcacttccaacggtcgatgaggcgggccggggcacgtaa

SEQ ID NO: 530851 - DNA, 180 bp, Stenotrophomonas maltophilia
atgagccgccagctcgaaacccagctgcgcctgatcgcagcgcaagcacaagcgctggccgaaaaggcgagcaccggcagctactggtgcggcgaaatgttggatggcctcgacgtgatccgcgaggcactggatagcgccgtccgggaagtcagcgcacaacgctcgggggatcggtga

SEQ ID NO: 530852 - DNA, 243 bp, Stenotrophomonas maltophilia
atgcgccacctggccctgcccttctactgcgccgtcgtcgtcggcttgctgctggcgctgctcgcgcgcgccatctacaccgacgcccattcgatcttcctcgtcgcctgcttcggccttggctacttcggccgggcatgcctcatcgaaacccgccgctgctggccggcattccgcgccgaaattcagcggcgctcggccgcacgacagcgcgcgccactgcccgccgacgacacccactga

SEQ ID NO: 530853 - DNA, 237 bp, Stenotrophomonas maltophilia
ttggccacgatcactaccaccagccgcggcgcagctagcgcccagcccaggccccgcgccggaaccgtcgtcgtccaggtcggcgacgccaccctgctcagcctgacctcggccgaggcccgcgagctggccgaacacctggccgtctgcgccgacgcggtcgacgaaggcgcgaccgaagtcgccaccatcgcccgttcccagccgctggccctccagcaggcggtggccgcatga

SEQ ID NO: 530854 - DNA, 150 bp, Stenotrophomonas maltophilia
atgaccgagtaccggggcccgaagcggctccggtatcgcccgcttgtgtacaagccgttgagtcgcttgaagcatctggcgtcgccaggcctgggcgggttgattctagtggagcagatgttctggtcgatgagcggtgggccgctatga

SEQ ID NO: 530855 - DNA, 153 bp, Stenotrophomonas maltophilia
atgagcttcagcacccaacagttcaacgctcgatgcctatccaactacggcgcaggttcctctgaaaagtggatcgtccgcattaggttcatcaaccagcgcactggtgtcgtctacggcctcttggagggggaccagtactcgatcccttga

SEQ ID NO: 530856 - DNA, 3666 bp, Stenotrophomonas maltophilia
atgagcctctacacccttactgttgatctgctagccaagaccggctcctttgaaaaggggatgaccaaggcagaacacgttgctgcacagcgctctgccgcgattcagcgcacattgtccgaagtggccacagcagtggggaccgcgctgggcaccgcggctgccgcagccggcacagctgtagtcatgtggacgcgccaggttggcgacctcgcggtgcagtacgaaaggttcggccagctgtcgggcaccacctcccagcagttccagcggatggccgcaggcgccaacaccgtgggaatcagccatgagaagctggccgatatcctcaaggacgtgcaggacaagatcggcgactacatccaaacgggtggtggcgccatggctgacttcttcaacaacatcgccaagggtgccggcgtcacagccgagcagatgcgcaagctatccggcccggacgcgctcgggctgtacttcaagagcctggaacgtgccaacctgtcgcagaccgagctgaccttctacatggaggccatcgccagcgactcggcgatgctgatcccgctgctgcgcaacaacagcgctgggttcaagcagtggggccaagccgccgaggcagctggcgcgatcatcggcaacgacacgaccaaggcgatgaatgaccttcgccgggtcacccaagaggcggacctcgctttcatgggtgtcaaggtgcaggtagccgagggcgtgatcccgaccctgaccgaactgaacaagctgctgcacgatcccaaggcacaggaggccatgcacacggccaccaacggcgttatcgcgttcggccaggccgcgctggatgcggccgcaggttttgggcagttggtagtcagctacaccgggtggctcaaatcgaagggcttcatgcccgtcagcaacaccgattcgttggaaagccttcaggctcggcgcggggcgctgggtgacagcctgaagaattggaagggcatcttcagcgatgacgccaagaagaaggtgcagggcgagctggcagaggtggacgcgctaatcgccgcgttccccttccggggcgtgaccgccaccgtggacaccaccgccggcatcccgggccagcctaagccctacgagccgccaaagctgggccgcgagagcaaggcgagcagctctgccgttgaccgtcaggcagaatcgctgcggcgttacgccgccgaggcagacatggccgccgccacgatggccggcccgctggccgaggccgagcagaagcacaagcaacgcttggcagagctgaccaacgaactggccgccggcaatatcacgcgcgctgccttcaacacgctggagaaggaatcagcgtctcagcttgcggccaccaccgcagagctggaaaagcgcaagcgggcgccgcaggcgctgctcgacaccatgagcggcgaactcgacatgatgcgcctgatcggcccagcgcgggagcgcgcacggcgtgagatgcagaatcagcgggacatgcaggaggcaatcaacgaggcgaacgcggcaggtgcgggcatcaatgccgacctaagcgcctcgctcatggcgcaggcgcgtgctgccgcacaagctagcatcgacgcggacaagtacgccgccagcctgcagcaatgggcggatgtgggcaattacctggtgagcgacacagccgacgccatggccgacttcgtcgcgggcggcctgcgtgattggtctggcctgtgggacgacatgaaagacgtggccaagcagggtctgcgtgacattgcgcgccagctgctgcagcagaagctcgtgatcccgattcaaacaaagatccttgagagcattaacgggatgacgggccagggcggtggcctgagccttcagagcatcatggggctgtttggtggcaatggcgcggccggcggcggtcagaacctggggaccatagccgggctgctgtccaagggccaggggctgttcagtgcgggcgcgggtgcggcgagcagcggcgccagcgccggcagtctgctcggcttcggcaacaacgttgccgcccttaccggtggcggcgcagccgcagcgggtggttcttccgcagctgctggtgccggtgcggctggatctgctgctgcagcggtcccgatcatcggctggatcgtggccggcatgatgaagaacgccgagctgttcgatcagggctggaacatcgccaacggggagagctgggccggcaagattgccaccgccggcgcggtgggcctcgccgacaagacgttccgcgggcttggtttcaacgacaaggtcgcatcgatcctgtccgggtcgagcatccacgccaagctgttcggtcgcggcgcgccgaagatcaccggccagggcctgaccggctcgtatgggttcggtggcttcgatggccagacctacgccgatatcaagcagaagggcggcttcttccggtccgacaagaagtggacgcagtacggcgccgttgatcccgggatcgatcgcacgttcgacatggccgcgcgtcaggtccgcggtgcggcaaccggcctggccaagcagttgggtgtcgacctgacccagcagctgggtggtgtgcgggtgagtctgggcaagctgcagctttcggcggactccgccgaggccaagtcgcagctggaggcgtacctcggtgacatgaccaaccggctgttcaccgaggcggtgaaggctgccggcttcggaggccagctggacggctacttcgaggcgtcggacgtgttcaacgcgctgagtgcgtcgattgcactggcggtgggcaatgccgacgagctgggccgcgccctcaccgggatggaggtcgacaaggtcaacaaggcggtggactacttccaggacctggccagcgtcgctggcacggacctggccacccaggtcgagaaggtgacggggttgctcgggaactacgcctcactgatggcggacgtttccacgcagctcatgaccggcgacctgtccagctaccagcagcaggcgctgagcatcgagcggacctaccggcagcaggtgaagtcggccaacgactacgccaaggccctcggtttgtccggtgcacgtgccgaggacctggccaagatcgaagcgctgcgcgcgatgaacctgggcaagctgcaggcgcagatcgacaaggataagaaggccatgcagtacggcctgtcgatcagcgacctgtcgccgctgacggaccagcagaagctcggcgaggccatgaaggagctggagcgggccgtggccggtggcgacaccagcgcggcccaggcggcggcgcaggccgcacttggctttggccggaacctgtacgccagcggcaaggactacaacgggttgtacgaccaagtgaccgggctcattgacggcatgaaggtcggcgacctgaacaccgaggacggcaccagcatgggacagctggcggacgcgatcgaggccctgccggacaacttcagccgtgcggtgttcgacctggtggtgaacaacgagtcgcagtcccaaaccacggcggctgtgcagcagagcaatgcgctgctcaccgagcagaaccagttgcttcgcgagctgctgtccaccaccacccagggcatccgcgcctccagcagcaacgcgctgcgtcaggcactcaacgcgaggtaa

SEQ ID NO: 530857 - DNA, 384 bp, Stenotrophomonas maltophilia
atgcgcgcacgttctgcaaagaaaaacgacctgcagggccctactcaatttcaatggctctgctcgctactggtcctcccgttcgcagttgtaggctgtatggtttgcagcgtggcgggcccaattgccctggctatcgcctttgttctggctttatgccatcaatggcgcttcgccgccggcgactggctgctcgggctttctcccgctggctggggcgagctccagttcatcaatgccttgctgtggggcggtgtcgcgtcagtaatgattggcgttcttctacgtcacgttgcctactggctgaacaactgcgtgtttggcaacagcaatcagctgaccacctctgaaatggagaagtcgaggtccaatgatgcggtataa

SEQ ID NO: 530858 - DNA, 330 bp, Stenotrophomonas maltophilia
atgccagtcggccgcaatattgcagtgactgttatcgccccgaccaaggcggtagctccaaagcacgcaagtgactggccccgggccgacagcctgtcggatgcgctcggcaaccgcgtcaatccattcactcatcgcgaggctggtaacgtgttctccatccgcagggagatggctaatctcaggaaggcctttcagaccagcatcatcgcgtgcattctcttcatctcggaacgagaagcgacgcccttcaccgaacatcgcagttacgagttcatcgcgatctttgtcagtcatcttgctcattcaaatccccattcacgtttgtga

SEQ ID NO: 530859 - DNA, 411 bp, Stenotrophomonas maltophilia
atgaagaaccagaagggcttcacccttatcgaactgatgatcgttgtcgcgatcatcgccatcctggccgcgatcgcgatcccgcagtacaacgattacaccgctcgcgcgcagctgtcggaagcgttcaccctggcgagcggtctcaagaccccgatcgctgaagcttatgctcaggacaacgccgcagctaattcgtgcaaggtgccggcgaactcggtcgtgaccggcaagtatgttgaaaaggttgaggcgagcggtgattgcgcggttgtcgcaaccatgaagtccgccggtgtgaacaacaaggtgtctggttcgaccgtgaccctgacctttgctccggcaaccggcgcatggacctgtgcgaccaccgccccggccgaggtcaagccgaaggcttgcatctaa

SEQ ID NO: 530860 - DNA, 441 bp, Stenotrophomonas maltophilia
atgcgcgttgggggcgctcgcatgaaaaagcagtctggatttactctaattgagttgatgatcgtcgtcgcggttgtcgcgatcttggctgcaattgcgattccgcagtacaacgattatgtggcccgcagtcaggtgtccgaagcgatcacactgttgggcgggctgaaagcgcccgtggctgagcagttcgctaacagcaacggtgcatcttcctgttcattgcctgccagtgcggttgtcacaggtaagtatgttgacggtgttgcagccgtggcgggggtgccctgcgtgatcaccgccacgatgaaggcgactggcgtcagtgagaagatcaggtcggcgacggtcacgatcacctattccgctagcacgggcatctgggactgcaagaccaatgcgccagaggaagttgctcccaaagcctgtccccatgggtga

SEQ ID NO: 530861 - DNA, 612 bp, Stenotrophomonas maltophilia
atgctggaagctcttttcctggcgaccgccaaggcggcgccggcggccactgcagcggtgagcggtggcgacgactggaagtggcttgttcccgtcgccacgctgattctgggcttcgggctgaagtggctccaggatcacgtgacggagacggggcgcaggcgacacgagaagagcctgcgtcgagaacaacgatacgatcaactgcgcacgcggcgtgttgatgctgagcgccaaaacctcctggcgctgcaaccgatggtgctgcgtcttgtgcgggcagcgactgccgccaagaaggagttcgacgcaatgctaagggcgggatggcgcgagctcaacgtctcgactgaggtcgaccaggagatccaactaagcgcgctggatcttatcccccttcaatctcgcatccacaccgtcggagtggtggagttgctcaacgaactggtaaatcgggtcgtgaacatgctggaggcgcgcaaccaggaagagttggaacggctgtttggccaaatctcccccgtccataaccagctgcacgacttgcttggcagatcgatcaagcagctcgaggatgagaaccagcagctcggtgatccgcccgcgggttga

SEQ ID NO: 530862 - DNA, 672 bp, Stenotrophomonas maltophilia
atgcgacgcagtgtcgcgccggcggcgattggttcaggggcccgcctaccactttggtgggtgcggaccgttggtccgcactacccttcagacacctgtgccccagcattgcgccgaccaacggtcggcacccaccttaagaggatcacccgagccagccctgaagcgcctttggtgggtgcggaccgttggtccgcactgccttcatacacctgtgcaccggcattgtgccgaccaacggtcggcacccaccttaagaggatcactcgggccagccctggagcgcctgtggtgggtgcggaccgttggtccgcactgccttcatacacctgtgcaccggcattgtgccgaccaacggtcggcacccaccttaagaggatcacccgagccagccctgaagcgcctttggtgggtgcggaccgttggtccgcactgccttcatacacctgtgcaccggcattgtgccgaccaacggtcggcacccaccttgagaggatcacccgagccagccctgaagcgcctttggtgggtgcggaccgttggtccgcactatccctcaggcacctgagaacagccccaggtgaggtcagctcagcgcttccgccgcttccagggtgttctgcatcaacgtggccacggtcatcgggcccacgccacccggcaccggggtga

SEQ ID NO: 530863 - DNA, 2733 bp, Stenotrophomonas maltophilia
atgctcgggttgacacttcgagaggaattccgcggcaggcgcctaaagggcactgcaatcgagctgtcgaatgatcagcagactggtgcgacccagattgcctccaggcagtttttggagattacctatcccacccatgatctgttgaagggcatggaggccattggccccaatcaaggtcgtccggttgttgtaatcggcgaacgcggtctcggtaaatcgcacttgatggctgcgctctttcacgctgtcaccgatcccgcatcgacacgcgcgtggctcactgcgtgggcaacaaccctcgccgactccagcgtcgggaagatcccgctgcggaatggcatgcacgtgatcggtgagagcttgcatcgccaccggtacaagtttctgtgggacgttctgtttgagaatcatcctcacggcactttcatcaagggcaagtgggatggccagggaacgtcgaagaccgaaatcccatccgacaagctcatcgttgagctgctagagaacaagccgacgatgctgctgctggacgagttccagacatggtacgacagcctcaccaacaccaagcagtacccgtggaagaattgggcattcaacttcatccagattctctcagagatcgccaaagagcgacctgacttgctggtgctggtgatctcggtccgcaacggtggcagcgacgcctatcagcaggtgcatcgcgtcaacccggtagccatcgattttaaggcaggcggtagcgccgaacgtatccagcaggatcgtcgcaggatgctgctgcaccgcctgtttgacaaccgcttgcagattgccagcggcaccatcgaatcgctggtcgagcagcacgtcaccgaatccttccgtctactggatgtgccgcctgcagaacaggatcgcaagcgccgcgaattcaccgaatcctggccttacgcgccgcacctgctgcgcctgcttgaagagcaagtgctgattgccaccgatgcgcaggaaacgcgcgacctaatccgcatcctcgccaacctctacaagagccgtggcgaggctgttcccgtgctcaccgccgccgacttccggctggacgatgaatcctccggaatcggcgccttgctggaagccgtggcaaatcagcatcaccgcacgctgcgcgaaaaggcgcagcagaatatcatctcggtgcaggaagcacggcacgaccacgccagcatcgccccgcacctgcaagagctcgtcggtgcgctgtggctgcgctcgatcgccgtaggcaatcttgctggtggggagccggccaccttgcagctggatatcacccgtggcaagccggtggacgacaacgccttccaagtcgagctagctaccatcgtagagaacagcttcaacatccatcaggaaggcaccaagctgctgttccgcgaagaagaaaatccgcgtgccaagctgatggcctacgcccgcaacgataagctatttgccgatggctcggatcaggcgcagctcgcccgacaggtgcgctacgtcatcgggggtagcgacgagatcgccaagaatttccgtgtaatagcccttcctaagtcgtggggtactgatccgtggacatcgcttgatgaagccgagcaacccgaaaaatgggataaccgtctgcccatccttgtgctgcccgaggagccggaaaagctagatgctacgctaggccgctggctcagggaccagttgcagaagcgtcgcaacaccgtgcgcttcctgctgccacgaccggccagcaccaacgctttcctggatcgcgacttgctcatcctctcccgcgccgaaatgaaggcccaggaatggggtagccaaaatccagaatacaagaagctgcacaaggaattcgagaacacgctgcgcgacaatctcaggaagcgattcgatcgctttgccgtcctgcaccgctggaatttcagcgaccccgcgcaatgcaagttcagcgtcgaacgtctggacaagcaaggttcgcagattcctgaggccatcgaagaatcgctgatcggcgatctgttcgtgccagaggacttcgaggagctggtgctcgaattcgccaacaacaatgaatcggtcggcaagctgctgcgcgaactgcaagagccgcgaccggctgggcaggactgcatcccgtggctgggcgaaacctcgatgaaagaacgcctgctgcgcctgtgcgccaagggcaaagtctccatcaacgtccgtggaatggagtatctgcaaactcatcctggcgaggatgaagacaccgcgtggcggcgcctacgccccaaactttcgctcacgggccggcatctcgacgacgtgttcgtgatgctgccctcggcggtgcccgcgactggcggttccatccctcccgcaccgtccctgaccggtgccgggatcttcggtgatgatggcgcaacgcccccagtgtcgccagcgccggaagcagaaacgactacaggcgcgtcgtctctccccgcaccgggcggcatcttcagcggtgatggcaccaccagtaaaccgcgcatctgtttgtcgaatccagctacgtcgccgcttaacctgatcggaaagatcgaagcgtggggtatcggcccggccacgaaggtagcggcggtgtccatcaacgtctccagcgccaccggcgcgcagctcaaggagctgctcaggaaactgcctgaaggcatgacctttgagctgaaccttgaaaaggaggatgactga

SEQ ID NO: 530864 - DNA, 990 bp, Stenotrophomonas maltophilia
atggccctgaacgtcgctacgctgcaagccttgacgcagtgttcggatgccggagcatggcgcgtcatcatcgaccacgtggtcggaattgctagcaggccactggccgcaggcaacgcgcccagcgaaatcgtcaaacgcgaccgcgaaatcggcgaactggatttgttcctatcctctagtggttgggatctgtggcaggccttcggcggcagcgtcgagcgcacctcggggcgcttggtgcgctggtgggccgaacccttcagcgccaaggctgtgctgatcctcgatggtctcagcctgcgcgaactgccgtggctgttgcagggtgcgaaggagcgtggctttgcaacgcacgaggtcagcgccaacgcttctgagctacccggtgaaaccgatgagtttgcgcgttcgctcggcttcgctagccgcagcaagctccagaacaacggcggtggcctcgcgcacaagctgcaagccgcctgcaccgaatcggtggatttgccatggaaggactgcgaagccctgatcggcagcgcgccgaatcagatcttttggcaccactggcctgacgccaagttgcacgacggttccggtgcaggccaagggttggagccgttgacccgggatgtggccgagcagctgtctagtaatgacttctgggctttcgtcgagcggctggcaaccggtcggcggctgatcatcacctccgatcatggctacgcggctactggctactttccggacgcggctggcgaagtcggccagttcctcaagcagacgttttccagcgggcgcagcaggacaggcacgggtgacaccggcccgttcgtgccgcccgtggcattgcaaatcatcagcccccaaggcgcgcacctgttggccttgggccgtaggaagtggcgcagccaaggcggctacccaacgctcacgcatggcggcttgtcgctgcttgaagtgctgtcgcctttcgtcgagctgactaagtaa

SEQ ID NO: 530865 - DNA, 498 bp, Stenotrophomonas maltophilia
atgagacaactgctagatacggtgtggcagcgtcgtggcaccagttgggtgtgggatgaagaaacccgcaaccaagtttgcttgcccagcgaggtctggagtttgcgtcagttcctgcgttcggttgctagctggccagaggaactgcctagcaataatggcaggacgcttgttgtcgccgggctcgatggcagcctcgatgtactgacgccgaccgatgccgaagcttggctgggcgacgtgatcaagccagccgtcctatcatttcaagacgaatggggaagcgatggtgcattggtattctggctgcctggtggccagaaccgcgtgaggccacatcctgccacggatgaggtgggctggctttgtcacacgcctcacgggcaccagattgacttcggccgcattctgtggggacaggctaacgattatccgcaggaaatcctgctgcgtgacggagctaaacccgcaggactgttctaccttcggatcacctga

SEQ ID NO: 530866 - DNA, 2772 bp, Stenotrophomonas maltophilia
gtgacgacagagattcattttcaacccggcgagcgcattacccatcacgagcacggccagggcgttgtgctcgatacggcgcatgatggctaccttcgggtgtttttcagcgtcggtgagcgccgagtgcctgtggcctcgctgcggcgcgagcttacgcgcaccgagcgcatcctgcgtgccgtggatggcagcgcagagcgtggacgtaaggcatggctgtcctatgaggcgcactcaattccattgttggaaagcgcctccgcgctgacctcggccaagatcgacctgctgccacaccaggtggtattaacgcatcgcattgctaccgcgtcgccccgccgctacttaatcgctgacgaggtgggcttgggtaagaccatcgaaaccgcgctgattctgcgcgagctagccagccggggggagctgacccgcgccttgatggtggtgcctgcgggcctcgtgaataactggcaccacgaattgaacgaggtcttcaatctcgacttcgaggtgttcggctccgagggcgacatcacggaccgcaagaccaacgccttcgtgaagcacgatcggctgattgctagcatcgataccttgaagcgccctgcgcgcatcaagcgcctgctggatgccccacactgggatcttgtagtattcgacgaagcgcaccatcttacggcctacaaaaccggcggcaaagtgcgaaaaacggagaactacaagctggcagaggcgctaaaagatcattctcgcgacctcgtgttgctgtcggccacgccacaccaagggaatcatttccagttctggatgcttgtacagttgctgaatccaaccttgttccgcagcccagaggagatggtagaggagcgccatcggctcaacacagtgatgctccgccgtactaaggccgatgcttgccaaccggacggctcgccgctgttcgcgcgccgttgggttcacaccgaatcgttcttgatgaaccgggccgagcgactgttttacgaaaggctgcgcgaatatctggaagacggtttcgacctcgcgcgccgacaaggcaatcgagggcgggctttgggtttcctgatggcaatctttcagaaaatcgcggcatcgagtttcgctgcggtgcgtcgcacccttaagcgccgcctgctgatgctgacgttgcacgaagcgtttctgcgtgacaaggagcttgacattgaaggccgcgagcggctgaccgaggaggcgcgtgagctgattcatgaggaattccacctgccgcgcgacagtgtcgggcgcagcgaagttgatcgagtgttggctgatttgaagtatcggctgatgaagaggctggacgaagaggcgctggagacggcatctgacgcatacggcagtgagtatttggctgcacatgcggaggaagctgcgtcagccgtagtgaatctgcatttgccggaggaacggcagcgcatcggcgacctaatgcgcatctttccgacgcaatccgagaccaagatgcagaaactgctagacggcttgggtacgctgtggcggcagaatacggatgagaagattgtgatcttcgcgacgtatcttggcacggtagacatgattgcccgcgagattgagcagagcttccctggccaaggtgtcgtggtgctacgtggtggcgatcacggcgcgaagctggcggcggagcgacgctttcgcctgaaggatggtccacgcgtgctggtctgcacggccgccgggcgagaaggtatcaacctacagttcgcccggattctcttcaacttcgacttaccgtggaatcccatggatatggagcagcgcattggtcgcatccatcgctatggccaaaaccacacggcgcaggtttacaacctcgtactgtcggacacgatagagggccgcatcttcctgctgctggatgagaagttgaccgagatcgcgcgcactgtcggcaaggtggatgagcaaggcaacgtggctgaagatctgcgtgcgcagattcttgggcaattatccgaacgcttgaactacgaccgcctttatcaggaggcgttgtccgacccggagctgaagcgcacgcaagtggagttggaagcagctctatcgaattcccgtgaagcccggcaggtggtctttgacctattccaagacctcgacggttttagtctcgacgactacaagcccttctcggatgtgtcgaccagtctggatcggcttgcgcgctttctagcggcggcggtcacggatcgccagcaaaaactggtcagagtggacgatgcgactttcgcccttgtcactaccgaaggtagttgccaggcgcgcttcaccctgagtcgtgaggctgcgacgagtgaggatgcgctgcacctgattggattggatcacccattggtgcaggacgaattggaacgttggcgtggcatgtcaccggaggatgttggtatctcggtgtccagtgacgtggacgagccaatagtcttgtcgctttggatggttgaggcgtccgctggcaacggcgagcgacgcgtggttttgcagcctatcgccgttaggcaagacggcacgagggctccgtccgtcgaacgtctctgcgagaagtatctacaagcacaacctgctgcacctgtcttcgaaccacaacagcggcttgatctgttcgccggagtagtagagccaatcttgcagcgtgagctaagaagcaaaggtgctgcgagcgacgacggaagttactctgtgaaattgatcggatacattgaaattagtccgaaataa

SEQ ID NO: 530867 - DNA, 609 bp, Stenotrophomonas maltophilia
gtgactttgcgctcgatacaaaccaaaagggcgcctctcggcgccctcgagcttcgaactagaattgagagcctctatacgatccgtgtatttcttctgatttcctctcaaaccgctgtatcaaagatactctgctatcagcctgagcactttcttaaactcgtcgtctgccccgccgcccccggtgcgtgttccgcccaaggccgcagtcgtattcctcttaaacgtatcatagtcgtaaccaaagccggcgcgcccgaaagagccactttgaactgcaatccaagtcgtcaaatcatgctgaagaccaggatcactcgccacgttataaggctttgtaggatcagccaatttaatgcgtccaatgtgcgcagggtatgcctccaagaacttctgcgccacccccactgcttgcgtgacatgcccccgagtaccatcagactgccctattcccttctgaaccaagttccaagcgagatgagagttgggcgtgtaattctttatatcactcaaacaatttttatagaaccactctttagatttaagagacacaacaatatccttttgatgaaaaacactaagatcactccgaccctacaattaacttaa

SEQ ID NO: 530868 - DNA, 456 bp, Stenotrophomonas maltophilia
atggcaaccaagaaagctgcgaagaagaagcccgccgccaagaaagcggtgaagaaggtcgcgaagaaggccgctgccaagaaggcagtgaagaaggcggcgaagaaggtcgccaagaagaccactgcgaagaaggcagtgaagaaggcggcgaagaaggtcgccaagaagtccactgccaagaaggccgtcaagaagaccgcgaagaaggcggccaagaagactgccaagaaggctacggcccgcaagccggccaagaaggtcgcaaagaaggcgactgccaagaaggccgtcaagaagaccgccaagaaggcagtaaagaagaccgcgaagaaggctaccaagaaggctgccccgaagaaggcagcgaagaaggttgccaagcgcaagccggccgcccgcaagaagaaggccgctccggtcgctctgccggcaaccccggcgccgctgatctaa

SEQ ID NO: 530869 - DNA, 897 bp, Stenotrophomonas maltophilia
atggcgatcgtggtagccgacgcggaacatgctctgcgccgcctgcaggttggccaggtaagcgcctggctcggggcgcagcaccggttccggatcgaccggatccacgggatccacgggatccacagggtcgaccggcgggcattgcggcaagccggggttggcctcgcaggggtcaggaaccgtcgacagctgggaacgcaggtaccagttgccgtcgacgccagtgcccttgtgcaggaagtactcgtactgaccgcccactgcgcggccggagaggttgaactggccgttggaagcgccgccgacggagatcagctcgatgcccctgtcggtctgcgcacctgcgccgccgacattgttgacgcgcacgttggccgtaccgctggtgtcaccgccgatgatcagcttgtcggtggctgcgtcgtcgccggccagtacggtgttgaagacgatcgtgccatcggcgccgctgaagttgccagccacgttgagggtgtggaaggcggagccgtcgccgagggcgacgacgccatcgttgccgacactcaggctcgctacatcgctgttcttgttgagctgccactggccaccctggctgagagcgacgtcgattgccccggtaatgccgccgaccagcgatgcgttgtcgcgcagcgccagcgaaccggttgccccggcaccggtgcggagatcgccgcgcaactggctgttgctgacatccacgtcggcgtggactttcagcgctggatcgcgggtattgggctggatgtcgatcagtacaccgttgccagcgatcagctcggcgccgttgcgcagagtgatatccacatcggtatcgcttctgaagctgggccccacgtagatcgcgctgcccgtggtgccttcgaggcgtga

SEQ ID NO: 530870 - DNA, 171 bp, Stenotrophomonas maltophilia
atggatgacgaagtggccgatgcacgcgtgccgcgcagccgtggcgagttcagcggcggcgcatcggtgaagtttgccaacggcgtcggtgcctggggcggcctgtcgctgcagcgggccagcggctatcaccagaccagtgcgcaggtgggtgtgacttacagctggtga

SEQ ID NO: 530871 - DNA, 261 bp, Stenotrophomonas maltophilia
atgagcaacacggccacgccggaaaagaccaaggaagtcgcgatctccggatcgccgctcgtggtggcatccgggcaggacctggatgtcgcgctgagcaaggcccggcttctcaccgatcacgtgcaagccttgctgtggaaaggcatgcgagatgccgatggcaaggacgtctctttcggatacgacgaggtcgtgacgatggattttcttctcgatatcgcgaccggcctttatcgggctgcaggagccgaagcatga

SEQ ID NO: 530872 - DNA, 384 bp, Stenotrophomonas maltophilia
atggcgaaccacagtgtacccccctcccccgccgctaatgcaagcaggctcgcaataggcgagcactacctgacctccatgtggaaggacaaccctctttccgattgcctgaccaaccgcctggtcaaggtcgaccagaacacgaaggccgccatcgccatcctggacgtcatccgccgcgacttcgcgtccaagcaggatctgcgggatacctgcgaggaagaagaacgagtgctgtatgtccccctctctgagcatgccgtggactgcctcatgctgggtatggagagcctcctctcagtgtcggaggacctgctcaccgacctgcgtgacaacgagcgggacatctgccgccagccgctgaagggggcccgccatgtctga

SEQ ID NO: 530873 - DNA, 720 bp, Stenotrophomonas maltophilia
atgaacacccgtaaagccaaacctagcgctcaggacatcgcgtcggccgccaagctcaaagccatctggtccgaaagagccaggcagaggggccttactcaggacaagctggcgcaagagctcggcatcacccaaggcgccataagccagtacctcaacggccggatcccgatgaactaccggacgcttcgggccttcaccgatgccttgggaatcgtggagaccgacatccggtcggacctgccagagcagcagctcaatgctccctccgcccctaccgaggagtacctggaagtattagcgctaccccaatctgtgggtctaagggacgattccgaggccgaggacgagtacgcccacgggaacgccatgaagttccggaagtctgtcctgcgccaaaaagggctgctgacccggccacttgcaatcttctacgcccgtggccgatcgatggagccagtcatctcagatggggactcgatcctcctggacacctctgatatcgacgcggtcgacggaaacatttacctggttaggtggccggagggcgagaatcaggcctacggggtgcggcgtgccatgacgctcgagggcgaggtattcttcactagtgacaaccgccatgcggatagccattggctgaagccacgtcgaatgctatccgaggggaaagcaatcacggtcttgggccgtgtccactggattggaggctggaggtag

SEQ ID NO: 530874 - DNA, 462 bp, Stenotrophomonas maltophilia
atgagaaatctgacattggcacaggctgctcgcgatgcggtgtacttgtgcgcagcctgcagcggcaaccggaccgtccgaatcagcttcacacgaaaccccgaaggcggcatccgccgccgccccaacctggttgccgcacaatgggcttgggcgggtagcgaatcgcgagcaaagctgctcgtgcgccggcttcgccgccagtgggcagtgcgctacgccgttgggcagggctactgcttcgactatggagaggagggcgcgaccttccgtgacgggatcaacctggcattccttgaggtggttggtggggcggccacgtgggagaagctggggctggaagccttgcggctgatgcgcaggatgccggtcgcaccactggctttcacgagtgacgcttcctttccgtcttcccgggcttggactggcctccgacatgaggggcggattgatacaccgtag

SEQ ID NO: 530875 - DNA, 630 bp, Stenotrophomonas maltophilia
atgctcggaactggctcgagacaaaatggcaaaggtgctgatccaagaagggcgccacagggtcatgcgttgatgcggatgctaggatccgcaaaggccctggattggccggggtgccgaggagatggtgtgggttatccgattgaagctttgaggcctgttgaccctaagaaggtcgcacacggtcgacttgtactgatcaaacatgattgggcgctccgttgcaacctggatctcgggcacgggcccggacagtttgcccttcacttgacgggtgattcagttggatcagtattgcccatcgaagtggctagcgctctgacgtttgccgatgattacaagtgggagattcgtgtcgaatctccgtcgacggcgcggtatgacgatgtctttcacagtgggcaattgattgtctgtgaaaatggcgaatccgccatatcatttacgaatgaaggtgggcagctagtgccgaccggtttcgtgtcccctgatggagtagacgcgtcccagaattcaagcataagggcgcggaatcggcactggtttggtcgctatcaaatctggatccggttgcccgacggccagttccccaacggccccctcttcactgtggatgtctcgaacaagtga

SEQ ID NO: 530876 - DNA, 444 bp, Stenotrophomonas maltophilia
atgagcgccagcaatcgcaagaccgccagcttcggagtgccgtgggagtcggcctacgggtacgtccaagccgtccgcgttaacaacacgatcttcgtgtccggacagctgtcccatacgccggaggggcagttggtcgcacccgcagagctgggggcgaatggtaagcccgccaacttcgacaccatggaagcccagatgcggcgcacctacgagaacgcgcaggtgctgctggcagagctgggtgggtcgctcgctgacgtggtcgaggaaacgctgttcgtcatcgacgttccggcggccttcgcggcaagcggcaaggtccggccggccgtgtacggccagcctgtgccgcaggtggccagtaacctgattggagtctcggcgctggccttccccgagcagctgatcgagattgcgttccgggcggaagtgcagagttga

SEQ ID NO: 530877 - DNA, 1134 bp, Stenotrophomonas maltophilia
atgagccggcgttggatgttcgtgttgatgctggtgtgtgcgctggtgctggtgatgccgcgggcgtgggcgcagtggccgccggaaacgcatccggcggaccagagccgggacatcgtgatgagctgggatcgctcggcggtacccggtgatgtggagttgtgggcgccgcggacggtgttgggattcagtcacgacctggcgctgaagtatgggcagatccatgtggtttgtgagtctgcttcagatagtgaattcggtcggtgcccgacggaaggagattcatcgatagttagcgggccgtccgaagtcgccttgcggcttgtagagatccggaccggcctgcaggcagagcttcggctgctcggaagccttcagagaatactgaacgactggacttgcagcccggactactgggatagcagtcagcgtgcgctctatgaagcgttctattacacctgtggtatcgatcagccaatcggtacgggtgcgaggcttgcgcttccaccatcagaactggcgcgcctcgtagcaggtcactggaaagccacgatgcgcctgaacatcaaggccgaccccgccgcagcacccgtcgccacagccaccttcaacttcgatttcaccgtcaccgactacgacgcgatctcgatctacttcccgaccttcgacaccgtcgcgccgctggtcaatctcgatctgcgctacgaccccatccagaaggtggtgggtggcaggaaacagctggatatgtgcctgtacgacggcctgggttcgcagagcgaatacctcgacgtcacggttcgcgacagcggtccacgcccacctgcagggtcggacttctcgctctggcaccgcgatggcggcagcgatgccagccagcgcctggactaccgcgtccacctggactacggcggccaccgcctggcgatgaagcacaacgtcaagcagcagctgcgcggcatcgacagcgcacagctgcggctggtgatgctgccgggcatcagccagccggtgtactgcgtgcccacgccgctgaccctggaaacaccgcctacccctatcgccagccagcgccccggcctgtacgagggcgagctgaccgtggtgctcgatgtccccactgccaaaccctga

SEQ ID NO: 530878 - DNA, 138 bp, Stenotrophomonas maltophilia
atggcaaccaagaaagctgcgaagaaaaagcccgccgccaagaaggcggtgaagaaggttgccaagcgcaagccggccgcccgcaagaagaaggccgctccggtcgctctgccggcaaccccggcgccgctgatctaa

SEQ ID NO: 530879 - DNA, 978 bp, Stenotrophomonas maltophilia
atgaagatgggaatgcgcggcgccgcggcgtcggttctgattctggcgatgggcacttcaggtgtcgctctgtcgcaacaatcggctgcccccgcagccgccaaggagaccgcaaccttgaattcccccaagcagaagctcggctacgccatcggcctggacgtggccaagtcgttcaccccgatcgccgatgagatcgacgtggccgcgctgcgcaccgccgtggagcgttcgttcgaaggcctgcagccgcagatcacccaggaacaggccaaggccaccgacgcggccctgcgccaggtcgtgatggcccgcagcggccagcaggtgccgggcatggcgccgggttcgcagccgccgaaggtcgaccgcgtcaaggtgtcgcagatgatcggttcctactctgtgggcccgtcgctggcgcagctgaaggacgacatcgatgttgcctcgctgtttgacgcgatcagcaccggcctgaccaagggccagccgaagatgacggaagctgacgcgaccgccaccatccaggccttcatgggcagcaagcaggctgaaatgcaggccaaggctgccgctgctgcgcagaccaaccgcgaagaaggcaatgccttcctggccaagaacaagacccagccgggcgtcgtgacgacggcctcgggcctgcagtaccaggtcatccgcccgggtagcggcgagcgcccgctgccgagcagcaaggtgcgcgtgaactatgaaggcaagctgctcaacggcaccgtgttcgacagctcctatggtcgtcagccggccgagttcggcctggaccaggtgatcaagggctggaccgagggcgttgcgctgatgccggtcggttcgaagtaccgcttctggatcccgggcaatctggcttatggcgagaacggcacgccgggtggcccgatcggcccgaacgcgactctgacgttcgacgtcgagctgctgggcgtcctgccgtaa

SEQ ID NO: 530880 - DNA, 693 bp, Stenotrophomonas maltophilia
atgcgtggatggctgggccagcctcagtgccgaccaacggtcggcacccaccagggcaggccgggcagtagaagccgctcggcagtagatccacgccatgcgtggatggctgggccagcctcagtgccgaccaaggtcggcacccaccaaagcaggccgggcagtagaagccgctcggcagtagatccacgccatgcgtggatggctgggccagcctcagtgccgaccaaggtcggcacccaccaaagcaggccgggcagtagaagccgctcggcagtagatccacgccatgcgtggatggctgggccagcctcagtgccgaccaaggtcggcacccaccaaagcaggccgggcagtagaagccgctcggcagtagatccacgccatgcgtggatggctgggccagcctcagtgccgaccaaggtcggcacccaccaaagcaggccgggcagtagaagccgctcggcagtagatccacgccatgcgtggatgctttgcctggaaggaatcctaaagctccagcacgcgccggtaactcaacggcccacgcccatcgcgcaggcccaaccgcagttccagcccggtggccggcagcacctcgcctttgctcggcagcagcgcccacccggcgcccggctgccaggcgcgtacctcgaatcgctgcacatcctgcgccaccgcgatcccctttga

SEQ ID NO: 530881 - DNA, 636 bp, Stenotrophomonas maltophilia
gtgcatgccgccgatggcacggccctgcagagtgaacttgccattgctggcaccgtccacctgcaccagcggaataccgttgacggtctgcgcgccagcaccggcaatgttgttgacggtgacctgggtggtaccgctggtatcgccggtcacgtgcatgcgggagcttgctgcgtcgtcgccggccaacacggtgttgaagtgcagggcgccgccattgccggtgtagttgccgttgacggtcagctgcggataggccgcagtgtttgcagtaccaaggaaaatgtcacttcccgcacccagggtgaggttgccggtgttgctgtcgccggacagcgtccagcgaccgccctggtcgacgatgacgtcggccgggccaaggatgcggccggtgaggtcgaggccgtcaaggaagcgcagcgtgccgctggcggtatcggcaatggtgatgtcgcccttgagcgtggaggtgcgggcggtgaggtcgaagtgggcgttgtcgcgggtagagatgatgacgccgttgctccccaccagagtcgcatcattctgtatcaacagcgtatccgggcgggatacagaaggcagatgagcgccgaacagaatggcgctgccgttgcttgcttcgacgtgtga

SEQ ID NO: 530882 - DNA, 759 bp, Stenotrophomonas maltophilia
gtgcagcagaacagtgtgatggaagggacaggcgcgcggtggccggagcggctctgggtggtacggcatggccaaagcgccggaaacgttgcgcgtgaccacgctgaagcaagcaacgtcaccttgatcgagttggaacaccgtgacgcggacgtacctttgtcctcgctcggggagcgccagtcgcaagcgctggcggcctgggtcttggaacttgccgagcatcaacgcccacagatcttgctgacttctccttacttgcgtgcaaggcagaccgcccaagccgtggtcgacgcgcttggccccgaccgccgtctaatcattgatgagcgcctacgtgagaaggagttcggtgttcttgaccgctacacctctggcggcattgtcgctaccttcccggaactggccgcgcagagacaactggtcggaaaattctactttcgcccaccgggtggagaaagctggtgtgatgtcatcttgcggctgcgcggtgtggttggggacctccaacgcaaccacgccggtgcacgcgtaatgatcgtcgctcaccaagtgattgtgaactgcatgcgatacctcttggagggcatggacgagcaaaccatcctcgacattgaccgcgaaggcgatgtgcccaactgtgggatcacagagtactacgctgcccacggtgggcagcttgccttggtgcatgccaactacatatcgcctgaaatggccgaggcaccagcccccgcctcgcctgactaccccgcttga

SEQ ID NO: 530883 - DNA, 525 bp, Stenotrophomonas maltophilia
atgaagccgatcattttggcgctggaccttgagggaacgctcatctccaatgcaatcagccagatccccaggccagggctctatcagttcctcgacaggatccatccgctgttcaatgagctggtgatctacaccacagttcccgaggatcgctttcgtagcatcgctaccctcctagctcgcgaaggcagcgtgcccgattggttcgccgggctgacttacatcagctggtcggggaagaccaaggacctgcgcttggtttcgccgcgtctgggcgaggtactactgcttgatgatcacgggccctatgttcatcccgggcaggaacacctttggattgagctaccgctgttgggatctccctacccgccaagcgacgatggcctcgatcttgcacttcatcgattgtttgacgcggttgagaatgcgaacccaactccagggatagcggcaacacacggggggacgcggcccgtgttctgcgtgccgcccagatcgagttcgatagcaacgcctgatagttag

SEQ ID NO: 530884 - DNA, 1677 bp, Stenotrophomonas maltophilia
atgccgcagcgccagccgctgtgctgcttgatcgggcctggcgactccgggaagtcgacggttctggacgccattgaggcggcgctgtcttcccgttggtacaccttcggtgaaggtgacttcagggaatgcgatacatctcgaccgatcaggatcgaggtaacgatcgccgagctatccaggccgctgctgtcagatgaaaagtttggtctctatatcagaggactcacccctgacgatacgctacgcgatgagccggaggatggtgatgagccggtcctgacggtgcggcttacagtggatgccaccatggagccagtctgggaggtggtcaatgatcggacaacctatccacggaccatgtccaatcgcgaccgtgcgcttttccgtgtcgttcggcttacaggcgacgatgcgcggcacctgacctggggccaaggctccatcctatccaagctgacggattctggcgacgaagcggctcagcagcttgcagaagcctacagggtggccaaggcgagcacgcggttgcacgagatcgaaagcttggcaaaggtggctaaagaggcccaggcgcgagcggtcgaagtcggtgcgattgtggaaaatgggtaccttccggggctggagctgctaaagggcggattctcctctggttcaattgcgctccatgatgggacggttcctctccgcctggccggtaccggtacccggcgtctggcaacgctggctattcagcgtgcagcgatcgacgaaggtgcaatcatcttggttgatgagatcgagcagggccttgagccgcaccgcatccttggtgccattgttcacctacggcagtctcaggctgcggccgcggcggcacgccagccggctggtcagatcgtcatgaccacccattccgacgtggccctgagcgagattccatcggagggcctgtacgtctgccggcgtaaggcggctggcgcgctcaaaattctccatcccgccgatcaggacgcactgcgacgagtgctcaaacacatgccacgggcgctgttcgctcggcgaatcttggtgtgcgaaggcgacaccgagttggggctgatgctaggacttcgggagctctttcccgcccggcacggcggtgcgtccatcgaacagcgcggagcggcgatcgtagatggcggcgggaccaatgcaccgcagatcgccactgcactggctgcactgggatacgcgacggcgttgtatcgggactccgacgttcgagtgcccacaaagcagcagaggagcctggacgccgctggcgctcacacgatcacctatccgaccgaaatggcgatcgaggaagccttgttcgccggtgttttcgacgacgaccttgtagacgaactactaggtgaggcggagcggtacaaaggcgaggctaccgtgatcgatcagttgaacaaggcatttccagaggctgagccaaacggaatagggaactccaccttcaaagatatggatttccagttggggctagagcgagatgagatcatgaagaggctaggtaggctggccaaacattacgcatggttcaagaatcagtacatcgcccgcgggctggccccggtagttgacaaggctatcgctcaatcaccgacgtcagaatttgcgcaggccctgatagagattgaagggtggctctatgcttga

SEQ ID NO: 530885 - DNA, 1398 bp, Stenotrophomonas maltophilia
atgcttgacccaaagagtctcttgggcgtgcgtcgagggagtgtggtcgcaccggctggccacggaaagactgagctgattgccaggctcaccggccttggaggaagaacccttgtcctcacccacacgcatgcaggggtccacgcgcttcgcacaaggatggtccggctgggcatcgatcctcgcgcagccgccgtagacacccttgccagttgggcatcgcgctacaccgctgcgttcccagcgttaggacggccattggggagaatgccggttggcggcgaatgggggcaactctataccggcagcctggatgtgctttctgcctcacctgttcgagacgtcatcgctgcgtcctacgatcgggtacttgtggacgagtaccaggactgcgacttggcgcagcacgagctggtaatcgcgttagccgagcaactgccaacgatcgtcttcggcgatcacatgcagggaatctttggcttcggtgggaatcccagtgtgtcgtgggaacaggatgtgtttccgaactttcccttgctggcaaagcttgaggaaccgatgcggtggcagaaaagcaatccgaatctgggcgaatggattgcgcacgtgaggcagcagctggaacacggcaagcccgtggatctgacagttggtcccgcgatctatctcccctgtgacggcgagtacgacctatccccgctctttcatgagctggaggagtctcgggagtctattgcagcgattcactgccggcgaggtgtgtgtgatcaactggcgaagttgagcaaagccgcctaccaagcgattgaagatatagcctgtaagacactgcaggagtttgcagcggcttgggatcaatcatcaaatgccggtcgagaaggcttgctgaaagggttggtcgatgtggcaaccacgtcgaagaagctgaaagtcggagagagcgatacgacggaggatgcggagatccggaccatgattgccagctcctatgagcagttgcgtattacgggccacccacgtgaggcattgaatgtactgtcagcgctccggctcgacagccgtatgagaacattccgggcagagctgattcgggataccaccaaggctctcactgcccttgcggatggaaagcacgccacgttggcgcacagtgccttcgcgattagacagcgcgttagccacatgggcaggcatcttccgaagcgcacggtttccacgccactgttgctcaagggtctagagtttgagcgcgtatcgatccccgatgcggttcacttcaacaaggaaagggatcaagcagcaagagcgaagctgttctatgtggctatctcccgcgctcgctcttctttggtgatcgcgtcttccagccctgcggtgagctttcctatcccgggctga

SEQ ID NO: 530886 - DNA, 393 bp, Stenotrophomonas maltophilia
atgattaagccaattggcggtagcgctaccgccctggaaggaccggggctgcgggcattcagcctgatagcggagctatggaacctgaccgatcaggagcagtccgcgattctgggcaggcccatcaatctcgctggtgcgcagctagaggcaactgcggccgatgaaatttcgccggaaacactcgagcggatcagttatgcactcggcatctatcgggcactccacatcctcttccctgatcaacagcaagctgacagctggatacgacgtcccaacgaagccacgccgttcaagggcggtaccgccgtggccctgatgtgcacgggccgactcagcgacctggcatctgttcgggagtatctggatgctcagggcatagaggatccgtag

SEQ ID NO: 530887 - DNA, 528 bp, Stenotrophomonas maltophilia
atgggtagggccacagccctgatcgctacacttagagtgcgggtcctgcacaacgaacaggttcagacccatggactcaacctactcggcctggattacatgaaagccgacgaagagacgttcgacatgcatccgtcgacgaagacggagaccatccggtccaccttggacggcatgcaccttccgcgcgccatccccaccgtcgtgatgcaccatagcccggtgggggtccagtacgtggaaaaggtcggggctgctctgatgttggccggccatacccacggcggacagatgttccctgggacggcgttcgcttcgttgaccttcccatacaacaaggggctgtatcgctaccggagcacccaagtgttcgtgaccgttggtgccggcacattcctgcagaagagccgaatcgggacgggcaatgagattgacctgatcaccttgctcctgaagggacgggagacaacgttgcaagcacgtactccagcgcgccggaatcggatagggccatgtagcgcgacgtga

SEQ ID NO: 530888 - DNA, 222 bp, Stenotrophomonas maltophilia
atggctcttggaaagacagccgatctgtacgtgttggacgagccacttgccaatctggacgtcggtgccgaggcggcagcaatggagaagatcatgcaggtcacgaagggtcggaccttggtgatgatcatgcacggaggtcttgagtaccgaaatctgtttgacgaggttcgtgacttggaattgccggctgcttccgtggatcaggacgaggagctgtag

SEQ ID NO: 530889 - DNA, 1215 bp, Stenotrophomonas maltophilia
atgcaagttggaatcattgttgcagcgttgaagaagcaccgcctggctacgttcttgattgccattgagatcgccctggcatgtgctgtgctctgcaacgccatcttcatgttcatggagaagagccgggcgctcaatctcgatagcggtgtcgaggagtcttcccttggcgtggttcagctttcagggttcagcgccgacaacgccaatgacatcaatgctcgagtcatcaacgctattcgggccattcctggtgttgagtccgtgggcgtcatcagcgcggtgccgtttggcgatcctggtgttcgagctggcgtgaacatcgatgaggcgcttgaacgctctggtggggttctggacttctacctcggcgacgcagtggcgctcaactccttgggcctgaaattgctgtcaggtcggatgcccgactctgcggagtacgcgcccatcgagcagtacgttccgtccaatgccccggtgctggtgaccaagcaactggcggatcgctattggccagggcaaaccgcggtcggccagagcatctgggcgatggatacccgatttacggtaataggagtagtcgagcatcttgtagtgtctcagccaggcggaggagaggcgctgggtaacgattggtcactcatcgttcccgctgttgctggcccgcagttcgctggcaggtacgtcgtgcgtgccaagccccaggacttacctcgcatctttggtcaggtggggaaggtggtgtcggaagctgcatcggatgtggtttttgatcaagctgctagccggccgttgtccgaactaaggtctgactacttccgcggggcgaaggtcatgatgggtctgctcgcagcggtgatcgtcgcgcttctgggcgctacagcgctggggattgtgggcttggcaagctactgggtggaacagcgccgaaagcagatcggcattcggcgggccttgggggccacgcggaaggacatccttcgctacttccagatcgagaattttctcatcgtaacgatcggaatcacggccgggctgatcctttcctatgcgatgaatctaggcctgatgcggttctacgagctaccacggctacccatggcctacctgcccattagtgcaatcgtgctgtggcttcttggccaggccgcggtgttggtgcctgcgctcaaggcctcggcaatcactcctgttcaggcgatccgatcgctctga

SEQ ID NO: 530890 - DNA, 696 bp, Stenotrophomonas maltophilia
atgctgaagatgcaaggactcagtaaggtctttcagattgaacaggtgcagactcatgccctcaggggcttggatctgcacgtacgggagggcgagtttgttgcggtcacaggcccatccggctccggaaagtcgacgtttctcaacattgcaggcctgcttgaggaatctacggcgggctcctacgagctagacggcgaagatgtgtcgcgtctgggagatagccagcgcagccgaatcagaaacgagaagatcggtttcatcttccaaggcttcaacctgattcccgacctaacgctctatgacaacattgacgtaccactgcggtatcgaggccttggtgcgaaagatcgcagggaaaggatcactagcgtccttgagagggttggtctgggctctagggctcagcactacccgggtgccttgtccggcggtcagcagcagcgagcggcaatcgcgcgcgcgttggcgggcacgcccagactgctgctggccgacgaaccgacaggcaatctcgacaccgagatggcccgtagcgtcatggagctccttcaagagatcaactctgcaggcgcgacaatcatcatggtcacccatgatcaggaactggcacttcgggcctgtcgaaacgtgcacattgtagatggccatttgtccgatctggtcaggcaaccaggcggccttgctgcggcttag

SEQ ID NO: 530891 - DNA, 483 bp, Stenotrophomonas maltophilia
gtggattcggtcaccagtgtagggttggccgcagtcctggtgtttctctccaaaaactgggtattggcacgactgacggagtccatccggcacgaatacgacgtacgccttgagagctatagatcacagatcggtcgacgtgagcgcgcttacgaggaaatcgtcaatgctctgtatgacaagttggcgtactacgcggtctacaaaagagactatggccagggcacaggcttatccgcagagcgagagaggaagttgcgtcagacccacaggaaagcctcagcgtctttgcatcgggccaccgatgtcggctcccttttcatttcggaggaggccgtgcagctactagtgaagctgagagatcgccagctggactttgagaacgagcccgcattcgagtactttgactctgagtatgaagagcacaagtcggccttgaccgcgcttctaaagattgcggttcgtgacctcaagcgcacctag

SEQ ID NO: 530892 - DNA, 2262 bp, Stenotrophomonas maltophilia
atgttcctgctcccggcgctgtccggaacggtatcggcagtcgagccgccgccgagcgatcaatggtctgctgcggttgaggcccttgaatcgcgcactaccaccgtggagggcgtcagcgcttctgattcggaatctcgggacgccaaactggcgggactgcgcgccctggccgatgaggccaactcccttggcggcatgctggagcggcctatcgcccaagcaaaggagcgagtggcgcaacttggagactcgccatcggacagcctcgaccccgccatcaaggcccaagcagacaagcttgagggtgaattgacgaccctggaggacctgaaaaagcgggcatcgctcgtggcgctgtcggccgagcaggagctgacaacggcggcacaagcccaagcagctgcactggggcaggaactgttttcgagaagcgcttctccattctcccgcgagctctggcagcccgcgctggaaaacgcccgtgccgtgctcagtccatcgccgtcaggcttggtgcaccaagaaagcagcaccagctccctaaacggcactgcggcgaccattctttgggctgggctcgtcggtttggtgtgggcaggcgccgcgctgttgctccgcttggcccgcgcttgggcgctgcgcagcgaagtagccactcggccgtttgcaaacgcaatgagcgcaactgcgctcctagcactcttcatggcgccgtcccttcaggcctatgggtcacttgagccgctgctgagccaatggggactgagcttgccgtatcaggcaatctggatggccatcgcaaccggcctgctgctgacgatcctggtggccggcttggctcgggccgttctccagccacgcaaccccgagcttgccctgttcagcatgcaagcaaggacctcaaagcgcggatgggcagcgtcggtctggataggcgcggcgatgggcatcggcatagggtgcgaacagctggtcgcccgcctggctctgcaagacgatctcgcgttgcctttgcaggcactgggtgctttctgctctgtctctcttgtcctggttgcgctgcttctactgaggcgcatccgcctgagggcgccgtccactgacggaaacgaagatgcactcgacccagtagcccttgtgatcggcgctgcttggctggcgtgcctggtcattctcttcagcggaacgttcggctacatcgtgctcgccaactggatcgcccagtggctgatttggggagccgtggtgggcgccagcgcgctcttcgtcatgaccttagttgatcgttcggttcgctacatcctggaggtcaagcgtcctcagcgccgcggtgagcaatcgccttcgcgtcgcgtccgccaattctcagtcatcctctccgccgcgctgcgaaccacagtggttctgctcgcttgcggcgctcttttcatgccattcggcgctgggttcacgtccgttcttgagctcaccggcaagctcgcggcgggcgtccagattggagaaatccggatctcagcagcgtctgtgctcacgggcctcttggtgtttgccggcgtggctttcttgctgagagtatttcgaggctggttggaaaatacctatctccccaccacccgtttggcacaggacgcgcgcgactccattaccaccatcgttggctacctgggcaccgcagcagccgtgttgtgggcactcgccgccgtgggtgtcggggtcgacaagctggcaatccttgcaagcgcactctccgtgggcatcggcttcggcctccaggcgatcacacagaacttcgtgtcaggcctgatcttgctggtcgaacgccccatcaaactgggcgaccgcatcaagatcggcgacgctgaaggcacggtgagaaaggtcagcgttcggtccaccgtcattcggcttgtcgaccagtccactgtcatcgtcccaaactcggagctgatcaccaagcccgtacagaacctcagtcagcagttctcaagacccaagctggagctgacggttgccgtcgatgccaccgaaatagttgaagacacgctcgatctggtgggacgcgagctgagcgagaacaagctcgcgctgcccactccggcgcctaccgtcgagttgatcagcgttgacgagaacaaagcggtgtttcgttgccagattcacctcaagcctcaatcaaacacggcggatcagcgcgtgcagttgatcctggccgtccgacagcgcctgagccaaaacaacatcaagtgcgccatctcctag

SEQ ID NO: 530893 - DNA, 678 bp, Stenotrophomonas maltophilia
atggcagatgtctccctcggtgtggcctttgctcaatcatcgcagccctatcgaagctacgacaccgacaccatcccggcaccaattctaagctgggaaggcgaccacttcttctttcgcggaaccacgcttggcttgaaaatcagtgagggccaaaccagttcgctttcactgaccgcctcccccttgctcaaccgttatcgtcccgaggactcctcggactggcgcatgcgtcagctggatgaccgccgtttcctcgcaaccgctggcgccgagtggcggttggtgggttcctggggcgtcgtgaacgcgaaagcggaagcagaggtaacaggcgtgggcggtgtcttcggcgatctcaaatacagctacccgcttagcgccggcgcagtgaccctcctgcccgagatcggcgcaacctatcagagcgcagagatcgttcgccactactatcgggtctctccctcagaggcgctgcgctctggattcgtatcctacaatccaggccatgccgtgaccccttacttcggcgtcacggcccttcttccactgggtgacagatggacggcgactgggagtctgcggcgcacgttgcttagcgacagcatcaccgacagcccgatgacaaactctgatcacctggacgcgatcgtcttgggtctgtctcgccgcttctaa

SEQ ID NO: 530894 - DNA, 399 bp, Stenotrophomonas maltophilia
atgaagtatgcgattgctttgatgttggtgggcgctgcaggcgcagctcaggcgcagtccgacccggtgcagcgttacgtggagagcgcttttagcgcgatggataccaacggtgatcgccagatcagccggcttgagttcgatacgttcatgcttaagcgcatgcaggttcagcgcgcggctttcgaaacggccttcgctgctgccgatgccaatggcgacggctttattgacaagcgggaagcgcgcattaaccaacagttgagcgacaactttggcaccattgacactaacggcgacagcaagatcagccgtgaagagttgggggccgcgctcgtgggcgcgctgcaggttgaggcagaggccacggccgaagcgctgcgcgcctctggaaagtga

SEQ ID NO: 530895 - DNA, 267 bp, Stenotrophomonas maltophilia
atgtccaagaaggaaaagcggacagtaattggagccgttgtcggcggcctgagcgggtcgctgctgtcgggtggcgatccttgggccaccgtgggcggcgctttggctggcggcaccgtgggcaatgtcacgaccaaagaccgcgaccgggaccgccgctgggagcatgaccgccgctgggaccgggatgaccgcagtcgctggcaacgagagcaggaccgccgccgttgggaacgtgaacgagaccgccgctaccgcggccgctga

SEQ ID NO: 530896 - DNA, 1368 bp, Stenotrophomonas maltophilia
atgtctatgttcatgaaatccctaggttcccaactctcttggcgggtgggcgggattcaacttcttaccttcgtgttgtccctggccatgctgatggcgctgacttggactcccgccgttttctctgttccaacgcagctcgcagaatcgatcgcgcgagcctcgagcgtagagaatggccagctcgtagtgcggagggacgctctcccagatgctcttgtcactgggagaaccgacgcctggctgatcgtcaggggaccgtctggtcaggagcaagtcctgggcaacgttccgagcgaccttgctggccttgcagcacgcttggatgagctggaggaaacccagattcgcagcaacaagagccggctggcggcagcggtatccgtggaccgccgatcagagggcgcttatcgcgtaatgttgggcggcattccacagcagggcgtcgctgagacgctgctcatcgtcggcaagttcatctttctgccaatgtttctgccggttgtgctggtgtcatgcctgatcatcccttgggtcattcgacgcaggcttcggggtattcgtcgcttggccgaccaagctgagaccattgatcttgatcagagaggcacagcgctgcaattcgcggacctacctgaggaagtgcggccccttgtgcgttcgttcaatgctgccctcaccagaatatgggaggcttcggcgacgcgtgatcgttttcttgccgacgctgcgcacgagctgagaatgcccatggccgtgctgcgtgcccggttgagttccctgcctcacagcaaggaaaagttgcgattggtgaatgatctgtctcgtcttgagaccatcgccgaacagttgcttgaccttcagcggcttaacagtcccaacgagcgcttccagcccgtggacctagtgagcctctgcgagtcacttgcagcggaagtagctccaatgatcgtcgagcacggatacgagttcagctttgaggcgcccgacacggatgtccctatccagggcgacgccggcgcacttgagcgcatgctcaagaacttgttgcagaatgccatggttcacggcggtcagcgaggcaccattacgcttgaagttctagccacggcacgagtcagggtgtccgatagcggtccgggcgttccgcaggaagagagaaatcgcattttctcgccgttctaccgattgaataagtcggccagcggcagcggtcttggccttcacttggcgagcgaggttgccacgaagcacggtggccggattcgggtcacagactctccctctggcggcgctagcttcgaggtcaccttgccctcgacggccaagtccacagtctccagccccagccaaggcacaagcgtatga

SEQ ID NO: 530897 - DNA, 675 bp, Stenotrophomonas maltophilia
atgagaatccttctcgcagaagacgacgaaccattcgctgaggcgctcatcgatgccctgacgaagcagggcctggcggtggacaggacccgcaccttggccgagaccgagcacgcggtgcaacaagccgagtaccgtctcctgctccttgaccgtcagctgcccgatggggacggtgccactctggtgcccaaggtcagggcctcccaagtggacctgcctattctgatcctcaccgccatgcacttggtcactgacaaagtcgagggattggatgcgggagcggacgactaccttgccaagccgttcgacatggcggagctgatggcgcgcattcgcgccctcatccgacgcccggctcggatggcgccggcaatggtgctcggagaccttgccttcgatttcgagtccaagcaggcgtttgtgaggggcgccgagctgaaactgccaaggaggcagatcctcgccttggaggcgctttgcttccggcagggcagaacggtgcgccgagcctcgctcgagcaatccgtctacggcttgaacgaccacgtcgagtccaatgcgctggagtcgcacatctcacggcttcgcaaagcactggtcggatctggcgtagacattcacaccatccggggcatcgggtatgtgcttaagcagtccgcgccggaagactga

SEQ ID NO: 530898 - DNA, 768 bp, Stenotrophomonas maltophilia
atgcgtggacttgaagggaaaaactacttggtggtgggcggtgcccacgggattggcgccgctaccgctaaacgcttggccgaagaaggcgcacgcgtcgccgttggcgactacgacctggcaggcgcggaagcggttgctcaagcaattcgagcgagcggcggccatgccgacgccttccgcttcgacctccgcgacgagaagtcgatcgtggccctcgtagaggatgcggtctcggcattgggcagcctgcacggtgtggccaacatcgccgctgacacacgagcggagtcgggcgaagacgtgagcgtcgccgacatggagccgatgacctggacgggtgtcttaaaggccaatctcaccagctacgcgttggttgtccggagcgcgcttccccacctcctggccgtcggtggcggcagcatcgtgaacaccaccagcgacagcaccaaggctggagaaaaggtgaggcccgcgtacgctgcatccaaagcaggtattaacacgctgacacgccacgtcgcttccacttggggcaagcaaggcatccgctgcaactcggtcagccccggcctcgtgctctcggacacagctaaagagtcgctgtcagacgatttccgcaagcacgtgctcgatgcgcttcccctgccccgactcggcgaaccggatgacgtcgccggtgccattgcgtttctgctgtctgacgacgccgcttgggtgaccggccaggtgtgggctatcaatgggggcggcggttatcgtgattga

SEQ ID NO: 530899 - DNA, 2310 bp, Stenotrophomonas maltophilia
atgttcctgcggattgctggggttgtcttcggaatcgcctcgttcccattactgatagggggcgcctacctggcttggctgggtggcagcttctactacttcatctgcggtgccttcctggcggccattggccttgagctatgccgccagaagcctggcgcgttaaccctctttgcagtgctggcggtgggcacgctggcgtgggccttgtcggaagtgggcttggacttctggcaactcgtgccgcgtttgaccccgctgatggtgattgggctggttctaggcctccttaccccactgctggagccctcgtggcgccggactgggttgtgtgtggcggggacctcgttggtgctgggtctgctgaccatcggtgcgatgttcttcccgcacggggtcatctccccagatgacgccgcgccccgtagaactgtagatgggtccagtccctcacggtggcagttcttcggtcgagatggttccgggtcacgcttcggacctgagagccagatcacccgggaaaacgtgtcgatgcttaaaaccgcttggacgtatcgcacaggcgattccggcacgccggggtccgagtatcaagtcacacctacgcagatcggcgatacgctctacctctgcacgccgctgaatcgcgtgattgccctggatgcagatacgggcgaagagcggtggtcgtttgatccgaaggtgccgaacaaccagatctggaaccgatgccgtggcgtcggctacttcgagtccacctccgtggccgccggtgatgcgtgccatgcgcgggtcgtggtcaccacactggatggccgactgatccaggtggacgcccgcgacgggaacgtgtgccctgcctttggcaccggcggggtggtcgacctcaagaagcagatgggcgacatcccaccgaccttctatcagcccacctccatgcctacggtggcgggcgggctgatcattgtcggcgggtgggtgtttgacaacatcggcgtggacatgccctccggcgtggtgcgcgccttcgatgcagagaacggagcactggtctgggcatgggatgtgggccgccccaaggatcagctgccgacctctggcgaggccttcacccgctcgacgccgaacatgtggtccaccccggcggtggatgagagcctgggactggtctatctgccgacaggcaaccagacgccggactactggggggccgatcgccttgaggggtccgagcgcgtgtcttcttccatcgtcgcgctcgacctgaaaaccggccaagaacgctgggtgttccagacggttcaccacgacgtttgggatctggacgtggcaccgcagccggcgctctacgacatcccgcaagccggtggcgctaccgtgccggtcatcgttcaggccaccaagcggggccagatattcgttttggaccgtcgagacggcaagcccgtctttccggtagaagagctccccgtcccacagcggcatcaaaagccagactgggtgtcgccgacgcagccctattcaacgggtgttgcggccatcggtgcggagccacttaccgaacgtcgtatgtggggcgtcacgctgtttgatcagatgctttgtcgaatcatgttcaagcggatgcggtatgacggcgacttcacggcgccttcgactgaacccacgcttttcttcccgggtaacttcggcggcatgaactggggcggcgtgtccatcgatggcggcaacgacatgctgatcgtcaatgatatccgcatgcctcagggactgaagctggtcgaacagcgcaagggaaaagttgagcccagcgccaagcacggcacaggactccagccgcagctcggcgccccttacgcggccgagggccttgatgtgaactccccgctcggcatcccctgcattgccccaccctggggcacattgtcgggcgtggacctgaagaccggaaagctggtttggcaacgccctgcagggaccgtgaaagacgtgaaactcggtccgataaaggtgggcctgcccatcccactgggcctgcccacgcttggtgggccgctgaccactggttccggcctggtcttctacgcgggcacacaggactactaccttcgcgccatcgacagtgccacgggtgaggaactctggaagggacgcatgcccgttggcgcccaggcagcacccatgacctacacctcgccgaaaaccagtcggcaatacgtggtcatcgtggcgggtggagcgaggcagtctcctgaccggggagattatgtgattgcttattcgctaccactatcgcgcggggcagagtag

SEQ ID NO: 530900 - DNA, 936 bp, Stenotrophomonas maltophilia
atgcggcaaaggcaggggctgcgaatgtcgcgctatgacggccggttcgatgttctggtggcgctgcgtgacaaaatcgcagcgtccgcgcagccgtggttcgttttgatcgaccctatgtcgcgtactgatctgagctgcattgaccagtttaatagacagaagcatctggtcgattttacgggctatggccttgacagggcactctgcccctatgtcgttagaattctgggaagtcgagacgaactccttgaagagactgtgtcgctggcatgggagcgccgccaagattggcaggagccgcagccggtctgcggctggttgtgttcaaatctgtctccgggttcgattgctctttccatcaaacagatagctgtcacgcgcacgaaggatgggaatagaaatctgagaagattctacgatccgagggtggtcagacatgcatccttctcggagttccctgtgtatgcgccagatggttgggagcaatggcttcagctaggtttcgatggaaacgcgcttctcgttccacacaggaggcccgatgctgatcgaattggcatcatcccgagcgattcaatccatgaggggtgggtggtccctaccgtcgcggcgatcgcgcagttgcagcgttttggtgaaagtccatcggcgcatgagcaacgactgcaattggcagttcgctgtgggatcgaactgggactctccccggagagtgcggcggatgccgtcagttttctcctgcataaagtgctggtgcatccggaaattgagcagcatccgacggttcgcacgtggctgaagcaagcggtatcaggcgaagcatcgtacgcagatcagagcgccgaggcctcgcccagctggtggcgcgacgtggaaagcgggcagtggcagaagaacatcaaggaagaatcgagggagacgcgacatggctga

SEQ ID NO: 530901 - DNA, 3246 bp, Stenotrophomonas maltophilia
atggctgatggcgccgcgattgcgggaagtgtcaaacgttcagtacagaacacggcaccgtttggcgactgcaagaagtgcgacaaggcaggttttccgatcctgccgatgcgctttgcctacacaccgaaagcaacggtagcccagaccaaggcagcgagcctcgatggtcaagactacagcctgagtgccggcgtactcgcattacgcatgcttagccaaggctacctctacatgctggatgagcgtggtgctggtacgtggaggtcgttcctggtgggcgtcgacggctcactttctgaaatgccgtcggtaacgaccgttgaaccgagcgaggcacaatgcggaagaagtgaccacaatgtacgttcagccgcattctcggttcgggatccgaagcaagccaaaagaatctggctggcctacttcagtgtcgtgcagaccgagcatcagctcgcagtttacgaagctgcgctgctaggaaagactatgcccgagcgaagctcggaagatccagaaattgatcctgcctacgtggaaaggcgctttcaggtctattctgttcctgacttgatgtccgcagcaaaagctggatcgcttgcgcatccccaggcatgccttttcggggacggtctgggcaagctgagcgagtatgcagctgaattcacaggaaagcatcaggtgtatgccgagagcattacgcccggtgccgactattctgcgcgagcttccgctattgcctcgcgaatggcaggtatgcacgaaggtggtggtgttgccgtctatctgcatgatccgatgggtattgccatggaaattcggcattttgcaagcctgcggcgcttgagtattgaaagaatcaataagaaatacagtaggcaaattgcggtcaaacgtttgatcgagcagattggggcctcttggaaagctggtggtgccgacaaggcggaggagtgggtagaggactatctggataaaattgactcgtcgaagattgaaaatttcgagtcaagcttcaaagctgaaattggaaatctcccggcgttgctggacgcacatgttgaagattgcagctctttcgcgaacggctgggctctgcagacgtgcgtaaggcatgacttcgacgtggctgaacccgatagcgttctggaaatggtctgtcagactgcagctgtacttggcggtggtgcgctctgtgacgctgatcgcaagaacatggtcaaggaattcgaaaagccggctgaagagaacctttggtactgggtgatcactggtggtcagaagagcttgcttgcgaacattgctgagaacaaggctgctgatgttcagggcatcattaagtcaagttatagtgtgtaccagtcgtggctggacgagcatgcagcgttcacggcgcaacttcagtcccgcctggcaggtggtcttccggatccaagtgggaagcctggccctgtgcgagtggcggcctatcggaatgcgttggcgacggacgaggcaattaggagtttgattaccggtgcgcaaggaatgctcactgatatcaaatttgctgggtttaagaacctgcggattttttccatcgcgggtgctctatggttccgtactgcagtgcagccggttctggaggtggtcaccgttgcggattttattcgggataacaaggagagtgcatgggggcacaaactggaggccaggctgcagcggtcggtggatccagaaggtgtgcgccgatcctcaatcaatcttgctgatgtcacggatgaactgggggaggctgggcggaagaaaattccactactgcggatacagtggggtgacgtcattgaagtggaatctctaactggccagcaagcgcgtgaagtgagtcgacaggtcaatcgtcgggttcgcgctcagagtaaggcggctgcggcggctgccgcgagtcgtgggcgaaagttcacaagaacgccgctcagttcgagtatggagaaaatatacgagcaactccgcaagcaggggctgattgagcaagccgcccaacgcgctcagcgggagttggctgaagaagcggcccgtgtgacggctgcgcgtgcaaaaaatgcgactgtaaccgcggtggccacgcctgctgctatgcagtcattgcctcgggcaacgtcagcaggatggagcacccgtgcaattgtcgtgctgaagaatggtggtgctgcaggtagcttggcagtttgggcggcaggcttccaggtcgtggctcttgcagcatctgtgaaagagtggaaggaaaagccatctgctaccgttctcgcgaagattgtcgcctcatttctcggctttaccggcgccacgctggaagcggttggagcgatgtcacttcttcgcgcatatttttccgggagagccgcaggcgtatttgccacgcgagcgaccgccgccggggggattcttggtggcgctgcaggaatcatagcgggtgtcttgaccatggctgacgcagcggatttgtatgatcagaaggacgacgatgcggcaatccgaatggcctttgctggactgctactggcagccagcggtggcgctacgttgcttggcggggctgggagcgtaggtctagtatcgctgtggggaggcccgattgtgtgggcgatcattgcagtaggtgccgcagttgtggggctgtatttgttagtggcggcggaagataaacgtgataatccgctgcaggtttggttgaggtcctgcatatttggtataaagcctacatatgcaaatgaagatgaggaagttcaggccgttgaaaaacttttcgtaattccattcgcgattaatttagtttggcggaagggtaagtctgtcctcggctttcgtttcggcgggacggtggacgtcactatcgatgtgccagatgtcatgccgggccaaggttggttgagctaccgaatcgtgcttgagatgagcgacggtcgcatcttggaagcatcgtcgaatcgatcaattggatcggatctgcgagagggcttggtcgacaagaatcggatttcagaaggattggagtaccaaaatcgcggtttggcttcaccaaccagtggcggagcgacgttaagaaatagtgagtccggaggtgtaatgtggcgaattatttacgtttcggatgagttgaagaaggttactgtgacggctaaaatgtggccggacaagaataataatgccgatcttgttttgcctgccgcatcgggcatgacggaaagtgtagttgctggaggttga

SEQ ID NO: 530902 - DNA, 174 bp, Stenotrophomonas maltophilia
atgatcgacagcgatgaaaatgaaaagaatgaaagaacttgcagatcgctgcgccaacaccatgtattcagcgaatggacggccttccattcagcatcggtttggaatttccgcatcctgcggaaaaagaaggggacggaggggattaagtcgtttgtggcacaaacgacttaa

SEQ ID NO: 530903 - DNA, 1236 bp, Stenotrophomonas maltophilia
atggatggtgtcaccgatggtggtggtctcagtccccgctacgccttcatggcagtgatgtcctgcggcatcgcgattcttggcctgttgcagtcgtcagcagcggtcgtcatcggtgcgatgctgatatcaccgctgatgggcccgattgtccagttgggcttctcactcagcgtggtcgatttccgcatgatggggcgctccctgttcgccttggtgtgcggggtggcgctggcactcggcactgccatgctgatcgtgtggttgtcgccgttgcgtgcagccacgagtgaaatcctggcacgtacccaaccgaccctcttcgaccttcttgtagcggtgttttcgggcctcgccggtgggtacgcggtcattacccgcaagggtgaggccatcgtcggcgtggcgattgctaccgcgttgatgccgccgctggctgtcgtggcctatggactggcaacgggggaaccgcagatcgccagaggtgcgggatttctgttcatgaccaacctgttggccattgccttcagtgtcacgctcattgcccgctggtacgggtttggtgcgcgcaagcgcacccgtcatgcgatgtggcaaggcgcggtcattgtgggtacgttcgcgatgctggccatgccattgggcgtggcgttgcgcgatatcggtcgccaagcctggaacgaaacgcaggtccgctcggtcgtacagggctatctcgatgagcagggtggaagtatccagcggctggatgtgaagcgtagtgcggacgaactgcaggtggatctggtggccatggtgcccgacttccatcccgacgcgcaggcagcgctgcagttactgcttgaacagcggctgcctgtggcgccacgattgcgggtaaggcagacgctggaggcgaacgataccgggcgtcttgatcgcgcagaccttgctgggctgagggttgccgtcagtgcgttggccggtcagttgcagcagatgcgatcgatctcaacattgtatgtaggcgaccgggccaggggggtattgggtgaccggcctgcagagcttgaagtaagcgcagagcagatgtgggtatcggctacccttcttgaacatggtggagaagaagatgcaccactggcgatgctgcaggatgagctggcggctgcgctgccgggatggagaaccgtcgtgcgcgtcgcccccgtgatggcagaggccagcgctggcgacagtggtgtggcgacggagtag

SEQ ID NO: 530904 - DNA, 195 bp, Stenotrophomonas maltophilia
atgagcaggctgaggacgattcccttcgatcccgcagactatctggatgatgacgtcgcaatcgccacctatctgagcgcagcgttggcggttggtgatgcaagccatttccaggaggcgcttggaacagtcgtgcgagcgcgcggctcacgcggcaatgccgaagaatcgggtcttagccgcgacaacctatag

SEQ ID NO: 530905 - DNA, 1098 bp, Stenotrophomonas maltophilia
atggtcggtgatcgcgcggtgctggccgggtcgggactcccctcgtctaacaggggagtcagtgaattcaggaacgccgatggaaccctgacggtcggcatcgactggttttccgcctcagtggacatgttcgcggtcctcaacgaactcgccttccgcgacggcgattcgttcgaagaggtccgtaactggatcgactacagcgccgataacgcccgtgtcgttgcgttgcagatgttctgctggttcttcgctgggctgggccttgaactggatgaggtggccgggggagggcgcttctacctgtggcgagtcaagatcatcaatgccgaaaagaagttcgtcggcatgatcgagttgggcggcgacaactgccgccgtgctgacggcacgtataccgctcgtattgagctgaccggcgagggatgcaaaaccatagccgctgcgcgctgcggccatgcgcagcggtggctggagcttcgagcgaagctcgaaagctgcggcgggaggattacccgtctcgatgtgtgcgccgatgacctgatgggcaagtacccattgcgcttggcacagaagtggtacgacgaaggcgagttcgacaatcgcggtcagcgccctaaggcgcagctggttgacgactacgacagcggtgacggcaagaccttgtatgtcggcggcaagaagtccgaaaagcagctgcgtgtctatgagaaggggcgggaattgggtgacaagtcctctccttgggtgcgctatgaagcgcagttccgcgcctccaaccgcaaggaattgccgctggacctgctccgtgatccggccgcatacctgctcggtgcataccccgttctgcgcttcctgcgttgcatttcgtcacgcatcgacgtgacgaaggctgcggcggtcgccacgttcaagagcgcatgccgtcacttcaaacgccaatacggcggcttcgtcaatttcgtgtttcgcacctgcccggatgaagaggtggcagtggcggtcttcaaatcctgcacttcgccaaagctgccgaagtgggcaacaggagacgtagcagcgaactgggccacaagcgtggtcatacaaccaacctga

SEQ ID NO: 530906 - DNA, 954 bp, Stenotrophomonas maltophilia
atgattaagctggatctcggcgccgagccccctgaattaaggatccagcgcgaactgctcctcccccaggcagtacaggctttcaacacgcacggctacggcagccagcaactgaacgagcttttggacgagggttataaggtggcgcgcccaatgcttgaataccggcagcatggcaagtgcgcattctgcgagagcatagaagacaaggaaatgcggcctgtggagcatttccgcccgaagaaagaggcgcatgatgaaacttcgggtagtctcgtcgtggacaagagccactactggtggctggcatggtcctggtcgaacctttacttttcctgcataaggtgtaacaagaatggaaataagggaagccgcttcccaattgcgcccggtggggcgagggtttcagcgccggttccgccgctttcttatccgattccagcctcgttctacgatctgtcgaaggagcctgcgctcttggtcgatcctcgcatcgacgatcctttcgatcacctgcagtggacgccggtagataggaccgcgtcgcgcagcacttggcgttggaatatcgaagggcttagtggcaggggaaccgagacgatcaaggtctttggactgaaagatcggattgatcgtgtgaaccagcatctaaagtacattacatcggcggcgatcgagatagacaagcacttgaacttcgcgcgtatcgacgacgctaaagatgcatttgttcgactggtagagctttacgtcaacgactccagcagcccgttccgaaatgccgcctactgggcgctggattgcctttatccagaagatacgagagctgtgcatggatttcgcgatctcttgcaaccttacgacggtgcccgtgaaggccccttgccttgtctgaagtcaggcaagtcagggaaggcggtgaaggcggtcaagtcggccaaggccaacgtttag

SEQ ID NO: 530907 - DNA, 1452 bp, Stenotrophomonas maltophilia
atgtacatccaatcgataagaatacagaacctgaaacgtcttcgtgatttcgaactaaagttcacctccgattgtggcaccccccgaatgtggagcgttctgatcggagagaatgggaccgggaagtcggctgttctccaagccatcgcgttggccgcagcgggccgattgctggtcaacggcttggccggcaacagcgtcaccaatcttgctgattggcggcgagaagagtcgatgacgatcacatcatggttcagcattccaatggtcgaccaagcggacgcatcggtcgcgccgaagaagaagcatacgacggaagcgttgtcgccgactctaagtcgcaagttgctctcggaagtagccttgcacccaggccagtcgtctctgagagcccgctccgtgttcgaagatgccgcccttcgcgttcaggaggaagatccgctcgacgaggcgcgtgcgcaagatctgccgggctggttcgtcgtcggatacggtgttaaccgcatactgccaagctccaacaaccctggggtattggttcagcaaacgcttaaccgcttgcgcccgctcttcgagccgactcaacaactcactagcaccgacttcatcacggtgttcgaggatgtaaaagtcaagagggcgtactcccgcattcttcagagtgttctaatcgacaccgaggtccttccaaaggacatatcagcattggagttgcgcggccggagtggcatcacgctcccgagtcatcttgtcgagagcgcgcgcttctctcaaaccatgggggactctgcggttaaggtgcctgccctcgctctcgcgcatggctatcagtcgacgattgcatggattgcagatttgattggccatatcgtttgggaagcccaaaagacgcttaagggaaagcagccgatcaatccaaaacacttccaaggcctggtgctgatcgacgagattgacctctatctgcacccaatctggcaggcgaagctcatcccagccttgagggcgaactttccccgtatccagttcatcgccacaacgcatagcccggttgtactggcgacgctggtccccgacgagatcgttcgcctccaggtcgagccgagcacgggtagcgtccgacgagttgcccctcatccagacagcggtgagtgggggagcgttcggtcggtagccgacctaaacgcacagccagacccgcgctccatgactggcaccgagatgtaccaagagtatttcggagtcgaacggctgaccctcaatgagcaaggagaggacctccgcgactacaccgcgatcgccacgaacccctatcgcaacgactatcaagagcagcggatgaaggaactaaatgctcgtctcaggaaagctcatatcggcgacttggcctctccagtagaacgacgtaagagacccatgaaacagcgtcgagatcagccgaaatatgattaa

SEQ ID NO: 530908 - DNA, 357 bp, Stenotrophomonas maltophilia
atgaccgactatactctcaacgatcacgccaaggctgttcaagacttggcacgcttgcacgagaagtgggagaactattcgggaaacaatccgaacaagttccttgcagacatcgaaacggccaaggccacgctggcccgagtcgagcgagcactcaaggacactggcgtgttgccgcggacggctcaagaggtgcgggacgcggcactggacaaggcataccccaatgcgctatcccgccagatcgtgcaatgggagggccagcactttcagaagcgttacacgcccgtggccaccagcctctcagggaagaccgtacgagcgtggaaaagctcttgggttccagtggccaactga

SEQ ID NO: 530909 - DNA, 366 bp, Stenotrophomonas maltophilia
gtggtaaaagcgaaggagtcgccaggccggccggatgcgcacttggaagcgatcgtgttgcaagctcaggccattacggaggcttgggccaagcggcacgaatttggggaagactccactcacaagaatccgctggtgcactacgacacggaacctgtggagggcgtgtcgatcctgacgctgtgctccgatggcatgccgatgcgatgcctaaacgagggttcccgagaggccgatgaactgggggatgagttggcccggataggcctctacctcgaacgggacgatgcagtcactgccaactattacctcatcgaccacgaatcagcgttgcagaagcagttcgatcaatgggcccaagggtag

SEQ ID NO: 530910 - DNA, 951 bp, Stenotrophomonas maltophilia
atgcttctccaaggccttaatgtcaggcttgccttaagctctatgcggctacgcccggcggcactggatcgactaacgatcgcgcccactccatcagtcccagaagtcaaagcccaggactccccctctccaagggctgtaaagatctcccgctccccagtacctcacttcgccatctcgctccgtgcgaatggcgcgaaatacgccccggtctggcgtttggtaattcaggcgcccatccaaaactggcaacacgtgtcccgcctgcccgtcgctcgacgtcgcttccgatgggatgggcaaaagcagcgcaccggtcggagcctcccgcagcaccagacaaaaggacggatagcgcttgaggcagtacaccagggccgggtgcgtgcccgccgcccttacctccgccagcagtcgatcaaccgagtcaagggccagtgcttttgccttcgcgctctgcacagcaacagacgcctcttggcaccaggtcgccacgtccgacgaatccgccagcaagagtttcttgtttcgactggcaaagcgctgggccactcgccgatagcgagaggtcgttacgaacagcccagacgcgtcttcacgcaggctgtgcgcctccaatgcagccactgcctccaggccaattggccggtgctttgcgtatcgcctggcgtggaccaaggtcagtgcatcgcccaacggagaatgaagccacatccgcacatccacgccctcatcggccgtgccggggccgatctgtgttttccaaccccgcgcagtaaacacactgctgatcagttcttcaaaatcccgatgagggagccggtaaagatcttccggatggtccgcaaagtgtcggtagatgtcccccgacacatctgccgtatccgcttcgatcaggcggcaagtccactacccttgggcccattgatcgaactgcttctgcaacgctga

SEQ ID NO: 530911 - DNA, 993 bp, Stenotrophomonas maltophilia
atgaataaagccgctctctcagtcataccatttatagacttgtccagcatagagggtcgattcattagttctttgctatttcatgacggcacggactggcgctcttggatcaaggtcggcgagggtctcgtggaaattaagatgtggccggccgaaagttactacttcggcacgtcgccagagttgcaaagcgacttcacctttcattttcttaacttcatttctcagaaatcctgttttttgcagctgcagaaggctgtagcaggaatacgcgatgacctattcaacatcgcagcatctatcgcaaaaattcggcacttcgagtcctgccaggccggcataggccagggtgttgctcggatggtgatgactgaacttgagtacttgctatctctgtgcagaagcgtatttgaccttcttcaagaagtggtggcgaaaacgtgggcgaccatccaacccgccgacccgtcttggaaaatcaagaaactcaggggatccttccgagaaatggtgatgtcaaataatgagccaatgacagcacaggcaatctcagaaaagttctcaatccccatggagctggcgaacttctactccaggtcagccgatttctttcttagtctgcgtcggttccgggataacatagttcacaatggatcaactattcagacgatttttgcaaccgaggatggcttttatatacagcgatccttcaacccatttgcatcgattgacttgtggcgagaagaagagaggaagccgaatgatctagttcccctgctgccggcgcttggcttcctaattcgtggaacgctttccgcttgcaatgattacagcagcacgattgaatccatcatatcctttccgccgcccgtggcgccagggttccagctctacatgcggggctacttcaacgaaagctttgtcagcctccttgctgatgccgaagggagggcgcgggagatggcaggaagttttgtgtcgagcgcctgttga

SEQ ID NO: 530912 - DNA, 4410 bp, Stenotrophomonas maltophilia
atgagggatgatttcaacagggccaccaaggaactgctggcgaagcaggccggccatcgctgcgcgcatccccattgcgggaagccgacatccggagcggacgagagtggtaccggcgcgatcaatatcggcgtcgcagcgcacatcaccgccgcgtctgccggaggcccccggtacgaccccgcgctgaccagtgaacagcgcaaggacgcgaccaacgggatctggctctgccaggatcacgcgcatgcggtcgacgccgatgacagcggtttcagcccggaaatcctgcgaacctggaaacggcaggcagaagaccgatccttccatgcgctgatggcgggaatggccggtgccagccagatgcgtggcttccaggttgaccccggccaagacatcgacatccggcaccggttcaacctcgccgtggacgaggatctcgtcgcgctgaagacgagtttggtggcggcggcgcgcgaagatgccgccgccttccgcaggactcgatactggaccgagcatgccatcgaactgaagctgagcctgaagggcgacgcggacgcggattcgttttccgcgcacgatttggccaccaccaccgaggccttcaacgagatcgtgatcctgtcgccgccgggcaccggcaagaccaccacgttgctgcagctcaccgaggcaatcatcaataggcgcggcgctgtagctagttttctcccgctggatgactggtcggcccagtcccactcgctgctggagagcatcctcgaacgccaggcgttccgtccgtatcgccaggaacatcttcggcttctcgcccatactggcgaactcaccctcgtgctggatggctggaaccagctcgacggcgcatcccgtagacgagcacgcaacgaactcgagggtttgcgtcgcgattacccgaaactgggcatcgtcatcagttcgaggaatctgagcgttgccgtccccttcgccaccacggtagtggcgatcgaactgctcgaccatacacaacaacgccaggtcgccagcgagatgcgcggggccgacggcgagacgctgttggaagacgcacgcgcaatcccgggactcagggagctggtgtccgttcccttgttcctcaacgcgatcctgcgtctgtcgcccggaagccgcttgcccacgacgaaggaaggcgtgcttgccgccttcgtagagcagcacaaccgggtcgccaatcgcagcgaagccttacgtgacgcaaccctcggccacgagcaggagatcctcaccgaccttgccgccgcggcaacccgcaccgccaacacgtccctgtccgacggcaacgccagggcctcggtgcaggccacccagcgccgccttgcggacgagggccagatctccgcgtattcggcgccccagcccatgacggtgctggacgcgctgatcgctgaacacttgctggttcgatcctcgggcaccccagcgggatacagtttccagcaccagcagttccaggaatggtacgcctccttcgcggtggagcacgccatgcgaaacatggctgccggcgacaccgccgcggcagaacaactcgccattgcgttcctcgacgtccgtcgatgggaggaatcgatcctgttcgcttgtgagcgcatggtattgggtaacagcgccgatttggatgcggtagccaagacgatcgtccgttgcctgtcgatcgacccaatgctcgcagccgagatcatcttccgtgcacccgcagcatggggccgggtcgaacacgaagtgaccgggttcctccgacgctggcaccatcgggacaaggtcgatcgcgccattggattcatcgtcaacagcggccggccggaattcgcagaacttttgtggccgttgctcgccgattccgaaaacaggcatcatctggacgttctgcgtgcgggacgccggtttcctccttcgctgttgcctgacatggaggcccggctggcgacgctcgaagagtcgacccgcgccgaagtactcggcgagatggtcggccatggcggcatggaaggtgcgctgttcgccgcatcggtggcacagaccgattcaagcgtgcatgtaaagaaagaagtcgtggaatccctgtactggcgcggggcggatcagcaagccgcccgggtgctgcaagacgcgcctctggagctgtggcaggagttggcctcaggaaattcccttaacgggatccacaacactgcagtgaccgcccgaatgaccgccgaacgtcgagccgtgttcgaacgcatgcagaatccgggacacaagctgcacttcgtgttgaatggcgacgtcgacggcatcgacactgagcaagaggtcttcacgttgctggctgatcctgcgctggaggtacgcgcgagtgctgcggaacacgccttgtatcaggcgcacgaacgttatccgtcgatcgtcgcctccgccttggtgcggagaatcgaacagggtctcgaggtcccgttccgggcccacctgctcgtgcaggaacagcatatcgtcaccgacgaggacccgatctgcagcatggtcaacaatgcggccctggacgagaggatcaggaccaatgccgccagcatcgccggtccggtttcgatcggtcgactgatcgacgcacgcctggagttggacgcgccagctgcaagcgatccagcggcgaggcggcctctggcggagcaacagcgcttcctggaagggcttgtcatcaccgccccctacagctccttagttgccgcggtgctggcgcgggccgataccaccgtcccgcgacgaatcgccctgttcgccgaactgctggcctcccatcgcggacaggactccgccatccgcccccccgcgattctcgaagaggggcagaagacgcagctcgtggacacgttgttgcgctgggtgccgacaatggtggatacctccgattcgacccgggctgagctcgcgggactcgcccgcgccatcggcaccgtcggcgataccaagctggccgtggcactcgaccggctgctgtcggaggaccttcggcgctgggacatctcacgcgccgcgttcgtcgcatccggctatcgcgaccagacgtcggacgcgcggcactcctggacgaactggtaccagcgcgctttcatcgccattggcaccgagcaggtgaataatctgatggtccagcgcctgtcccatccgcaattcggcgccgaggcggcctccgcgctcatgcaggtgtgggagcagcggcaccccgtgaccactccgtcgacctttccgcgaaccttcctgcgggagatgaccgtgcggcgtgggcggcgactccgtgagcgcccgcctgcaccggaggcgctggcgatcctcgataccgtcacgtcactgcttgacggcggtagcgagaacgagcagttgcatgccattcgcttggcagcggcggccttccgcatgccctgcggcgacatcagcgcgctggtcggtcgattgatcgagatcccggccccgctcaacctgcagcgagacctgtacgtggctctggcgctttccggcgaacgcctgcaggttgacggaatccggtcgtgcattcgggccttgctcgctgaatccgagaccaagccttgggcgctgggcgaccaccatagcgcgttctttggttgggtggagttgctcgcattttccgaacgcccggccgcgatcctcgacgaggtagccgccctggaacagccgcatttgaagcagccgtaccagctgcgtggattgctgtcggcgctgggcgcctccgccgagcccgatgtcgaggacgtcctgctgcagttcgcagcgctcgttccgggattggcccaacagcacgaatggctggctgccctgcgtacccgcggcaccgactcttcgggtcgatccctgctccaactgctgcgggacggtgcgttcgacgatcctgggcatcgagatatcgaagcactcggcgcctacttggcacagcttgcggaaaaccacattgagttccgcgccgacatgctgaggctgctggagcatctggacaaaggcatcctggcctctgcgatcgagcgtgccctgctcatgctgtccgatacggagagcatcttgtcacttgtccgctactacgctcggacagggcgctcgggcgacaacctgtacactagtatcagaagaatcgcggtgggcgaacggtcttccccgcagttcagtggcgccgttaccctgttcccggtgcccgtggacgatctgcgctcgcggcttttctccctggcattgccccagagcagcgaagcagatgttgccaggcaatgcttggccttgatcgacgacatccgcgacgactacggctatcccgagtccgaagcgcgccatcctgatatccgatcggggcgaccctggcccctgctagctccggctgcataa

SEQ ID NO: 530913 - DNA, 696 bp, Stenotrophomonas maltophilia
atggaaaatttcaaaggtcacgtgacgaggcgcgacgccgctctggtctccgcgatatgcctcgtgctggggggcgtgcttagctggattgcgtttagttccccggatggcattcgcgttccacgcgaggctggaaatgctgctgattgggttgcagctatcggtggcgcggtcgcggctgtcgcaacatgtgtgattggctacgcagcaaacagcttcacaagggctcaggcagatgcaggtgcggatagggagcgcaggcagaatgcgatcctcattcaacagatgcgcgtctgggtcgagatacttcagcgaccgcatctcaattatttgatgttcgttagcggccagcttcctgacgtcgaggtcaatctctccggagcttgtggtttgctctctggtgcgaccggcgttgtttcgctcgtgccttgggattcggccgcttggacgcttctcgggccgagcggcgttggggcatgggtggatgcgagagggaaggctcagatggcctgccatacatgcgaacatttcctgaagctgcatcctgattggtccgcagccttcgatcctgggaccgccaatgattttcgctccatgggcatggtgttccagttgttgcacggatcggcggttaatctctctgttgagatcgatcgcaccgttgtccgccttcaggcatctaatgatctgcactga

SEQ ID NO: 530914 - DNA, 234 bp, Stenotrophomonas maltophilia
atgaccgagcccgttctcgcatttgcccttctaggggccattgcagctatctccatcggcggcgctcgcatcgtttcgtggctgctcgaccggcgcgattacaccgcctcgcagcagtcccgcgaagcccaggtcatcgcactcgcacaggctgaaattgccgccaccaggcgcggtgatcttctggccgcagcccactacgccgagcagcaggagggcgtccatgttccataa

SEQ ID NO: 530915 - DNA, 138 bp, Stenotrophomonas maltophilia
atgttccataacagccccttcccgtgggtccttcctgccgccggcctcttcgcagtcgctccgaacccggcaacgctcgtgctggccgtcttcgccctcctgcactacgtcatgggggtcatgcgcaatggccggtga

SEQ ID NO: 530916 - DNA, 195 bp, Stenotrophomonas maltophilia
atggtgatgacgagatttcatgaaggtgtttgggcggcagccgaagacctgcgtactcctgcggatgtgtgccggtgcgtgcatatggtggccgcgcatgaagtgcgtggttcgttcccggtggacctggtggatggcgggaactgcgagcagatcatctaccccaacatgcgtcgcaggcgagggtgcgtttga

SEQ ID NO: 530917 - DNA, 627 bp, Stenotrophomonas maltophilia
atgaagaatccagcgcgaatgggagtcgttaagaagatactggtgagcgcggctctggtggggctggtactgcttgcactggcaggcctggtactaaagttcatggatttcaggattggttcaccaccgccagcgaccccgaagccacgcatcattgactctgcctctggtcacgacatcactgatgcccccgccgagatgcatctgatgattggcatcgccaactattctgacgaagggctaggaaagatcttcatcaatgatacttgggggggcggtatgcaaccacgcgccagcagcaacggacgcatctgctgcgtgacgctccctcgtatttggcatccaggactgaaagtatcagtggcatatcgcaccagtagtatgttcctggatgatccctacagctacgcagaaagggatgtggtggtgcctcgctatgagccattccttggggggtatatctattttatgtactttcccgacgatcacgtgagagttgttgcgacgccgtacgagccagggtactcaaagttcgcgtacgacattgactttgcaaattccgagcgtgatccggaaaaggttcgtgaatttcttaacgtgacagcaggcgacagaggtggcgaatga

SEQ ID NO: 530918 - DNA, 450 bp, Stenotrophomonas maltophilia
atgaagaaccagaagggcttcacccttatcgaactgatgatcgttgtcgcgatcatcgccatcctggccgccattgcgctgccggcttaccaggactacaccgtgcgcgcccgcgtctcggaaggcctgaccctcgcttcggccgccaagaccatcgtcgccgaaaacgccagcaacggcgctgccgacctgggccagggctatacatttgacggcgctaccgccaagaccaagaacgttagcaagatcgaagttactccggaaaccggcgtcatttcggttgagatgcagggcaatgccaaggcggtcaagttcacgctgacccccgagagcaacggcgcgaaactcgaggctagcaaggtgccggctgacgtgatcacctggacgtgcgcagtcgacgacgctaaaaacaacaagtacgtgccgtctgaatgccgtaagggtgcgtga

SEQ ID NO: 530919 - DNA, 1188 bp, Stenotrophomonas maltophilia
atgaagtatcgcgcgtatctgttcattgcagccctctggatgatggcaacgcccgtatgggcccagacagtggaagccatggttaccgggcaattccggccgaatgctgcgaacccgggcaatacatcatttgagaacaccacacctcgcggtgcgttctgcaactggaggccaacggagtgtgacaaggcaggagccaacatcttcgatcttggcacgggtgagttctggcagaagaacggagacggcgacaatgaatcccgtcgtgacacgacctacgtcagattccccgccccccgctcaatcaccctgcgcgacgagcgaaccggggcgacggcgcaggcacgtgtcagctttgtcgcgatgtcgctgcggctgaatttcggaaatggagctgacccctggtaccacggcgtcagtggtgggtgtaccgcaatacgtggtgcaggcgggcttggatggtcgaatgggggttggggtgtgcgtgatccctccaatccccaggaatgctacagctcgcaacgccgcaacgggcgaagttactcctatcgcaacgtggggattggcattcacgtggagcttcccggcgccatcactctgcagaacggtcgctacattgcgcaggaggattggaccaccggtggggcggaggccgacatcgaccttggggacaatgtctcgggcgtcaagatgatccgcttgaacttcgtgttcgacgtggcccatgaattggaggtgcggttccctggggaagcgccgaaagccacgctggtgccggacggaggatggcgggcatggatcgatcatgccattcgtcccacccgcctctcacaggagcttccgttcttcgtcacttcgtccatggatttcagtctcaagctccgctgtgagcatgaactggacaatcactgcggcatccgcaatctgcataacaatgacgtgattccggtcgcggtggacgtcaccattcccggtatgcggagccggatcgatggctcgccagtacaaggaatgcatcttccgccgggtgatctacgcgcacctcgccttacacccgatgcatacatggtccagcgacgttcaacgcttcgattcaccgctgagaaaggtgcggtggacgagatgttgaagtcgcccggttcacattgggagggcaacatgacggtggtgtttgatgccaatccgtga

SEQ ID NO: 530920 - DNA, 1746 bp, Stenotrophomonas maltophilia
atgagattcaagcagccatccggaatcgatgccaacgccgtaggcgtaatatttttcgcacaatgtctcgacgaactactgtacgagtacactccggcaacatataaacccagagtgatgagccccggcagcctaggcgcagaggcactttcaataattgagcatatagaagctggatctatggataggaaccggctcacgcctgtacttgaggagctggcgtcgataatcaagtcagacaatgtagcaaagcgactactaccctttgagtcggagttctacttatcgctcagcgcggaagataagctagttgacatccggttgaggctatcactactaatcaacgtactcaaagggccgaaatacactgccgagctacaacatcaaataatcaagctttgtgcatctgacaggcagaagatgcatatccgcacctctgcgaagagctgggtatctgccatgctctcactgggatacagcaagcaacacattgccacccagacctcagtgttctacgacggaactgcaggactgtcagatccagcgcacctcgccaccttctttcgctcctttgacatgcgatcgcacaagtatgacgtgctcttcgtagcacccaagataatcaaggagaccgagtcctccgctcaatacttcagaatttacttgccggataatgaggacgaaagagtcacaattgctcatcgtgaggattttcgtgccaatgacgacgaactccttgtcgcggtttgcgacgtaacagcgaaggatgcatataccgcgaagaacgatgctgagaagcggctagaacgcctatccgacatgttcgcgctctttcatcacaagcgcaaaattcactggcagtccaatgcgctatctattgatggcaatgcactggccgtcagggtcagtgcagctacatccggcgcaaaacgatctcgagacagcctgccaacaagggcctcacagaagctggccgaggcgatgaatggacttagctttgctgatcgacagtcatttgatcgcttcattagcgtggtaaggctgcatgggtcagcccaggaagcaaccagctcagaggctcaactcatcaatctatggactggaatggaagtcctggtaccaagagcttcaggctcaaagcttcgagaggtgctgaggctcatcatgccgttcctcaatcatgggtattttaaccgcctactgtttgctttagcgggcgacctttatcgctggaatcgcaaaggcacctccaagcttctcaagcgagtgcagcagccagactggaaacctcaccagaagctagcacttgtactgcttggcggagattacgaggaaattcgcagcgacctatacagaatgacagaaggttatgccctcctcatgaatcgctgttttgagatgtcaaaactaatctccaagaaagaccatctcaatgaacgaatcattgaacacgagagacgcatcacctggcagatcgagaggatttatcgcgcacgcaactcaatcattcacgacggaaaatcaccaagccagacggatgcactagtcgagaacgcgcatgaatatctcgacggcttcattgataggtttatagacttgtgcgctcgacacaagtacgccaagactctagacgaagcgattgagttccagtccagatatcacctagcttggaggaaaaagcttcgcgcacacggtgaagtcaccccctccgatctcctcgaagtctgtggactcgacgcgccttaa

SEQ ID NO: 530921 - DNA, 570 bp, Stenotrophomonas maltophilia
gtggacccgctaatggcagccacgagcttcgcaaccatcgttgggcttctcagcaactacaagagcgaaagctcaggaacgcagctttccgagtttattcaatggctgcgagataagcggcacgaggatgtcgcgattgacatcgagcgcaaccagatgctcgcaatccatctcaaatcaatactttcgctaaatcatcaagagctgctcctgcggcttgattcgctggacgaagttttagcatccgttgcttcccacatacagaccttttctgatctagccgaatccataaggcccagcggcactctttccgcccaagcaatgtcaattgtcaagcagttcgccgattccggggcgaatgaactctgggaacacaaatccatcaactcgacgcgatatcattttatcagcggcgcagggcagctcgacgttcaggaaccaagattcattgaggatgacttgaataccttggtagagcttggattattcagactcgattacggcagcaagggcacccgtaagtttattatcacgcgccaagcagtccaacttgccaactcagctggttag

SEQ ID NO: 530922 - DNA, 501 bp, Stenotrophomonas maltophilia
atgacgggcgcgttagcttccatcctgatcctgcccaaggggggggctttggggatgaacagtgatagctgcgagcttctggccagaattgtggagacagggcttctcggatctgctagcgaattggctcctggcttgctggaccgctactggtcgggcgaaataagtgtgccctcggctatcgatgccgacattgcctcctatctttcgctgcacgacttaggggctcttgcaagagcatcaacgtggattgcaaggaatcatgtcctttccgggcagatgcccaagcaacacttgggcttggtgcggtggctgtttgagaatggctatgttgatcggctcgatctactgaacctgctggcgctgctttcacttggaccgctggatgaagcgggattggagatcgccttgctctccaaagaagcactggacgaagggcggctggagggaggcttgaagttgatagagccaatgctgctggcctatagccctacgctatga

SEQ ID NO: 530923 - DNA, 945 bp, Stenotrophomonas maltophilia
atgcgcaggttcgggggagttgcaggcggtgtatttacccgcttgaggggatttgaagatcgaattcggaagctgggggcatcaggcgcctggctgtgctgcgtgctgctgatcggctttggcttgtcgccagccgcaatcgcccaggagacggtcacctacatccacacggacgctttgggctcggtcgtagctgagagcgatgccaatggcaacgtgatcaagcgctatgactacgagccgtacggcgccgtggtaggcggccaggtcacggatggcccggggtataccgggcatgtgagcgactcggccaccgggctgagctacatgcagcagcggtacatggatccgcagttgggtgtgttcctgtcggtggacccggtaacggcgtatcagaaaccggttgagcagttcaatcggtatcggtatgcgaacgggaatccgtacaagttcactgatcctgatggacgtgcagtcacttgtaacgagaatcgatgttctggtgaggtgaacaccatcgctgatgctctggcgcttcctgcaattctgacgatagcgtacggggggagattagtctcaaatgcaattgattccacccagcggagtgaagggactgatccggccgactccacggaggggggagggggaaagcagtcgcccgatagcgtagccggactacgaggtgaatcgactattgaaaatgtcactacccgaggcacccgggtatgggatagaggagccgaatcagatcagaaagcaaaggattttgacgcgctgggtcccaaggatgtcgacacaaaggccaacggaactcgcgtggggcaattggaggatggaagtcgagtgattgacaggaattactccaaggatggacggccgacgctggagattcagcgccaggatggtcgaaccactgatgagtttagatatgggaagaagccatga

SEQ ID NO: 530924 - DNA, 855 bp, Stenotrophomonas maltophilia
atgagtcaagaaacaagagaagaacgcattaaacgactaatgaaagagcgagaggagggagggttgactgaaaagcccgcaccggttcgtgtggaagaaaggcgggtcgagccggagccagaattggattgggaagaagaagctcgcatcatctcttcaaagaatcgggagcgcatcaggaagaatgccgatttggcttccgcgcaagcaaaagcagcgactcaattcgcggagcaaggtgcgaagagtgcgatcaagtctttgcaaggttttaaggggaaggtcgaagctaagcttcaagaagagaaagagaagcgccgactgaaacgcgaagagcaagaggcgatcaagggtgcagacgttgaagctctcgcagccaaaagcagtcgagagccagcagcggaaagcagcagtgcgcagcgacagacacgaatgaagttctggatgctgtgcagtattccagtggctctcagcattgcattgatcgcagcctggttactcaaaaccaatatcgactctgaacgcgtagagcccgtaacagtgaagcaggtaaagactgaccagcccgcaacagcacaagtgctcgcaccggtcgaagcagttcttccaatcgttgaagagccaccccaggcattgccgccacttccccagagacagcaggaaccacgtgcagaacagtcggtattggaagcgccaactaccgttgctccaaaagggccggtgctcgcacctcctaccccaaagaaagaacgagtcgcgcaagccaccgggaagaaagaagagcctgcaaaagaatctgcgaagagccagtggcaaaaagacgcggctcaaaagttggaagactatcaattttag

SEQ ID NO: 530925 - DNA, 444 bp, Stenotrophomonas maltophilia
gtgagcaaatggatgctgattgccgctcttgtcgctacacccttgggcgcaagttcggcagagcccgacccgctgtcgtgcggagcgttgacggcaggcaaaagcaagagcgacgaagaaaagatcgagacttttgcgcgcatcattcccaatagcgcggccaaacacctgactgatgtctatcgaaaagaattgataaagaagggcgcaaatgactattccgcgttctcggcttcgctcgactactacgcgaaaatagcccttcctcttgcggaagaagtcaccgctcagttcgcgttgattgcgaaggaagagggctcttacgtgaagggcgtaaagggttattgcaaagacaaaaacatgaacgtgtccgagtttttcaaccgtgcgtttgatgcggcgctgatcgacaaagtgaaagaattgccaggcgatagcgattga

SEQ ID NO: 530926 - DNA, 834 bp, Stenotrophomonas maltophilia
gtgcgctctatcatcttcggggccgtaggcctggcactaggcctggctggttgtcagcaggaggaagcgtctccgcgctccgcgccgcaaggcacagccaagcccgctcagccacccctagtgctcacgcaggaggcttgggcagggaaggcgttcgacgacaaagaggttcgactcaacacaccggagcgcttctaccaagagatcgtcaacgctcgaaacggggtcagcaagaacgagttcgaaacgactgctgcctacgagaagagaaaggcagagttggctttgcctaccggcatcagggccgatgcggtctacctttttgagtctggtagccgcgtaaaatacgacgccgaccggggcgcgtatgtcgcggaaaaaacgtattgcacggactacgaattctcggacttgaagaacgtcttggcgtgcagcatcggttctgtggaagggaagccgatggtgaacaagcgtgacgtatacggacaagttcagctcttcgagaagcgaaccgatacgcagtattcgatcctgatgccactcgcccaggtgcgcaaatttggcacgcgcacgtcgcaatacgcgagctatgaattgccgggcaagtgcccggttcccgtcgaggaggcgaggaagattgggccggtggccatcgcttacggagtcacgtttaacgcgccggatttcgtcaagaccaccgttgatctgcacacataccccgaatacagaaacgaatggtcggttgaccgagtgggtgtctctggaaaggtggtttcgcttgtttgctacaccgatgatcaaacgaagcgcatcctttaccagcgaaagttttga

SEQ ID NO: 530927 - DNA, 159 bp, Stenotrophomonas maltophilia
atgagcgtggtatacatcaaagagcgtttcgaagatttttgcaattggttcaccaagaccccggaagaaaggcaggcgattaggatcatgagggcggtgaagagggctcagcaagagcaaggtcatgataaacctccccgccggggtaggaagatgtaa

SEQ ID NO: 530928 - DNA, 225 bp, Stenotrophomonas maltophilia
atgagaaggcactcactcagcatcatcaaggagctagtcatcgcgcatcccgaattctcagctcagaccttcgttttgagctatctgccgcatcagggtgtggtcttcaaagaatacgagagcgtgacaaaagccattgaagagatggtctacgaagagacaaaacgcgtcattgcgacgggccagtcaaaaagtagcggtgttcgtggagcgacaatcgggtga

SEQ ID NO: 530929 - DNA, 486 bp, Stenotrophomonas maltophilia
atgagagacattagtaaaaaacccaaagccccaattatgacggaagtgaaacgtcgcctttcggtttgtcttccgctcgccctggttcgcatcttgaacgaagaacagaaccgagtcgaaattgccgttcgagacgcgctcaaacaacttgattcaaaccctggactcgaatcggttcaaatggatagctctgagcgcttcgcagtcaagcaagagccaatcgtcattaccaaagaaggcgaagaccgctatctcgttcgcgatgcgtgctctgtctatgctgataagacgcgagtgtcttgcgttgaagacatcgttctctacctgatgttttccaagctgagactctttgcgcccgacttagcggcggacattcagatgtttgagcggaaaagactgaccaaggaggagtgtatgttgctgtctgagcgtcaaagtcagctggaaacggagttgcgatacatccgccagcggctagcccagtaa

SEQ ID NO: 530930 - DNA, 750 bp, Stenotrophomonas maltophilia
atggcaaagacctggattagacgaagtttgcgagagcaacaaagaggcttatgcgcgtattgcgatgagccactaccggcccgagcgaaaagctctctgctcatccctacctgtatcgggggagcaaaggacgcaggcattgttctcgcgtgcaatgagtgcttgggcagcaagagccaatccgacctccggggctggcttgcaatgcctttccacagagttctagccaagaacatccctaccctctatctgaaacgcctggaagcggctgagcaggcgcagaaccacggactgcccgtagctcactcagcgaacaggaaagcgctcaggaaagcgcttgaagaccgctggaagagcccgcgagtacgggtgagagtcgaggacggcactcttgtgttcgataaggagcaatacggacgcggagccgcgttagcagtgctgagaagtcagttcgcagcagtgattgaagaccaggccggggaagtgagagtgcgtattccagcgcaacatctcgaaagagcaaagagcgtgctggctgcgctcaactgttgggtagtcggactacccacaaatgacgacttgggcgaattgaagcgtccaaagaagaagacgctgaaacggggcatcagcaagcggcaaaggcaagagatgttgatgctgagagatacagaccagttgacgacgctggggcgggcagatgttgaactggcgttgctgaaagacgcttatcgaaagctgggtaatgcttga

SEQ ID NO: 530931 - DNA, 1032 bp, Stenotrophomonas maltophilia
atgcaaggagacaacgctaccgttgtccgtctcgtgaactcagcccttgaagctgcggtgactgactacaagggcgattcggacattgagtattacttccagaacgtcattcgaaccgaaccgtcgccgcgcggcgacttgcaacgcgcggtgatgaaccagtgtatcgccgataccggggcttcgatctcaaacacgttccgcgatgcactgtctgatagctatcagaagaatggggagaagctcttctttgcaagctgcaagacgttcaacaaaggcgtcattgacgcgcagaaaatcaaggaagagttcaagaaagccgaggcgttcagagctgctgctcggggctcgcaacccatgggcgttgatcttgacgcggaatcggacggctatatcgcaaagataaagtcctcgtgcgaatctgatccttctcagcgattgcaggttttgatcaacaatgcaatcaaccaacaggacgaagcagaacggcaagcaaaagcaaaccaagacgcatcagcggcagctgcttacctggtcgagactaccaagctgattggggaacttgacgcagcaatcaagactcagcagtcgatttcctgctctattatgaatcgcgtaaacactgaccggcatgatgaaatccgtgaaaaagcgttagcgacgatagagcgcgcgatagaggcaacacttgcacggcattccttggaatacgccgcagctgctcgggcggatttcgacagttcaagcattgatttagaagactgcgccaacaacaattggacgttggatcaagagatagcagaaaggctgggtgttgattcgatagaaaacgcgcaaaagcgcctcggctattcgttcacgtcggcggtgaacaacgaacgagctattcgttctaaatctcaggcgaacagcggcgaaatcgcatcgtctgactccaaagagagcgaagatatgcaaatgagccgcgcatccaaagctgacatggaagatgcgctctaccaagagcgtcaagcccaagaacaatcgaactaa

SEQ ID NO: 530932 - DNA, 1602 bp, Stenotrophomonas maltophilia
atgaaaagacgaaaagggtattcactgatagagctgctcattgcggcgggcattgttagcgccgttggcgctgtcgcattcgtgctctaccaacccgtgaaagctcgcgcacagacgcgtgcagagagccagcgcctcaacgacttggcgacggagatccagcaagcttttggaatcgttggcagctatgaaggcgtcagcagtgagcgtttgattgaagagcgcttcatcaagccagagcactttgagggcggcaaaatccgaaacgcgtggggcggcgtggttgatgcacagccgttcggcatcaagcatttcggagacgcgtttacgctcgactacacgagcgtcagtgctgcgagctgctcagatttcgtctctgcaaatgcgagcaatgcttacgatgtcgtgatcgatggaacaagcatcgtcaagaacaacaacgatcgattagatgttgccgctctgaccaaggcgtgtgcgaatgcccgcgttgtgagctttgtctatcacaccgagaaaattggacagttcatcgcatcaccgttgaaccttccgcaggctgaccagacaggtaagaatccacctgtgagtccaggcctcaccagtccaggaacgccgacgggtggacagcaagccacgccggttcacccatacatcccgcagtgcggccccaagccagctctgccgtcctgcgaggggatcagcaatcaggcctgggaagccacaacctttccccagtgttggatcttggttggctcttgcgccctacccgtcgctccaagcccggctcccgttgtgccgacgctccccgtagtggttcctcttcccgctgttccttccgcacccccggtgctttgcagcgcttcttctgagtctcaacctgcaagctgtctcgccggaagcttcgggaacgccacggctacgcgtcaaaagacatgcccagaggcttggggtcagccggtgtggaccggatgggagaccgacaggagcggctgtcagagctgtcccggaagcactcaggaggagacgtatcagacggtgaacagaagcggctcttgcccctccggcatgaccggttcgatgacgtatcagacaaggctgaaaggcacgcggaacgtctcctatgcctgcccagcgggccagaccaccgcgccctccccttcctacacagaatggatgtggacagagacgggagaagtgctgtccaaagatgagagcggatgcaaaacagaaggcctcacggttgcgagtggaaagctcttcatctcgaacacgaacaccacgcggacgattcaagatggcctcgttctagctcagaacgcagattggacaacgctggcgagtgtgtcgagtgattggccgcaatcgtatggaccagttcgagcttgggcaaacgtgagcttcactttcaatggctcgacgcaaggcttctatcaagcggcgaacgggaatacaccgagccctgggaattctgtcaactactccgaaatacgaacgctgaacttcaacggaaaactggtagacatcgatttccgcacttttggaacctctgatggaacggtaattaatggaggaattcgcattctttaccgggttcgctga

SEQ ID NO: 530933 - DNA, 1770 bp, Stenotrophomonas maltophilia
atgaaaaacaaattagcgttatctggcatcgccttggcgattcttttatctatgtctgccgcaaacgcggcggaacctattgaaattggggaagaagtgcgcgcctgcgcagacggtgttgctatcggaacgaatgtcaaaagcgacatcatctgtgcgaacaacgggggcgtgggaattggaaataatatcaagtcgaatggaggcgtcgtgatcggcggcaattcaagccaaagctacgggagcaacggcaacattgttggaaaccaatcgacaggagcaggcgattacgtcaacattttcggcaatgaaaacaacgcaacgtcagcgaacattttcggcaatcgaaacaaagaagtgcgcggaaacatcgtcggcaacgacaacagggcagtcatgactaacagcgtcatggacgacccaaacattcatggcaaccgcaacgtcatcagaactgacgacaacgcagcagcgagcagcgtttcaagcgcggtgttcggtaacgacaacagcatcaaaggcagcaacaacgcaattttaggaaacagcaaccttttagatgcgagcggcgtggtcataaccgactctgtgttcgtcggaagcaacatctacgcaaacagcgccagcggaaaaatcacagatgccgctgcgttcggcaagaacgcaggagttcagggaagccgcactcttgcgctgggtgcaggcgcaagcgcactcgctgacgactgcacagccgtaggcgcgggagcaatgtgtgttgagtccaaaacgactgcgtttggaaacagtcgtttgacgaacatcgcgaacggcgtgagggacaccgatgccgcagcaatgggtcagctcacgggggtggcgcgaatcatcggcggcggaacgcgctttgagaacggcaaccttgtcacgccaacttggtatttccgcgacaacagcacacacacaacgatcagcagcgcgttggacaacttagacgaacgcattgagcgcgcggggagcggtggcactgggcaagacggctactctgcgtatgagattgcgcagcagtatggataccaaggcacacaacaggagtggctcgcgagtttgaagggcgataagggtgacaagggagaccctggcgttgccggggaggctggtgaaagcggccagcctggacgcgacggtcaagacggagcgaacactggtgcagcaagcaaggtgacggctggacgcaacgttgaagtgtcagacaacgaagacggaactcagtttgtcgcactgactgacaacgtggaattgtcagaacaaggaagcgtcaaggtaggtggaaccaccgtttccagcgacggtgtgtctatcaaagacgggccgtcgctgactgccaacggcatcgacgcaggcaaccagcgagtgtccaacgttgcggatggccgcatcgaacaaggttcccaggatgcggtcaacggaggacagatctacgacttgcgtaacgaactgaatgacaagtgggaagccacgaaccgacgttttgacggcatcgaaaaaaggctgaacggcttgggtgctcagactgcggcaatggcgatgatgtcggcttctggcgcaggcctacccgtaggcaaggtagccattcaagccggagtgggcttcaacggtggcgcaagcgcaatggcggtcggctaccgagttcgcacaagcgaaaaggtgagcttctccgctggcctcagcttcggcggcaatggcaccaaacctatgggcggcgtcggcatgagcatcattcttgactaa

SEQ ID NO: 530934 - DNA, 507 bp, Stenotrophomonas maltophilia
gtgagcatcgacaaggaagcaatcacactaacgctcagcatatctgctggcattgtaagtgccgcaacgttcgtcgtcgcacttgcacaaatgaaaattgccagcgccaagacgcggttggagctttacaataagcgattcaacatctacacgtgcgcgttggactactttcaagcggcctgggggaagtcggacaagcccgcagagactcatcagcgcgaattcattcgatgctatcgcgagtcacaattcctgtttgaagaccgcgatggcgtctacgaaactcttacaaagattaaagacgctggcgcgcaggcgattggtcttgaaaaaatgattcatgagttggagtcctctccgaccagcgacccacgagtggccgcgtcatgcagagagaaacgcatggaacacttgggcagctttgaaagatcgttgatgaccttggaaaagcagctatccaaatacatcagatttgagcgtgcaagcggctggcatccgttcaagtaa

SEQ ID NO: 530935 - DNA, 1674 bp, Stenotrophomonas maltophilia
atgcaattacaagaaaataatagcgcgcatgcgggatttgtcaatggttctgagcaaattgatatcgattcttttgatttatctgacgctgaattcaaagaaaaatacggcgaaaaaaatcacggcctgggggcaggaatcattgttgataagaccaagaaagcggtcactagaaagagccgtttaagcgatgctgcactcaaagctaagggcgatgcacttttggccgaaggtcaggtcaaagcacctcttccaaaagctccacgtcaaggcgcgaaggacgatcacgtttcaactcagttcgttgaatcagtcatgttcacgcgccccgatttgagcgcttatcgtctcgatgacgaaacaatgattcatcgctggacgggcaatcactatcagtccctaagcacgaaagacggcgtgagtgaagctctggcgtggttgcggaaataccgccgcaaagacgcgaccgaagggactgcgaaagaggcatggcgctcacttgaaagcacgctacgaacagagcgctcattcactgactatgcgttcggaaatgaaaaggtgatcccttgcttggacggttatctgcatcttgataagcagggcgatatctctttccacaaccctgatcgcaaattcggattccggcacctcattcaagttcgatgcggattggaagaaggggaacgtttagagccgaagtcccttcgtcctgaatctctgtttgctcaattcctcaatcatgcttttcccgaaaaagaagttcaagcgttcgtgcaagagcaatgcgctatgaccttcttgccgatcaattatcagatgtcagcgtggtggtatggaaaagcgaaaacgggcaaatcaacgctgaaagacctgatggcgctgttccatcctcgccgaagtgtggttcaaatgaagcttaacgagatcgatgttcccttcaatactcaaagacttttgggcgcgagcttgatcaccacagatgaggtaaagatggaagggaagtggcacgaggaatcctggaagtcaattgtttcacaagcgccaatgaccattgctagaaaacacaaggaatcgattaataactatgaaatcaaggcgaaatggatcgtctgctcgaatcagtctcctaaaatttctgacgacagcgaaggcgtatggcgtcggctgagcattgttgaattcaagaacgttattgagggtccgaacgttgacgattaccacaaggtcatgtttgaaaaggaaggcttcgaaatcttgcaatggatcttggaaggggctcagcgattgattcggcgcggtcatttccttcctgagaataagtggccggaagcgtgcagaagaacaaagggtgcagcgagaaccgaagcgaatacggtgacgcattggtgtgaggaggatgctgtaacgacctgcggaaagttcacggataaagcgcaaatctatgaacgttattggaggttctgcaacgcggttcaagtcgattcaatggcacccaacatcttttggcgatacattagggcgcgttttactgactaccaagaaaagaagctgaaaattaaggatgcgagcggtcgctacgtccagccctacgttgcaaacatcacgtggtgcgatgaggttgacagagagcttgaattcttgaatgaaacggtagatgttccgttcggactgtga

SEQ ID NO: 530936 - DNA, 753 bp, Stenotrophomonas maltophilia
atgctggcgccactgaaatttagccaccaccacgcggacggctctgcggccgaggcagaggcttgcatccaggtggacgacttgcatttcacgatacggcgcagtgtccggcgtcgaactatgcaaatcacggtggaaagaacgggggagctgattctgagcgctccgcccgaggtgggcatcgcccaactccgcgagtttgtcagcgagaagcgcttctggatctacaccaagctggccgagaaggatcggctgcaacgccaggtaccacgaaaggagttcgtcggcggcgagggcttcctgtacctcgggcggagccatcgactgaggttggtcaatgaccaagactgccctttgaaactggtgaatggccgttttgcgctccgccaagatacgcaggtaggcgcacgggagcatttcatccgctggtatagcgaaagggctcgggcctggctgtcgagccgggtggccgactaccagtcacgcatggaagtggccccggctggcgtgaaagtgcaggatctcggctatcgctggggttcgtgtggaaagggcgactggctgtacttccactggaaaacgatcttgctaccagcccgtatcgcggaatatgtggtggtgcacgagattgcccacttgcacgagccacaccacagccccgccttctggctacgcgttgagcgcgcaatgcccgactatgcgcagcgaagggcctggctggccgaacacgggattgatgtggaggggatataa

SEQ ID NO: 530937 - DNA, 3318 bp, Stenotrophomonas maltophilia
atggggtgggaactcgatgacgtcgaaaagccgttcgtagcccagttgcaggcactcggttgggcctgtgaggcaggcagtctcgacgacccggcagtcacgggtcgagccagttttgccgaggtgattcaggaggggctgctacgcgagcagttgcgcgcgctgaaccttggcgctgacggcgcgccttggctggacgatgcgcggctgtctgaagctgtggcagccatcacccgccttggaacgcacaagctgctggaggccaacgagagggccaccaacctgctggttcgtggcctgacggttgatggcctgcccggctgggacggcgggcgcggccagatgattcgctacatcgactgggacactccggcgaacaaccgtttcacggtgattagtcagtaccgcgtcgattgtccgcccggcttcaacaacggcaagaccttcattgtgcccgacttggtgctgctggtgaacggcattccgctagtggtggtggaatgcaagagcccgtctgtccccgagccgctggccgaggcggtggatcaactgcggcgctacagcaaccagcgcaaggccgcctttgaggtggaagacaacgagggcaacgagtccctgttcgccaccaaccagttgctggtggccagtagcttcgacgaggctcgggtcggatgcgtgggcgcggcctttgagcactacgcgcagtggaagacggtggtcggcccggagggttccggtagcgagattgcggtggcgcaggcgctcggcaaggtggcaatttctgagcaggaacgcttgatcgccggactgctcgcccctgctcatctgctggatgtggtgaagaacttcatgttgttcatgcaggcgggcggccagaccatcaagacggtgtgccgctaccagcagtaccgggccgtgaaccgagcgattgcccggctcaagactggccagacccggttgcaggacagtgagcacgataagcgcggtggcatcatttggcacactcagggttccggcaaaagcctgacaatggtgttcctggttcgcaagatgcgcgcagacgcgcaactgcgacgcttcaaggttatcgtcatcaccgaccgcaaggacctgcagggccagttatccgtcaccgccacgctgaccggcgaggtggtggacgtggccgaaagcacgacgggcgtgaaggcactggcgcggcgcaagggaccagggctgatctttgccacgatccagaagtaccgtgacccggatgccgccggtgatgcgccgctgactgcagatgatctgccgaaagtagaagagccgaagccctcctacaaaaccgacgagaagtttgaggtgctgaacgaggacgacagcatccttgtgctggtggacgaggcgcaccgcacccaggcgggggacctgcacgccaacttgctggcaggcctgcccaactgcgcgcgcatcggctttaccggcacgccgatcatcatgggcgacaagaagcgctcccatgagattttcggggagttcatcgacaagtacaccatcaaggaagccgaggccgacggtgccacggtgccggtcctctacgagggtcggactgccaacggagcgatcaaagacggcgccagcctcgacgaattgttcgaagacctgttccgccagcactcgccagaggagctggaggcgatcaagaaaaagtacgctaccaaaggccaaatctttgacgccccggcgttgatcgccgacaaagcgcgtgacatccttcgccattacgtgaccaacatcctacccaacggctacaaggcgcaggtggtggcgtacagccgtttggcggcgattcgctatttcgacgctctgaggtccgcccgcaatgagttgctggccgaggcccaagcactctcgactgaggacaaggcgctggatgacgaggtgctatgtcggcgtcctgtgagcgtgcaagcggcggtacaggcctggcgttaccgcggcaccctggagcacattgaattcgcgccgatcatttcgggtagcaacaatgacgacccggcctggaagcagtggaccgacggcagagtgcacgagcagctgattaagcgtttcaagaagccgctgttccatgccaagcccgagaagaccgatccgctggccttcttgatcgttaagtcgatgctactcaccggttttgatgcgccgatcgagggggtgatgtacctcgaccgtccgatccgagaggcggagttgctgcaggcaattgcccgcgtaaaccgcaccggcttcggcaagcgctgcggcatcgtggttgactactttggtgtcgcgcaacatctgaaggaagcgctggcggcctacgccgatgaggatgtggaaggcgcgctggtcagcttgaaagatcaggtgccagtgctgcgcgaccggcatctgcgcgtggtggatttgttccgccagcgtggcattgactcgcttgaggacaccgagggctgcgtcgacgcattgggaagcgagaggttgcgagccgagtttgccgtcaagctcaaggctttcctgggatcgctcgacacagtgttaccgcgaccggaagggttgccttacaccaaggacgccaagaagctcgcctatatctacgcccgcgcccgcaatcgctacaaggacacgccggtactgggcaaggatgtcggcgccaaagtgcgcaagctgatcgacgaccatgtggtctcgttgggcatcgaccccaagatcccgccgattcagctgaccgatgctcagttcgacacgcacgtggcccggtcggcgaacgaccgcgccaaggcgtccgaaatggagcacgcaattcgctcgcacatccgcaagcacaccgatgaagatccggtgctgtaccgcaagctctctgagcatttgagcgacattctcaagacgctgggcgaaaagtggaacgaggtgatctcgcaactgcagaagatcatcgacgagctgcgcacgggcaaggcaggcatggccgatgcgccgagcgacttacccgagcattgcgcgcccttcctgcgcaccgtactggacgtggtgtgtgctgggcagacgccaaccgcagccgagattctgcgactgaaggatgtgaccgtggagctagtagacctgctggtgcaggagctgcaaggtaaccgcgatatttggagtccccataaacgtgcggcgcaggaggacctgaacacgcaattgttcgagcacttgatgcgcctgcggccaccattggtagacaccgacaaggccggcgtgctcgcagacaagttgatggagcagtcacgcgccagtcacgacaagctggtgcaggtgtaa

SEQ ID NO: 530938 - DNA, 1287 bp, Stenotrophomonas maltophilia
atgtctgactctgaaatcgttctataccgggcgctgtcggaactggtttcgcaggttgacgcgaagatcaccgtttgcaaggaccctacaaggccttatgtcggattggagcacatcccgtctcgtggcgcgcatctagcagggtggtcccctgcaagctcgtcaatcagtacaaactcgatctttcaggcgggtgatgtcctctttggcaagctgcgtccgaaccttcgcaagtgtgtagttgcacctttcgatggctactgctcgactgatatcctagtcctgcgctcgaacaagggtttcgaccccagtttttcggaaaaggtcctaagaacagagaaagttggcgcggcggctgagatgactgctgtcggcacgaagatgccgcgaacgtcttggaagcacctgagtgaagtggaggtcttctgtccaagttttcctgagcaatcgaagattgcgaaggtcctcgacacccttgacgtcgtaatccatgaaactgaggcgatcgtcggcaagctcaaggctgtcaagtgtgggctgctgcacgacttgctgacacgtggcatcgatgcgaacggcgaactgcgcccgcttcaggctgaggtgccgcatctctacaaggaatcgccgctggggtggactccgaaggagtggggtacgccgctgctcctggatgtttcaacacgcgttactgacggaacacatcaagcggtaactactgtggccgatgggggcggtgaggtgccattcctattcgtgtcctgtgtgcgggatggggagattgcgtgggacaaagcggctaccataacgaaacgagactactggcgcatttcgaaaggacgagaacctgctgctggaatggtcttgtacactgctgttggatcttatgggcacgcagcagaggttggtgatgcccgagagtttgctttccagcgccacatcgcgtgcatctatcctgacgagagacatgtggtgcctggctttatgccgttggttctcaattgggaaccaatgcagggatacgcagatagggtggcacttgggaatgctcagaaaacgatcacgcttggtgaactttctcggtatccattcgtttgcccgaagaaagcggaacaaaaggaaattgtccgtcggatgcgcacggtgcaagagaagctgaatgcagagctggagtttttgaaaaagcttcggcttcagaaatttggcttgatggacgacctcctcacaggtcgcgttcgcgtcacaccattgctggccgaagccgcacgacagtcagggagcgcctga

SEQ ID NO: 530939 - DNA, 2505 bp, Stenotrophomonas maltophilia
atgcctttgaccctttctcagctagaacgacatttgttcaaagccgctgacatcttgcgcggcaagatggatgcatctgaattcaaggagtacatcttcgggatgctattcctcaagcgctgctctgacttgttcgagcagcgtcgagaagaggtcatccagatcgagatcgacgcgggtaaaacgcgcgccaaggctgaggcttcggcagagaacaagcgctggtacaagaaggatgggtacttctgggtgcccaaggaatctcgctatgattacttggttgacaattcgcgccagccgaatgttgggaaccttctgagtaaggcgcttgcaggaattgagagcgacaacgtcagcctgtatgacgtgctggagcacattgacttcacccgcaagatcggtcaaagcaagatccccgatatcaagctgcagcagctcatcacgcacttcagcctgcaccgcctgcgcaatgaagacttcgagttccccgacttgctgggggcagcctatgagtacctgattggcgagttcgccgattcggcgggcaagaagggcggtgagttttacacgcctcgctctgtggtgcggatgatggtgaggcttataaaaccggaactcaagcacgacatctatgacccttgttgcggctccggcggcatgcttattgcagccaaggaatacatcgatgagcacggtgaggacggtcgcaaggcaaacctgttcggccaggagttcaacggcacggtgtggtccatcgccaagatgaacatgctgctgcacggcatcagcacggccaatttgcaaaacgaggacacgctcgccgagccgcagcacattgaaggcggcgagttgatgcacttcgatcgtgtcctcaccaatcctccgttctccgctcattggggtaatacggagaaagacgcgaacggaaaacctgcttggaagcccaagttcgaagccgagcgcttcccatacgggcaagttccgctgaatgccaagaaggctgacctgatgttcctgcagcacatgctggccgttacccgtgacggtggcatggtggcgaccgttctaccccatggcgtgctgttccgtggtggcgaggaaagggccatccgtgcaggcatcattgaagacgacctgcttgaagccgtcatcggcttaggccccaacctcttttacggaaccagcattccggcgtgcattctagtgctgcgtcaacgcatacagaacggcgccaaccgcgtcagcggcaagcctgccgaacgccaagggaaggtgttgttcatcaatgccgaccgcgatttcttcgaaggtcgcgcacagaactacttgctgcctgagcatatcgagaagatcgtcagcaccttcgacgagttccgtgccatcgatggcttctcggccattttggataacgctacccttaatgccaacgactacaacctcaacatccgccgctatgctgacaacgcaccgctgcccgagccgcacgatgtgcgtgcccatctggtaggcggcatccccaaggttgaggtggctgacaaggccggcttgttccgcgcccacggactgaacccgatggacttgatggtggaaagggatgacagctattttgacttcgcgcctaagctcgatacacggcaagcgctcaagccgatcatcgaaaccaatgcaggcctgattgctaaggaagccgcgatcctcggcgcttttgagcgatggtggcaagatcacagcgcccggatcacggcgctctccggacagatggacaatgccgccagtttggttgcactacgcaacgacttgttggccagctttagccaaagcttggaagtgatcgggctgctcgatcccttccaggtgcgcggcatcgtcgccggtttctggtaccaaactaagtacgactttctcactctgatggcgcgtggcgccaagggcgtggccgacgcctggcgcaccagtatcgtcaccgcgctggaagacaaggccagcaaggaaagcccgctggagcacaagctggtcaagtttctgatgactgatttcgtcgaggctatcacggaactggaggccaagaagaccgagctggacagccagatcaaggccgctggccccaaggatgccgagggtgagggcggcgaagccgccgagacagcagaggacgatggcgacgaagaacacgctgtggacgaagcccagctcaaggcgtggaagaaggagctcagcaccgtcaagaagcaactcaaggccaagaacgacagcttcaagcagcatatcgacaacgccgtggaagggctgacgccggaagcttctgctgagttgttgctgactatcctgcacaacgacatgcaggctatcgtcgagcgctacatggccgcgcagcgcaaacaaatcgtggccacattcgaaagttggtgggacaagtaccgcgtgactctgatcgaaatcgaaggcaagcgtgatgaagcgggtaaggcgctgcaggggttcttgaggggattgcgatatgtctga

SEQ ID NO: 530940 - DNA, 891 bp, Stenotrophomonas maltophilia
atgaccggctcgccggctgaattggatgctgggcgagatgcggcaggccgatgtctcgcctgtgtagtcgcgttcaatcctgatgatgaatttgaatcaaggctcgctcccatcaagatgcaggttgacaagctgattgttgtcaataactttaaagccggatctgtccaggtcaaagatgtcgagattattgagaatggcaatcgcggtggaattgcgggcgcgttgaatgccgcaaccgcgtacgcgcgacagagcggatttagatacatcgcgctgtttgaccacgattccgccgttccgctgggtatgatttcgcgtttgattgattcgttgtgttctcgcggcgggagtgttattggcccggtttacgacaattcggccactcagaaggctggtcggtttgtgctgaattggcgtggcgtacccttatcgcgatggatatcacgcgatgagggcgttaagccggcttattttgtgattacgagtggcactgttattgatcttgagcgggtcccttgcgaatgcactcacgatgaaacgcttgggctcgacatggtcgatatcgactattgcctttccttgacggattctggcgggcttgttctgctagatacgtccgtgaggatgcagcatgggattggtaataaagccgccggttcgcgtcgaatggatccgccaaattattcgctgggccggcacgccgggataattcgtaacagggtgcgggtttggaagaagtgggggcggcggtttccgctgttcgtacttttggatctagctgtcaccggcgctgatttcgccaggaacgtcgcacttctgccaaatcgcggtgaatatgcggctgcgttctgccgatcaatgatggcagcactgcgagaagcgcgttga

SEQ ID NO: 530941 - DNA, 846 bp, Stenotrophomonas maltophilia
atgggggctgagctgccattgggtgagatcgccaacaagacagactcacttttctatctcatcatcagggcctggagtgagtcaggcggagcaaagggcgggctctggatgtttctcggagctgtaaccgtctgtctcacctgcctcgctctttttcgtgcgacgaccaggccgctggttgcggtcctgacgtatgcaagcttcctactttgggttcaggcatatacgcagattcggatgtcgctcgcgtttgcgttctgcctagcatccttttacctcgtaggcaggagtctggcgcttcgggttctgctgcaagtggcagcctgcctcacccatatatcgctgctcgtggtggtggtgttgcacgtgctgagcagcaggttctctcctgcacccagggtcgtattcgtctgggctttcgcggctgcaacttcaatattcatcttttcctccttcgttctgcccgtactccccttcgaaaaagttgcggtctactatcagctgctgagcgagggtgctcattccaagatcaatatcctatcagcgcttccggcgattcaagtatgcgccttgattgcgatggcgttttctcgtggtgcggccaagcagttggctacggtggagtacaagctggcgcttctcggcgcaatctccttctatgctctcagtgcagttccggtctttgctgtcaggatcaacgagcttctcagcatctttttcattattgtaatttcaagggtcgtcagggccaattgggcgattttttcgctctggctcttgtatttggctttctctgtaaagagtgcggttgtacttctgaccacagagctcgcaaagcatgggtga

SEQ ID NO: 530942 - DNA, 780 bp, Stenotrophomonas maltophilia
atgggtgacactgatatgaagaaatatgtcgtctatacggcgctctttgggggctacgatgttcttcggtcgccgcgcctgctggatccggagtgtgactacgtgtgcttctcggatgacccacttctcaaatcggatgtgtgggatgttcggtatgtatccagtcagtcgggcgcccaactcaccaataggcattacaagttctttccccatgtctatctgggggagtacgccgccagtgtgtacattgacacgaacattgaacttctggattcccccgtcggattgatccacattgcgttgaactctgcggatatgtgctgtgctaggcatcctctgaggaactgttcatataaagaagtccgggcatgtcgcgaagacgggaagatcagtggtgatgaggctgatctgctgatcggtaagcttgaggctgctggatttcctgctgatcagggattgttcgagaacaatgtaattgtaagaaatcaccgttccgaggcggtggctactttgatgcaggcctggtgggaaatgttcgaggcaggccctcggcgcgatcagctgagtctgccttatcttgcttggctgtcaggaacgcgggtccacgctctgactgatgcatcgactcgtactggcggaaagctctttcgctaccatctgcattcttcctgcgctgatctgccatttcttcggcggcggtggttgacatggaaggcgcgtcatctggatacgaaaacgttccgcttcttgtccgcattccggtcggctcttgccaggtga

SEQ ID NO: 530943 - DNA, 1305 bp, Stenotrophomonas maltophilia
atgcgattgtttgcgctcaatgccggctggatgttgcttgaaaagatcttcagggtcggggcagtctttttaatcaccgcttggatagcgcggactcttggcccggaagcatttggtaaactcaatctctacataacgattgctgcgtcggcttggatcgttgccggcatgggcatggacgtgatcctgctcagggatttttcgagagggagtggggatcagtccactttgctgtcaacggcttatgtgataagagcgtcgattctgatcataatgtcgattgcgctaatcatctatgctgcgttcttctggccagaggggcagtcggacgaattcagatttggattcattgtcgttgcaatgtccattccgttttataacgtaaacacatattttccttactatcaagccacttccagttcgcggtttgttacccttctttctgttggggcgcttgctctttcttcattgatcaagctggcaatactgctgaatgacggtggcttcgtctggatgtcagttgctgtcgtttcagacgtgatagttctcagtattgcgtttgcgtttattcgggctgcgggtcgcccgaggatcatgctgagcctctttgatcctgcattggctaaaagcctattgagccagtcagcgcctctcgcgattgctgcagtattgatcgtcatttacacgcgggtcgatcagttcattcttgagaagatgacgcacggcaacgagcttggactctacagtgtgggcgtgagggtgtcagaggcgtttgttttcttgccgaccctggtcagtacgtcattctttccaatgatttcgaatgatctctctaggaataacgttcgtagataccttgacgttgtgtcggggttctctgctgttggggtgggggtgctctgtctgcttctcccgatggccgtgcccttcctttttggagaacagtacgctggttcggtcagtctctcatgtatacttcttctggccagcttctttgcggtatcggggggggcgacgaccaattattttgtcgcaaaggggatgccctacgttcggctgatccgttcttgcgttggtatagtgctgggtgtcggactgaacctcatctggattcccagatacggcgcaatcggcgcagcctacgctgcacttgtcagtcagatcgcggctgggtggctctgcaatgcactgacaaaatctactcgggagtgctttgtgatccagacgaagtcgattctgaccctaggtcttgttggcttgattgctgcatgcaacgacatgctacgatcctctcgaaaacgatga

SEQ ID NO: 530944 - DNA, 864 bp, Stenotrophomonas maltophilia
atggaatttgactcacagaattcaacgctgcaagcccaggatggggcacccatctcataccacgcagtgatcgtggactacgggaaagcggaagcagtacatcaactcatccgagccttagcgcagcagtcactgcgccctgaatccatttccgttgtcgataacagccccgcggcggcggcatggagcacggcgcaccctgccaattctgtcgatgtgccagtgagctacgagcacttcccagagaacatcgggtacacccgagcctgcaacatcggggcgactggcacctcaacccatctacttttcctcaatcccgacatcgagcttctatcgaaagacacgatgcgcagtttgctgggtcacgttcttgagcacagaatcaattcgccaatcggggtgacgcagaagaatccagatggatcatatgagccggtagcgcgaaggagcccgacgatcagggcaatcctcgccaggcgggtgcccattgccaacaggctattcagcgaatcccgcgccgaatacatggatgcctacgattgcgcacattcgccagaggcgacgaaatcgcttgaggtagactggctgcagtcatccttcctattggtcccgcgagctctctggaacaagatcggcggatttgatgagcgctacttcgtatttatggcggatgtagagtacggcaatcgctgtcgcgaacacggacacccaatgcaattgctgaaaaaatactgcgtcgcagccgacggagttagatccagccgtggaggaatctcaagtattttcaggagcaagagtctccgaatccatctaaaggatgcggcgacctatttcattggaagatttgcgaccggtcgcggctga

SEQ ID NO: 530945 - DNA, 2136 bp, Stenotrophomonas maltophilia
atgcaccaccgttcgctgccactggcgccaatccgcgccggtatcgcattgctcagcctcagcatcagtgccgcacttcaggcacagaccccgcctgcgccgaccgccagtgactggggcggaatcggcctcctgcagacgccgactgcccgcatggcggacgaaggtgagatcgcattcaccgccagccatacgtcgccctacagccgctacaacgtcgtgatgcagccgctgccctggttcgaaggtgcgttccggtatgtctccgtggcgaatcgccgctatggtcctgagtggctcagcggcaatcagaactacaaagacaagtcgatcgacgtcaagcttcgtctgtggcgcgagagccggtgggttcccgaggtgtcggcaggattcagggacctcggcggtaccggcctcttttccagcgagtacctggttgccagcaagcgcttcggcgcgttcgatgcgagcctcgggctggctacgggttacatcggtaaccgcggcgatttcagaaaccctctggcatccctgggcgacaggttcgaagttcgaccgggtgctcaaggcaccggcgatctgaacagtgatgccatgttccgtgggccggtgggcgttttcggtggcgtcagttaccagaccccgtgggagcccttgcagctgaagctcgagtacgacggcaatgactacaagcgcgagccccagaacaataatcagcgccagcgcacacccttcaacttcggcgccagcttcgccctgaacccgaacgtgcagctgcatgctgcgtgggaacgcggggacgcactgatgctggcaatcacgctgcgcggcaatatcgcgaaggcaagcgcaacgccaaagctgctggatccggctccgccccccacactcagggaatcacaaggcgctaggcagaacgcttcgctggacgatgttgattggccgacgctggccgcagaactggaagagaacgcggggttgcgcgtgtcccgcatcagcaggcgcgggcaggaagtcatcgtcaccggcgagcagcggcgcttcttctaccctgcacaaggattgggacgctccggccgcctgctggatgcaaccctaccgaacgacattacgtggttcactgtgcagaacacccgtctgggtgcgccgatcgtcgagaccagccttgagcgtcaggcatttgcggactatgccgaccaccgcatcgagctcagccatctggccggtcacatcgaaatggctactccggcacagcaacggcgcacaacgctttacgatgcgcccatgaagcggttcgacggcagcttcaatatcgggtaccaacagtcggttggcggcccagatggcttcatcctgttccaggtcgcaggcacttactccggcaacctgcacttcacccgcaatacgtggcttactggcactctcagctacaacgcctacaacaattacgaccgcttcagatacgacgccccgagcagattgcctcgagtgcgaacgaacatccgcagatatctcaccacagaagacctgaccctcccgaacctgcagttcaccagcgtgcaccagctgggagaggacctgtacggttcggcctacgccggcttgttcgagtcgatgtatggcggcgttggtggcgagcttttgtatcgcccgcttgatgagcgctgggcaatcggcgcagaactcaactgggtaaagcagcgcgatttcgaccagcgtttcagcttccgcgactacagtgtagccaccgggcacgcaagcctttactaccagtggggaaccgagcggaagatcgtcagcgttgtcagtgccggacgctatcttgccaaggactggggcgcgaccctatcggtttcacgggccttcaacaacggggcatctattggtgcctatgcaacgaaaactaacgtctcatcggcagagttcggcgagggcagcttcgacaagggcatcttcgtatcgattccatttgatttcatgcttccgcgatcaacgcgtgcacgtgcgaacttcgcatggacgccactctatcgtgatggcggcgcgcgcctgtctcgcagctatgccttgtaccaaatgacttcagagcgagacccagatttcttcttcaagaaccttgacgccatcgagaactga

SEQ ID NO: 530946 - DNA, 234 bp, Stenotrophomonas maltophilia
atgctgcgcgtcgccagtccagaccatctgtacgtcattcaaccggatggccacatccagaaggcaggcatcgccctctggaatcgcggagaaccgacacatcttgcaccgggcgccgtcgtgttcgttccgctgaacgacaacaagatcaagtccatcgcccccgatatcaatgaggaggttgcacgcttcctcgccacccaggtgctggatgcgccgggagcctctcactaa

SEQ ID NO: 530947 - DNA, 696 bp, Stenotrophomonas maltophilia
atgcgcaggagcgctttggccagtctcacgcgcctcgctgcaagccggctgcctctggcgctggctgcgctgagtacgctgacgatggcaggctgcggggtggtcggtcgcaccagtgtcaagacggtgcaattggccatccagggcaagcccgatgtgcagccgactgcagcccaggttgcggccaagccctatccgcagatcaaggtcaccggtccctccggcggcgccgtgctcgtactgggtaacgtcgacggtgaacgacgcgcgtggtacagcgcagatcgaagcattgtctacctgaccgatggcctggttgttggcacctatcgcggccagccagagctgcagggaatgcatatcgagggagagtcacccttccgtgccctccaccagattgcagatggcacaacggttcatcggcgctacgacgtgatgcccagctaccgcttcggcatggaagtcacaggcacgctgagcaccctcggccgtgagagcgtagtaattcttggccagtcacgcgagttggtgcacgtccgtgagcgactgcgtggcagcggctggagcagcaacaacgactactgggtcgaccctagtaatggcttcatctggaagagcgtgcaggctattgcacccgacacccgcctggaaatcatccagatcaagccctattcgcaggacctgaaagcccaatga

SEQ ID NO: 530948 - DNA, 2040 bp, Stenotrophomonas maltophilia
gtggctaccaacgatgcactgttactcgatggcgtcatagatgatttgcttgagcaaaatgcaagcagtgacagaggaaagttcttcgagcttttcgctctgaagcaaatactgaaagactgggatctcagtactgaagagatcaatgccggctggaccgatggccgacaggatggtggcattgacggattttatgtaatcgttaatggtcactgcattagggatatttccgaattctcttggcctaaatcaagcgtagacatcgttcttcatattgtgacctgcaagcacgctgagacgttcacgcaggctgcattggatgcaatggtggcatcgcttacagagcttctcgatctatcaatagatgaccggaatcttcgaggggcgtattcgaaggctatcctagtctgtcgcgcaagattgttggttgcttacaggaggcttgctccgcgtctcgccacattcaaagttgtgatttcatacgcgtcaagggggagcactgcgggtggaattggtgacgaagtggctgcgcgctctgagcaaattgttagcttggtgcgaggctgctttaatggtgtggatgttcgcttcgattttgttgggtctaccgaacttattgatctctataggaggcgtcctcgattttcactagacctcccttatgtgtcttctcttagtagtcctgggtcgagctacgttctccttgttaggttgagcgattatttttctttttgctcagacgaaaacgggaagctgagacgatacctttttgaatcaaatgttcgtgatttcatggggttgaatcgagtaaacgacgatattgctcagacgcttgctgatgtgaaagctcctgatttttggtggctaaataatggtgtgacaattctggccacgagcgcctggtcaactagcagtactctccatatggaaaatgtgcagattgttaatggtctgcaaaccacagagtctatctatcggcatttttcgcaaaaaaatcagtttgctgaagatacttgcgcagcctcgcatgcatcgcaaagttctgttctggtgaaggtcattacgtcctccgatgaggaggcgcgcgaccgaatcattcgtgctaccaataatcaaactagtgtcgagcaaatttcactgcacgcgactgagaaagtgcagcgggatatcgaggaggcattgggtcgagttggcttgcattacgagagaagaaaaaattactacctaaatcaaggcgtgtcacctgcgacgatcgtgacgccaatgtatctggcggcgggtattctcgcacttggaagaagaaggcagccctggtcggcggtagcgcttaagcagcggcatctaaacgacgctgctgtttatggcgatattttcagcgagagggtgagtttgcagttgtgggcgccgattgcatttgttttgagggttacggatcaggtcttggaagaggtccggcctcggggcgcatcagaagggctacttaagaagaatagatatacgcttgcgttgctttccgtagctagaaagtttggaaccttcaactatagcgaggcaaatctagttagtctgttcaatgatgccggcttcatcgatgtcgttcgggaagtcttggctgcagttcctcaggccggtagcggctccggaaggaagaagtctaaggtggtcgctgcatgtcaagagttgaccacggtcttcgctgtcgcaggcttggagagaattgcacgtggtagatatctgacggatcgcagtggcaacatgcagcgtcagtcaaagtccaaagtggaagtgtcagagcacatcatctcgaaggtcttgcaagctcttcccccgcagccttggaagcctggccaacagttccatgtcgcgtccgctgtgggttgcagcgttgatgagtactttgctgcggtagaaaaattaattgcagacggccatgttctgcggcaggtagatggtgtgctatatgatcgggacggcagcgtccacagctatgatagagagagagttgtggtcggcgagtttggtgagctcattctgaagtag

SEQ ID NO: 530949 - DNA, 309 bp, Stenotrophomonas maltophilia
atgcatggcagcagggctaaggacttggatagcggcgctggcagtcgacagaccgtgcacaccggggaggttctgggtgccgcctacgtcatcgaactcaacgtttggcccgatggagcgaccatcgagaacgtgaaagtcacttgcggcgaagaagagcgaaacgcgctctactccggcgttgaattcgtcgatgaagaggcggccctggccgaagcgctccagaccgctcgtactcttgctggaagcgaagagccgcgtccagaaccagttggagtgaagtctgggtggggaattccgacggtctga

SEQ ID NO: 530950 - DNA, 927 bp, Stenotrophomonas maltophilia
atggtgttcgagcgctacccaggcggtggcggcgaactgctgttggctctggcccttgccgataactcgcacgacgacggcacccgcatcttcccgtcggttgccacgttggccgtgaagtccaggcagtcggagcgctcggtgcagtaccagctccggaagatggagcgcattggctggctggaggtcgtcagcgagggcggtggtcgcatgaagggctacaagtccggcggccgtccgcgtgagtaccggatcagcccgtactggatcgccggtggtgatctggccatggatggggacgctggagaacagcccgaaaattcaaagggtgcaaattctgcaccctttgaaaagggtgcagaacagagtcggaaagggtgcaaaacgacgcaggaaagggtgcaaccagacgtcgaaaagggtgcaacagctattgcacccgaacctaaagcaaccaaaagcaaccaagagcaaccctcacaccgcgagtgtgagcgcgaggccgatccactggcgttgaccgctgatcaggtcgaccgcgagctggccggattcggtagcacgccacatggcatcgaccgcgagcagctggcccggttcgtccggcaccgcgccgcgatccgccgcccgctgtcggtccagggctggttgcaggtccgccagcagctgctggacctgatcaccgccggacacgaccccaacgaatccctgaagcagacgatggccgccggcctgtcgctgcccgtgatccctgtcgcccagcaatccgcaggagcaacccatgcaagccctcaacacggttctgccgaccgcaccgagcagctcgaacagcagttctacgcccaacgcagaggcggtggccacggtggcggcgctgggttcgagccaggcgatgtcgtcgacgccgagtttgccgtcgtcggctga

SEQ ID NO: 530951 - DNA, 267 bp, Stenotrophomonas maltophilia
atggtcggctgtagccttaccgtcaccattggggcgtacatcggcttcatgctccagtgcatccgctgccaactcgcgctcaccggattcgaccaggtggagcccagcatcgacagcctcgggctgcacttcatgtgccccagctgcgggcggcgcaacaacttgctggttgtcggtcgtgatgaatacggagcgctggtcgagcagtgcccgcttcccggtggctcccatcaggaaagccccggtccagccggctcggccgcatag

SEQ ID NO: 530952 - DNA, 480 bp, Stenotrophomonas maltophilia
atggcaaagttcatcaagcccttccgtggagtgccggaaggcgagatctatcccgtccagttcgttgccggcgatgactgcccgcccgagctggaggccggcgcgctatcggttggtgcgctcagtctgatggcggtcacgccgaccccgatcctgttgggacccagtattcagagtgttcatccggctagcttcgagcttcccgatggctctgtgctgacgttggatgacgtgatcggcaaggcgcacgaggcctcggggctgtcggtggaggactggaacgcgctcgggagcaccgcacgcgaagcggccattgaggaaatggtcggcaagctgttcagcgatggtgatcagggccaagtcgctactggcgacaagcccgccttgattgcgcaattggaagccgcaggcatcccgttcgacaggcgctggggcccggagaagctggccgctgcgctggcagaaggtaagaaggagtga

SEQ ID NO: 530953 - DNA, 267 bp, Stenotrophomonas maltophilia
atggctgcggcggcaacgcttccgaccgtggaagagcgacgtgcggcagagcgattggctgaatccgtgtactcagagaaggtgagagctgcagatcgttgccttgatggaatagtcatcaacagcagcattaggtcggcggtcctgttgatttttgggcatctgttctccaaccgcgagagcgttgtggttggccagtccgttgccgagctaccgctgggtgccactgagttgctgcggccctatcgaattgtgcagatgccctga

SEQ ID NO: 530954 - DNA, 207 bp, Stenotrophomonas maltophilia
atgaacgagcaaaacgaattgctggccgccctgcagcgccagaccgaggcgacgcaccagctggtggcggcgctgcaggaaaagaccaaggccgacctggagaacgccaaggcggttaaccggctggtggactacttctgcgatagtgagggcggcgaggcggagccggcaggctccggcagctacctgagcgggaagccgcgatga

SEQ ID NO: 530955 - DNA, 1506 bp, Stenotrophomonas maltophilia
atgaccagatacaacaccggcaacccggtagggtccagctcaccactggacttgtacgacaacgccgagaatcttgacgccggtatcaatggccaagcgcgaacctggaatgatcgtcgaggccaggtccgtaaaagctggaatggtatcgaggccgatttccagcagtttctggcagatggaagcaccatcgagttcccaacctgggcggccgcgagcgcggccgcgacagcgggacagatccccgtcgaccggcaggttgctgtcatcggcgacagtggcacgcacaccgatccggtgagcgggcttgatgttcccaacgaaggccggtacgtgatgaccccgaccggccttcaatggcgggctgctgacgtgctcagccagaaggcagacaagtctgcggtcgctgacgtcgcgggtgtgctggtgtcgagcattcgccgcgaattcatcgaggcggaccaagatccacaaggcaacgtcgcgttcgctgtccacagcgatggaacgcgcgaattcatcggcactaaggtcggaggctacaggatctcgagggacggtgaagaatcggctctgataacgggtagggccgacaataggggcgtctatcaggagtacgcacaggatctcaccgggactgcattcgccgatgcgctggaaatcgacatcgataatctgggtcgggtgggacgtgtaaagtggaaggaagggtccgacgaagttggaaatatgcgcggacgctacatgtccgactttcggatttcaggcatcaacgcccgtgtcgttacctctgatggatatggcaccggcccggacacgctgatgatcctgtgccatgggaactccaaaaactacacctacgctcctaacgatgaattcaaggcttgggcgcgcgccaatcgggtgtcttacgcgtccatcagcctgcaagagggcggtactactggctggggcaacgacctttccagaaaccgtgtggtggccctgtatcaattcctgatggcgcgctacaagttccatccttccgtcgtgctggctggggattccatggggggattggtgatggggcagctggcgtactacaagccgtttcccatccggttctgcctcggcattgggccagtaccatcgctgaactacatcttcgcgaatgcaccggctcgaaaagcggccatccgcagtgcgttcgggatggcagccgatggttcggatgactctcgcgttgccgagttcttcagcggatacgactggttcaacatgggcatgagcgctggagcacctcagcgaaagttcggcttcccacgaatgcacatctatgcgggcagcggcgactccacctacgccgtggattttggggggggcatcaattatccgatcctgcgtgactccatccgcgcggctggaggattctgcaacctgaccgtcgttcctggcgtaagccacgacaacgacgtgctttggaacaacgtattggaagacagcgtcttcctcaaagaaattggttaa

SEQ ID NO: 530956 - DNA, 723 bp, Stenotrophomonas maltophilia
atgaccgccatcatccgtcgttacgcggcgcctgcagccttcagcgattcgctggttcttgaccttgaaccgctcattgcctatccagcaggggtactggctgagtaccgactcaaagtctcggaagccaagtcggcgatccctcgccagggagactggccgggcttggtgagcaccgacagcggcgtggaggtggcttacgggccagcgtctgccttggctgccggtaagcatctggccatctcgaatcgccccatgccgaccggttctctcaccatgttggtcgtttcccgccaggtcgctggtgcaggctccgccccctaccagtggctgggcggtgcggcggactcggccaatggaagctatgggatgtaccgtgccaatggaacccttgccaccgccatgcgtgtggggggatcgcattacgcgacgatgcccgccgatggcggcgatcggttcgaggcactcttcggtgtcatcgataccggtggactgaaggcgaagatgtatcggtcccgcacaggcactgagatcgtggctgatctccctggcgccccgccggctgttgcaggtgctgtccgcgttcttggtcacgcgctttacgccgctccggtcgagggcgccctagttgcattcatcgctggggcacttaccactgctcagatggacgcgatttacgcatctgctaaggcatccctcgccgcaggcggaatcgacatctga

SEQ ID NO: 530957 - DNA, 399 bp, Stenotrophomonas maltophilia
atggtcaaggtcaagacagtgactcgcactaagaatccgaatgcaaaatcgcctagcgaaactctgatgaatattctgcatggtgaaaagcagaaggcgttgaagaagtggcggcgctttttgaataagactaatccagatttggagttgctcgatgggatgctggtcgttcagttgccctacattgacagtttggagaaggctgagcaatgcgaggttgatgggacgatctatctacataatggtcacttttacgcaaaagttattaagaggaaggctgtttcgggggcttcgggggttaataatggcctcattgaagtgccccctcagcgggagttcgagccattgccgtcctacagtgatgaggatgaggatgaggatgaggatgaggagttgtag

SEQ ID NO: 530958 - DNA, 429 bp, Stenotrophomonas maltophilia
atgcccaacagggctgttgtatttgtcagcgaagcggtcggcgacctgaccatggcccacctgtccaagatcatggcggacgcagagcgtttcaatcgcactgccggggttaccggcgtcacgctgtttgatgggcggaggttcctcgcgtacatggaggggccgcccgatggcctggatgtggctctctccagagcggcgggcgccaccagccattcaagcctgatcgagattgcacgggggcgggtcgggcagcgcaggcttccctactggccgatgcgttgcatccccctgtcgccgccggagctggtgcagctggtgcgggccgactggacttccttcctgcagcggggaggcgatcaagctggcccagcgaccgccatggagatgctggtggcactggtcgaaccattcgccgaggctgcctga

SEQ ID NO: 530959 - DNA, 612 bp, Stenotrophomonas maltophilia
atggatgaaatgacgaagctggaattggcaaggaagtcgctgcggcatgtactcaacgacacagcccctcttgaaagagatgactatttcaagataggactgttcatccagacctattgctttgcagactttgaggcacggcgaatcatcaacctactggcacaaattcagtcagggcaaccgtcttcgtacgctttgaagctcaacgacaaggacactatcgaacacctaaagcgccatgctgcgggctgcgtgtggaacaaagatgtgtcggaagggctgaataaagtagctgagatcttagctgcacaccgaacgataaggcacacgtttgcccactgggccgctcgcagaatacctggccacgatgcctacattttctttactgcaaatcttgcgggacaaaaaattccagatggcgcgccaaaattcgaagagcacgaagaagcgaacacgcagtatgcaatgatgccagtatctcacctggagcaagagcttgaaaagctgaagggtcacgtccaatacatgacaaatattggtcgtcagctagagactaaggtgaaagattttgccgagcagttcaaggaggacaagaaacaaggaaagttctga

SEQ ID NO: 530960 - DNA, 183 bp, Stenotrophomonas maltophilia
atggccgtacgtgccgctgtgcagcagcaggcccggcgcctggccgaggcgaccacgctcgccacggcgcgggtcaagcaagcgttggagccggtcaagccgccggcgaccaagccccgcccgaaggacgcccgcaaggcgtggatgagggcagggctggagcagatgcggcggggcgtctga

SEQ ID NO: 530961 - DNA, 525 bp, Stenotrophomonas maltophilia
atgaacaatcagctcaccgagcaagacgcgctcaacatgggcgcctactttggcttcctgctcgacgcctacaaggtcggcgcagcgtcgaaggaacactgcatccccattctgaccaagttggcggccctgctggacgatgggaattatgaagagtttcggcgcctttgcgcggagggccgaaagcttggccttgacgagagcgtaatgcacttctaccagcatcggggtgctatggacctgcgcgctgtcaggatttcggaggcgtcccccatgggcgaacatgccgagcgagtccgttcccgcattgatagcgacgtccccaacctgacgacccgcagctcgccgcattacatcgaggacgtagatgactggacggctcggatgagtggctatatcgcggcggccgatgatttcggcctactttcgagcgccgaatcacaggcgttgcgaggtcacttgaggttggttaatagcaccgctacggaatggcggttgactcactctgcagagcaagcactttga

SEQ ID NO: 530962 - DNA, 273 bp, Stenotrophomonas maltophilia
atggtgcgttttcctgatcgtgccctgcacgtcgtcggctggtggatcggcacacttggagcattcctgcgagtgtgcgccaaagtcggttccgttctgactttggcgtggtggatctatgagctggtggtaaccggcggattgaacttcaccacaatcattcctgtggccatgctgatggcatgcggcatttcctaccttgtcggtagcgccatcaaaaacgtgggtgttgccctcatcctcgatcacggccctgacaaggaccggtcatga

SEQ ID NO: 530963 - DNA, 687 bp, Stenotrophomonas maltophilia
atgagcaaggtcaaaatttcagtcgagcagcttcagcagttgatcgcctgggcgggtaccgagccggacaccgaggtcactatcgagcgaactgatggtgacgaaggcccgggcctgtacgccttcaacagcgatcaccccgaggaaggcgccatccgcctcgatgaaggtgtgaaatcggcacccgaaggcaactccgtctccctgccctggtcaccgccgatgctggacgtaccgaggccgcccatcgccggagcgtgtgtttcccccgggaggctgcgtgcgatggtcaagcattcctttgagtccgcacacgatcccgatgacgccgcgttacggatctgcgtggcgatcgacgccgagctcggcctttccggtaatggttggtttgatgatgaccctgctgtgcttgcggctggcggcagcgccctttctggcgcgacggacgccaccgatgcacacgagattgcccagcatctgcagctgatggaagagtgggacgcctctgcggcgccgcctttgacggagctgaccattaatggcgtggccgttccatgcttgggtccagatgcaggcctggcggagaaagcagcgcatgcaaaactgctggtgtcgatgatgttcggggacgatggttctgaagagctcagcggaattcccgaacctgcatctggaacccttcactga

SEQ ID NO: 530964 - DNA, 1596 bp, Stenotrophomonas maltophilia
atgatttgtcaagaaaaagcagtaaagaagatgcctcgaacgatacccctcaaaggtatttttcgaggtatttttttgcccaaaccttacttcttgactcgtccttcgggtctctatgtccgctatcagatccccaaacctatccggctgatgctgggttgtaggttcatcgtgcgcagcctaggacgcctcaggggagacccggcaaggctggccgctgctgtgggggctatggcactctcggaagtcttcacaggcttcacagggggttctatgagcgctgatgatttcaagaaaaaaattgatcagttcaaagttggaaaaatttccgttgggcctgatggaatgactttggaaggcatcgaagttgaagacgatgctgatgctgaacgacttcagaaatttgttagcaccataccaaagcaggttcgtgggtatggtggctttgatgacacctactacaagaaagaagacctcgaaaattttgacggtcatatcttgagcaagtgcattgaagatcatctcgttgatatgcgacttgcaacaatcgaagaaagaaatgttctcgacactgctttttcgctgaaattgttccttgagctgaccggagatcgtcctctcaagtcggtcaaaaccagccatatccgaacttttcttgaaaccattgaatttctccctgcacacagttccaagaaaccgaaactgaaagacttgtctttcaaggaaaccattgaagccggtaaaaccggacaatttcctctgatccagtcaagaacaaagaagaagcacaaggatcaccttaaagcgttctttaattcccaagtgcgtcagaacaacattgatcgagctccccatatcggcattatcaatgtagccaaagggaaagccgaagaatcaaccaagcctgaattttccaaagaagatattaatattatcttcggctctgaattcaaagaatgggcaaagaaatatcctcatcgtttctttggttcgatgatcggctatgcaactggtgctcgtgtcaatgaaattgctcaattgtattgcgatgacattgaacaagttcacggggtatacggtattcacatcaggaaaagaagggaagatcaaaagctgaaaaatcggcactcgtcccgctttgttccattgccccagattttggcttctagttttttgaattatatcgaagaagccaaagctgccggatttgatcgccccttccctaacctcacttttacaaaagctgccggttatggggatggcctttcagatcaattttctcgatatgtgaaaagtttggaccttgaagacaggaagacttttcactctttcaggcactcaatcgttagcgggcttgtcaacgagattggaattcaaattaatatcatgcaagagatcacagggcacgatctgactctacccggtgcaatgaagcattatattaatccgtccactattgaagctcgacatagtgcaattgaaaaatacaccgcaggcatggaatttcctgcttatgaagccggtatgttcaaagctgctttttctcttgctaaaaacaagagaaagcaacaagcccgaaaagcaaagggggagtga

SEQ ID NO: 530965 - DNA, 1794 bp, Stenotrophomonas maltophilia
atgctaaaaagtggtcgtctggtttctggctggaacgggtctgttcaagtagaaccttacgccgtaaattcggcgggtgattcttttgttattacttatctggatacacctaaagatgtgtgcaacaaactaggagcaggtgcttcaaccttgacttatgatgttttgatcaatggagaaagctcattcactaacaagttgttctctccaacttctgcggcttccttgtgtgatgaaagctcaaaagttgaatttgttttttttggtaataccaacggttcttatgctgccgatccattagatttaccacattctccggcgtctgtaaggcccgatctcgacacacctatcactaatatagtgggtgatgctggtggcgtcagggacgccacggagacgccttttaaccctacaaatccggggtctggtgtcgttccaacaattccagctattcccgtaagccctactccttctacgccaaaccctgctcctgcttcttcaactccaaccacaccaccagcaataaatattgttaatgagtgtcaagatggatatgaggatagatcgggttcttgtcctgctggccaatatggctcttctgtagaacgacaaatattagcttgtgaactcgctagcaatcccggctttcgtgagacttgggttcccaatgatcaaaggcttcctagaggttggaattattattcgtcgggaacttgtgcaacctgcccacccgtttcacgtgaaacattaactcaatgggcttcttataattccaataattgccctgctgggcaatatggttatacgaacagaagcaaagaacagtcccactaccgagacggctcctataattgtccgttaggaacaaccaccttgcccgctcctacttatagtgcgtggagtgcttgggttgacactgggaatacattatttgtttctagtgcttgtagtagttgtcctgcggcttctacaggaagtcaaacacagtgggttggctataccgctgcgttgtgtcctgccggtcaatacggcttgactaacagggaaaaagagcagttatcgactcgttctatttcttataattgtccagcaggaaccgcttctattcctgcgcctacttatggtggctggagttcttggacagacacaggaactactcgctctgtaaataatgaaacctgttctaattgtcctgcttcttctacggacagtaaaacgcaatgggttataactgctgactcggcctgtccaaccgggcaaactggaactataagaaacgagaaagaacaaagttctaatagaacgatttcttataattgccctgtaggaactacgtctattcctgctgccacttatggaacttggacaacatggactgacacagggataacaagggttgcttctaacacctgtgccaatagctgtgcttctgcatcaaacccttataccaatgttcaagctcaaaattgtggtgcatctacctcaaatggtgcttatgccgatgtttgtgatagctgggcagatattggaacttatgattacaatcgatcatctgcaatcggaaaatatggatcttcatatcgtggggccgttgcatcgaagataagatttacatttaataatgtggtgtatacatgctcgtattcttcaaacatgtattcgagcggtcaagctggatcttctggctctcctaatactacattgccagcaggaattagttgcggttctgcaaattggtatgcaagcagttccggcaatgtctcgttctcttttggatacacaagctgcccataa

SEQ ID NO: 530966 - DNA, 993 bp, Stenotrophomonas maltophilia
atgagcctgttccgcccccgcatgctgctgtccgtcgccctgatcggcctgctggccggctgcggtggcgatccggtccgtcccacgccgccgccggcacccaccgtggtgccgcaggccaagccggtgaagatcggcatcgccctcggtggtggcgcagccaagggcttcgcccacatcggcgtgatcaagatgctggaggccaatggcttcgagccggccgtggtgtccggcaccagcgccggcagcgtggtgggtgcgctgtatgccagcggcatggacgcgttccagatgcagagcaaggcggtcgcgctggacgaagccagcatccgcgacgtgcgcctgttctccggcggtctggtgcagggccagaagctgcaggactacgtcaacgagcaggttgccaaccgtcctgccgagcgcctgaagaagccgttcgccgccgtcgccacccagctggagaccggcgagcgtgcgatcttcgtgcgcggcaacgtcggccaggcggtgcgcgcgtcgagcagcattcccggtgtgttcgagccggtgaagatcggcggtcgcaactacatcgacggcggcgtggtcagcccggtgccggtggatgccgcgcgccagctcggcgccgacttcgtgatcgccgtggacatctccagcaaggccagcggcaaggcgccgaccgacatgctgggcatcgtcaaccagtccatctcgatcatgggccagcgcctgggcgagcaggaactggcgcgcgccgacatcgtcatccgcccgaaggtactggacatcggcgccgccgatttcagccagcgtggcaccgcaatcctggaaggcgaaaaggccgcgatggcggcgatgccgcagatccgcgcgaagatccagcagctgcagcgcgcacgtgccgcggcggccgcaccggcaccggtggccgcgccgaagtgcgaggaagcctcgcgcctgggcaagctgatgggccgcaaggacaagtgctga

SEQ ID NO: 530967 - DNA, 561 bp, Stenotrophomonas maltophilia
atggtggcctacaactacacggcagttaacgccatccccttggtaatggattgccaagcactacgctccacgtccggcctgcagattctgggcgagggtctgttgccagcgggtgcgggtgctgccgttttccacactgggggttactcgtcgcccgtggcgggccgaacgatctttggcgatggttctggttggcagtaccgatgggctcggcgtactggcgccgtgaacatcgacgttatgacgctggatgactctggcaatctgaccgctaacaacctcactgcaacgtcagacgagagcctgaaggagcattgggaggagatttccccatcgcttgtcgatggattggctagcctgctggcaggcacctatgaccgcaaggacctgaaacagcggcaagtgggtgttggcgcgcagtctttgcagaagatcatgccagaggctgtttatggcgatgatctgctgagcgtgaactatggcggcgcggcgctggtgtctgcggttgccctggcaaagcggctggtggcgctggagcggagggtctatggcgcttcctag

SEQ ID NO: 530968 - DNA, 228 bp, Stenotrophomonas maltophilia
atgtctgcttggctgatttccttgatcctcaagcccctggcattcgtcgggatcgcctttctctactgggcggtagccatcaaggggggcaactggatcgccaagctgatccccagtgagaagtggcgcaggatccttacggaggagcgctatgacttcaattggaagaacccacggcgagagccgtacccgactcaccgcccatcgcggtcagaacgccctgaatga

SEQ ID NO: 530969 - DNA, 1878 bp, Stenotrophomonas maltophilia
atggcgaccctcgctgaactggaacgtgcgctggtagcggcggatgctgcgggcaacacggaggatgcccgcgcactggctcaggccatcgcagcccagcggcagcccaaggcacagccgacgcaggaacgtgcacctcgcgctacggacaacatgagtggcctagaccgcttccgggcgggcatcggcaagtcactggtggataccggcacggggttggctcaggttgtcctgcgcaacctcaccccgcaggtgccggagttcatcacgcgggctggtgatcgggtggagcaggccatcggcagtccgacctacagcaatgcgcgtcgtgctgtcttcggagcgtacaacgccccgcgtcagggtttggagcgcaaggttgccgagcggcgcgagattgacaaggacctgatggataccggcgcgggcctggccggtaacgtggtcggcacgctggcgcagctggcggctccaggcatcgcagcacgcggcaccgcaacggcaccgctgctgctgcccacctcggtgcgtggcagtgtggctcagggcgctgtgttcggctctgcgcagcctgtggcaagccaaggtgaggtgctggagaacgcaggtatcggcgctggcggcggcctgttgggtgcggctattccagcagcggctgggcgtgctgtgcaggcagtcaagcaggtcggagcgccgttcactcagcgcgggactgaggaggcggctgcacgcgtcatccgtggcttcgccgaggatccggcgcgcctggtgcgcaatccgtcctcggttcccggtgtgcagcgcactttggctgaggaaacgctggatccgggcatcgcccagcttcagcgggcagtgtcagcccgtgagggggcgccgttcgactctctgcggcgtggcaacaatgcggcccgggtcggagcgatccgccagtttgccggggacgaggctgacattgcggcggctgaggctgcccgtgatgcggcggccgtaccgctcctgcagcgtgctgagactgtcacgggggtggatacccagccagttcgggactttgtccagcaggccattgatgccaatgccacgcgcccgactgtgcgcaatgcggttcgcgacgtgcaggcagcgttgaatgaggcaggagacgacgtttccagtctctacaaccttcgcaagtatatcgatgacctactgcagggtagggtgggtggtgagcagggctatgcccgcgcggcgtcccgtgagcttcagggcgtgaagggagctctcgaccagcagctggaatcagccagcccggagtttgggcagtacctggacctttaccgtagcggttcggccccgatcaatagaatgcaggcgggccaggagctgctgcgtcggagcagtggcggcatcgctgatcctactacgggactggaagttctgacccccgctgcgtttggccggagtgcgcgtaacctggatgccatcgcggcaagcggtactgggttcggaaaggcctcggcagcgaatgtgtttcagccgactgatctagctacaatccgtggtgttaacgacgacttggcccgtcaggcatttgccgatacggcgggcaggggtagtggttcggacacattccagaagctggcgacgaacggcgacattctgggtgccgtgcaggagctgggcgtcaatatccccggttccggggtgatccgtatgctgggttcagctggccgggaccgcgttaaccgccagctggtcgagatcctgactgatccggcccgcgctcaggatgtactgcgccgaaccagcgccagcgaccgcaaggtcattcagggcgttctgaccgcgatgggcggtgagtcgggtacggctctcgccgtgggttcttccaattga

SEQ ID NO: 530970 - DNA, 1971 bp, Stenotrophomonas maltophilia
atggcaatcaactatggtggcctgctgggtcggttcattccgcaggctaatggcctgagcgaatcagaccgcaatgcgattggccgccagagcttgctgtcgcttggcttgggcctgctgcgcccatccggtggcagcttcggcggcgcactcgccaatggcatccagtccgggctcctgtctgccaatcagggcgtacaggacgcggagaacgcccggtacaagaacgaaatcctgggtcgcacccgtcaggggatggagcgcaacgctgccatcgaggcggcgcagcagggcgcgctgaaccccgatgggtcaatcaatcaggaggcttggggcaagtgggccgcaatcgatccggttggcgcctctacgttccgccgcgagaacactccgaagccccagaacgattggaccctggctcaggtgggtgatggcactccgggtggcctgctcgatgtttgggttaacaaggacactcgcgagatccgtgacctgcagggcaacccgatcagcggaggtctgttggctcctggtgctgcatcttcacaggcgccctccgatggccttctggctcctggttctcttgggaagtttggcgcggggaacatcgacctaaccaagaggccgagggttaagaatcccgatggatctatcagcacggtcctttctttctcgaccaacattgatgggaaagaggtgctacttccgctcgtgtctgacgacggccggatcgtgtctgaggatgaggcaatccgcaactacgagcgcaccggacgataccttgggaagttcaatacaccagaagaggcggatgcttacgctgagcgactgcacaatgagcaggagtcaatgtacgccgaccgtactggcggcctgctgggttctgatgttctgccgcgcctggagcgggccgtgatgcaggtagagtcgggtggaaacccagctgccgtgtcgagcaagggcgcggtaggcaccatgcagaccatgcccggcacgctgcgcgatcctggctacggtgttgttccggcccgcgatcagtccccggcagagcaggagcgtgtgggcaaggactatcttggcgccatgcttcgccagtatgtagacccgcgtgccgcgctggccgcgtacaactgggggccgggcaacgtcgataacgccctgcgtgcagccggtggcaacgtggacgccatgcttgcatcggcccctgcagagacgcgtgcttatgtcccgaaggtgcttgcacaggtcgggggcggcgctggtggttcccgctccccgcagatcggtagccgcccagcaaggactcaggcccagggcgaacgttaccgcactctgaatgcacaggaagtagctggccttggcttgccgcaggggaccgtggcccaggttggcccgactggacagattcagattgttaacaagccgcgtgacgtgcctgcgggcggcgctggtcaggtgatcgataaccctgacggcaccacgacctacatccctggtggcaaaacgaccgagggtgagcgtaatgcggctggcttctatcagcgcatggtgaatgccacgaaggagctcaacgacctgacgagcgcggggtacaaccccaacaacctgcgcgaccgcgtgggtgctggcgtagacaacattccgttgctcggtggcgcgctagcacccttgggccgggtcgggaagacttctcagggacagcagtaccagcaggctgcaatgaactggatccgcgcaaacctgcgtaaggaatcaggtgctgccatcggcgtgaaggaagccgacgacgagtacaagaactacttcccggtgttgggtgactcaccggaggtcattgcgcagaaggcacggaaccgcgccgttgttgagcaggctatgcgctcggcggcaggcggtgcgcttccggctccgcaggctgcatccagtgatgcacagatcgattccctcttgaagaaatacggagcgcgctaa

SEQ ID NO: 530971 - DNA, 897 bp, Stenotrophomonas maltophilia
atgagttccggtaagaagaagaccaccaataccaccgtcagcacgaacgacccgcccgcatgggctactggctatttccagcaggcactgaatcgggctggcgagctctctcagcagccctacattggctatggcggccctaccgtggccggattcacgccggaccaggagaatgcgttcacgatgaatcgcgccttggccgatcagaacgcatggacccaggcacgcgcgggcgactacgttaaccgcgccattgggggcgagttctctaacccgtacatcgggcagatgaacccgtatgcgagtgagaacccctatctcggaaacatgatcgatgcggcgaatcgggacattaccgaccgctataactcgtcaactttgccgactcagctagcccagttcaacgcgggtggcgcctatggcggctctgccatgcagcaggcactgtcgcagggccagcagaatctggcgcagcagctgagcgataccaacttccagtaccgcaatgccgactatgaccgtaggtctcagctcgtagagtctgccctgaatcgcaatggagcgctgtatggtcaagaccagcagctgcgccaaagcgctctcggtttcctgccgcagttgcagcagatgggctacaacgatacgaaccagatcctcaagcaaggcacgttgcagcagctcttgaaccagcaggcgatcaacgatgaccgccagcagttcaacgagtggcgggattgggatgcaaatcgtctgggactgctgaccaatgcgctgggcgcgattcgtggcggaagcagcagcaatacgaccactggcgacaatccgaactacaccagcgcgggacagaacgctgccggttacgcggcaatcctggcctctctgtgggggaatagctga

SEQ ID NO: 530972 - DNA, 447 bp, Stenotrophomonas maltophilia
atgggtgcagtgccgattccttacgggggcttgatggaacttgtttacgtgaacccggccgagcttcgcgctcactggccggtggtttcggccgccctcgattcggtgattgatgccacctccccagattggatcaaggaggacgtgtatcaccagctggcgtcaaagcaggccacggctcacctgatatacgagcgcggcgagtatcgatccctcttcatcctgacgcagcccgccgaggaattcagcggtgagcgatgcctgcatatctggatcgctgagaacgcgcgatccggcactgatgagtcgtttgactacggcctgaatgcaatcaaggccatcgcccagcagctgcgggcacccaagctaactcttgaatccccccgcaaaggctgggccaagcgattcaagctcgtttccgccacctatgaggtgccgctggcatga

SEQ ID NO: 530973 - DNA, 1467 bp, Stenotrophomonas maltophilia
atgcgcgcacagctgatcgggtttgccccggacctagacccggaaacccccggcatcctgaccgactgcaacgcgatcatcccgaccaccacgggactggctgcggcgaactcgcttgttaacacgaactacccggcactggctgcaccggctacaagcgccttcattgcgcagcttctggacggcaccaagcgtgtccttgtggcggatggcccgcgcattgaagaggcttcgggtggttcgtgggtggatcgttcccgtgctggcggttacagcggcaccaaccgcatgcgctgggctgtattcggaaacaacgtactagcggccaaccgcaccgaggtcatcgggcaggcggttccgggctctggcttcacggacattgcgggttctcccgccgcgtcgatcatcgtcacggcggctggctttgtcatggcgctgaacgtgaatcaggcccagtacggtgatgcaccggatgggtggcactgctcgggcatccgcaatcaggcgacgtggacggcctcagctgccacgcaatgtcagtttggccgcttgctagattctcctggcgccatcaaggctggtgcggcgctgggcagtgacgtggtggcgtacaaggacacctcgatgtacctgggccgctacgttggccctccgctggtgtggcagtgggaccgtgtaccgggcgacattggctgttccggcaatgaatcggttgtggtcgtcggcacgcagcatttctttatcgggccgtccgacttctacgtttatgacggcacggtgccccggcccattggcggagccacgttcaacagcacggccaccccggtccgggagtggttcttcgctaacctcaaccagcagtacaaggagcgcatcttcggcgtcgccgatatcccgcgcgatcttgtttactggtactaccccagcacggccagcagcggcgagctggatagctgcttgatctacaacttccgcacgaaccagtggggaaagcaggccatcagcgtgcaggccgcgctgctgtactccagcggtcagatcacttacgacggcctgggcgccctgtacccaacctacgacgcgctgccgaacatcgcgtatgactccagcttctggctggccgacacgatggctccggccgtgattcaagggagcgtgctgaaaacgatcacgggtgagcccgggccgtcatggctggtgactggagacgttggtgacatggacaactacgtctttgctgaccgcctgaagcctcgatttcggatcaagccagcaacggcgcagatgaccaacttctaccgggaagacctgggcgatccaaggattcaggacgtgacagcccagatgcagcgggcgcgatttgacttccggcgctcttcgcactggcacagcttccggatggacttcccgggccggatggcgatcaacgggttctcgctggcagttaacggaggatcgccggaatga

SEQ ID NO: 530974 - DNA, 621 bp, Stenotrophomonas maltophilia
atggctaccgtcgttgattacgcgaccctgaaagcagcggtggccgatgagcttgctcgggctgacctaactaacgcgattcccgggttcatccagctcgcagaggctgacttgaaccgtcagcttcgtgtccgccagatgcaggctaccgcgagcggaacgagtgttggcgacacaatcactctgccttccaacttccgggagatgcaggctgtatatgtcacgttcggaggggtcaagctccccttgagcgcgatgagccctgatgcactggctaccaatgccaactacttcggcggccctcccatcggctatgtagagcggggcgatagcctgattcttgttaacagcccgggcaatctcgactacgtaatcacctacttcgcatcgattcccgcgctctccgactcaaaccagcagaactggctgatcctccgggagccggggctctacctctactcctcgcttgcgcactcatccccgttcatcaacgacgatgcgcgcatccagacgtgggcagggatcgccaaggcgatccgaaccggcatgaaggcagaggatgacggggcgcgctatggcccaggttcgatgattcgcccagttaacaggatgcttccctaa

SEQ ID NO: 530975 - DNA, 276 bp, Stenotrophomonas maltophilia
atggctgttatcgctactccggggcgcaccccgatcaccgattcgtgtcccacgttccctggcggtgcactggccgtcacacctagtgacgctgataccttcgccaatccggtgtcgatctacattggcgggtcggggaacatctcggtaacgcctggtaatggcgtgtctgcgccagtgaccctcgctgttctggctgggacgatgcttccgttcactgtccttgccgtccgatccactggcaccacggcaacgggcattgtggcggtgttctga

SEQ ID NO: 530976 - DNA, 312 bp, Stenotrophomonas maltophilia
atgcaggacggaattcgacgggtgatgacccgtgacggcgagaacgccgtggatctggtgtacgcaaacatggatgacctccgtgaggtggagcgacattgcgacctgatcagcagggacgcggacaaggtgcgcggcgacatcgtcactctcgccgaagttcctggcgtggttcttgagaagtactgcaacgagcgcggggttcgctgggacgagttcatgaagtccgccgacctccagactgaattcattaacagcgagtacgcccggccgttccggatctggggccgtactggcaacaagaagttctaa

SEQ ID NO: 530977 - DNA, 984 bp, Stenotrophomonas maltophilia
atgcccgcaaataccctcatcaccaacaacgtcgtgcgcattgccgaggacgttgaagacaaggtttacaacttccgtccgtcggataccccgctggtttcggccatcgcccgcgtcccggtcgagaaccgcttccacgagtggaccgctgacacctatcgcgccccgaacccggccaatgctgccatcgaaggtgcggatgcgacctatgcggccatcacccagccggggcagtacaacaaccgtacccagatcatccaggacaccatgtccatctcgggtacgactgaagcggtgcgtaagtatggccgcagctccgaagtgtcctaccaaggcaccaagaagatggtcgagctgaagaaggacgttgaggcagctgccatcgccaatggcaccgccgtcaccggaacttcgggcgttgctggtcagatgcgcggcctgtacggcttcgttgcgaccaacaacagcctcggcgcatctggtgtggctccgaacccgcagaccaataccgcaccgactgcaggcaccctgcgtgcgttcaccgagccgctgctgaagaccgtcatcgcttcggtctacaccaacggcggcaactgtgacgccctgctggtgtcgccgagccacaagcagctggtgtcggccttcaccggcaacgtccagcgcaccaatgaggtggcggagcagttcggcagcgtcaaggggccgtctccggctgtgctgcagaccgcgttcaccttctacggccatgacttcggcgtcaccaaggtgatcccgaaccgcgtcatgaccggctcgggtgctggcctgatcaataccgcctacgtggtggacttcgacaagatcaagctgggccagctgcgtccgttccagcgcaaggagctggcgcaggtcggtgacgccaccaactaccagatcctgaccgaagtcaccctggtggtcccgcaggaaagcgtgctgggtgcggtccgcgacctcagcccgtaa

SEQ ID NO: 530978 - DNA, 957 bp, Stenotrophomonas maltophilia
atgacgagtcaaccctccggggaactcggccagactgagccgagcctgatggatattgcccttgaaatggatgcccagccgggcgaggccgttgaggaagaggatgtagagccgactgacgaggccgaagaggtcgaggaaggggctgacattgaggatccggatgaagacccggaagaggaagaggataccccgcccgaagacccggaatttgaggtcgaaggcgccaaggtgaagctgtccgagcttcgcgccgggtacatgaaggacgcagattatcgacgcaagacgactgaggtagccgaaaccaagcgagctgtcgaaggtgagcgccaggagatccagcagcagcgggaatatctcgccaagcaggctggtcccttgatgcaccttctgcgcgagcagttgatcggtagccaggagcggcttgcaaggctggctcaggaagatcccgcagcgtgggtcgctgagaaccagcagttccagcagcgtgcgcagatgtttgatgcactgctggctcagagtcaacagctagatgcgcaggccaaggcggattcagagcgagcgcacgaagagttcgtgagaagcgagaaggccatcctgcgcgagaagctcccgacctggaatgacccaaaggttgcagctgatgagcagcagagggtcgccacatacttgatggagcaggggtactcgcccgaagagcttcgccacctcgaccatcgcgacctgctgactgcagttgacgcgatgaagtggcgtgaacaccagaagaaggtctcctcggccaaggcgaagcagggccagccgagcatccctgagcgtgttcagaagccgggcgtatcgaagccccagcccactcagcaacagaaacgcgtcgttgaggcccgtaagcgccttaacagcaaccccaatgatctccgctccctgtcaggctacctgaaggaaagcggcttctaa

SEQ ID NO: 530979 - DNA, 285 bp, Stenotrophomonas maltophilia
gtgacgcctgaagaagaagttcagcgcggcctagatgcagaacggctccttcgggagccgttgctcgttgaggcctttgaaaagcttgagagggagtacacgaaagcatggcagaccagtccggcaagagacgcggaaggccgcgaaaagttgttccagatgcagaagtgcctgtcgagcgtgcaactgcacctcaagacagtgatgcagaacggccagttcgtgcagaagcggacggtcgccgagaagatccgcgaggctgggcgcaggttcttgcccagctaa

SEQ ID NO: 530980 - DNA, 2223 bp, Stenotrophomonas maltophilia
atggcagacgactacgaatcgcttgatatcgccgaggcagacagcccggagatgacgaacgatgagcttgcggcgctgattgaccatgagaacgcaatcgctatcggcgtgaacgatcagttcgcgtcagaccgcgaggagatgcgctacttctacatgggtgaggcgcgcggcaagctggtgccgcccgagggtgacggccattctcaggtggtcgataagaccctgatggacacggtcgagtggttgcagccctcgctgatgaaaatgttcagccaggatggcgtggtcgtttttgagcccgactcgcgcaatgacgaaaaagccgctcaggacgcatctacctactgcaattacctcttcttcaaagagaacgaagacggcttcaccacgctgcatgacgctatcaagtcgtgcctgatcttccggatgggcgccaccaagacgtggtgcgagaaggcgtgggatgagcgccaggaggtctatcgcgggctgtccctggctgaggtggaggcgctctctcaagaggagaacgttgagatttcctctgtcgaggaagttggtcagcttgaccccatgcaggtcccggagggcgccccgccagaggcagcgttgctctatgacgtagtcctgagcatcaaggaacagaagaatcggatccgtgtggctggcgtgccgccggaggagatccgaattgcccgcgacacgcgcaccatgagtgacgtgcgatacatcgctcatgtggtcgagcggacgcggtcagacctcttgtccgagggctggcctgaaagcgaagtggacacttactgtgggtcgaatgaggccgacgaggggcagtgggagaaggacgagcggcacgagtacgacggttccgaggactacggtcaagcccagggcgacgagagccagaagaagggcgtcgtcactgagtgttacatcaaggtggacttcgatggggacggcatcgccgaataccgccgaatcgtgaagctgggccggtacatccacatcaacgagatcacggacgaccatcccttctcgctggcgactccgatcctgatgccgcacaagctgatcggcttgggcatgtgggatctggtcgaggatctgcagcgcatccgcactgcgctcacacggcaaatgctggacaacgcctatctggttaacaacccgcagaccaccgtggttgccaaccaagtgaatctggacgatctggccaacccgcgcccaggtggctggcgccgagtggaaagcctagaggcactgcgcgtcgacgtgaccccgttcgttgggccgcacgtactgactctgctcgatcactttgggcaagtgcagaacacccgcacgggcgttaccgagatgaactcggcgctgaatgccgactcgctggcgaagggcaatattggctcggagggcatctctgagctgattgggcagggcgcccaacgcatcgagttgatcgcccgtgtcatagccgagacgttcatgaaacgtcagtggcgtttgctgctgaaaatggcgaagcagtacacggaccgtgagaaggaaatcaaggtcaacggccagtggctgaacatcgatccgcgtcagtggaagaatcagtaccggatgacggtatctgttggtgtaggcaaccagggcgaggccaagaagatgctgggcctacagacgattgccagcgtgcagcagcgtgcgtttgagctggggattgttacccccgagaacgccatgaacctcgcgatggatatcgcccgtgcggctggtgagaagcagcccgagcggtacttcagtccgcccccgccgccgaatcccaatcagggaccgccgccagaggttcaggccgaaatggtgaaggctcagacccagatgcagctcgcccaggtgaagggtcaggttgaaatccaggtggagcagatgcggcaggaggctcaggcgcagcagaacgccttggagacacgccttgaggctgagcgcaatgagcttgaccggcagaatcaggccgagatccagcgcctcaagatccaacaggaagctgagcttgccgcgctgaagctgcagtacgaggacgctgaccgacagcgagagcgagacttccagcgctggaaggccgagctggacgcatccgtaaaggtcgagacggccaacatcagctccaagtccaaggtcgataacccggccacccagacggcaaccgatgagattgcacgggaggtgcagccgtga

SEQ ID NO: 530981 - DNA, 1128 bp, Stenotrophomonas maltophilia
atgcggattctctgcacgcgagaggtgcagaagtccctagaagactcggtcaagaagctgctcgccgatcagatcgacgggatgggactgtcggggctgttcgaggtccagaagaatgccatctatgggtctaacgggtccgagtttctattcgctggcctaggcgatcagacggccgagtccatcaagtcctacgagggcgtggacattgtctgggtcgaagaggcagcgaacgtcaccgaccgcagctggacgatcctgaccccaaccatccgcaagaagggatctgaaatttgggtcagcttcaacccgggcctagacaccgatcccacctatgttcggttcgttgaggatccgccgaccaatgcggtagttgtccagatgaactacatggataacccatggttcaaggacaccgagcttgttcaggagcgcgaagacgacgcgctgaagctgcctgaggctgaatacaacaacaagtggctaggcaagtgcgtccccgccgtgtctggcgcgatctacgcagaccaggtggcggaggcggtagaggccaacaggattgcgcaggtgccgtacgacccgcgcctgaaggttcacgtcgtgtttgaccttggctacaacgacgccatggtcattggccttgtccagaagcacatcagccagctgagggtgatcaagtccctggagttcaagggcaagacgcttgagtacatctcggctgagctgaaggcgctgggcttcaactggggccgtgtgttcctgccccatgacggtggacacggtgactacaagaccggcctgacggcgcagcagttgatgcgcggcatgggttgggactgccatgtactgcccacctacccgggcgcagtcgagatcggcattcggaaggctcggtccatgttcccgcgtgtcgtattcgataaggacggctgcaaggggttggttgaaaacctccgccgctatcggcgagcaattccgcaatccactggcgagcctgggcgccccgtccatgacgagcatagccatggcgccgacatgttccgctacgtggccgaagccgagccgcagatgaccaatgacacctggggagaagcccccgtgcatcgacccaacatgaggtacgtttga

SEQ ID NO: 530982 - DNA, 279 bp, Stenotrophomonas maltophilia
atggcacgcggaggcaagcgccccggcgccggccgaccaccgttggctaagaacaaaatccccatggcggccaaggcaatgatcgaacaggtcgccatggggctgggcggtgcggaacggatgttgacctgggtccaagaggatccggccaacgagaaggcgttctggactgcgatctatccgaagctgctccctctgcaagtacagggggacaaagacaacccccttgttgggggcattacggtgacccttgtcaaacctgagcatccagatacctga

SEQ ID NO: 530983 - DNA, 165 bp, Stenotrophomonas maltophilia
atgccgagttggctgaatcagaaagagatcgtgatcatcaagacgttcaacggttgggcggttggttccgacaagggcgcagacgcccgggactgcgtggcctttgagacgtgggatgcgctggtgtactggctgaatgcccattgggttgcaccggctccgtga

SEQ ID NO: 530984 - DNA, 201 bp, Stenotrophomonas maltophilia
atgaacgagatggacgccaagggcgccgcgttcgtggacgcctgccaagacgccgggacgttcggcgtagccattcggctactggacgccgagaacatccgaatcatcagccgcaaggtgccaatgaaggcactggcccagctactgcggcaggcggcggatatctgcgaacaacaggccgggaaagaccggctcaattga

SEQ ID NO: 530985 - DNA, 267 bp, Stenotrophomonas maltophilia
atgatcgggcactacgtcagggcgctgaccctgatgctgctcctgccgatgatggcgggatgcgcgttgctgagcaggcacacaaagcagccttacgtgccgcctgcagggtgcggggagagaagtcctgcgatggagcccccggcccctgagaacaccacggactggcgcatctggcgcgccctgtacgtgggtgcggtatgggcctacgtggactcggagaacaagagagcggccaccgctgactgcctggacaagcaccgatga

SEQ ID NO: 530986 - DNA, 555 bp, Stenotrophomonas maltophilia
atgcgtaccttagccgtcctactgctggcctcactggctggttgcgcagacgcgcgcccgtcgattgagcggtacacctaccggattggcacgcaggacggcggcctatgcagtgcaacggcagtggggcgtgaagtcctgctgacggccaagcactgcatcgaagcgacagattcagtgatctacatcggcaacaagcgggtggagatcaagcacatcgagacggactcgcgggatcacgccttggtgtgggtgggtcagcgattccccgtatgggtccagcgaggcgccacaccggttaaaggcgatgccctttcgttcattggcaacgttgacggcttcgatcagttttaccggtcaggccagatggcgggctggtacagctccgcaatgctgcttgacatgacctgcggcaagggcgactccggcgcaggagtgttcaacgagtccggccaactggtcggcatgatcagcgcggtctatgtgggaccgatcgttcggttctgcgtgtcctacccgctggcgttcagccccaagcagtgggcgcgcgtgtga

SEQ ID NO: 530987 - DNA, 474 bp, Stenotrophomonas maltophilia
gtggctaacgcaatcaaggctgttgtggtcggtggttcggctgcgacggtgatcgcgctggctgccggcgcactggtcaagccgtgggaagggtattcgccgaccccatacgtggacatggttggcgttgccacctactgctacggcgacaccgggcggccagccaagaagtattacaccgagcaggagtgcgctgagcagctgaacagtcggctcggcagctatctcgccggtatcagtcaatgcatcaagcatccgatgcgtgaacgcgagtgggctgcggtcctgagctggacttacaacgtgggcgtgggtgctgcctgcaagtccacgttggtccgacgcatcaacagcggagagcgtggccccggctggtgtgctgagctggataagtgggtttacgcaggaggcaaacgagtcaagggactggttaaccgtcgagctgctgaacggaacctctgcgagggcaggtaa

SEQ ID NO: 530988 - DNA, 441 bp, Stenotrophomonas maltophilia
atgaccactatcgccgtaaagggtggggtcatggctgcggatacgcagctgtccagcagcacgattcaccgcgtgcagaagatctacccccttcctggcggcggttgtgttggcggctgcggcgagtggtcgagagcctatgcggccatctcatggctgctgggtgggcgacagggcgaagcgcccgagtttgagaacgccgagctggttctgatgaagcctgacggtagcgtatggattgcctgtgaacggttcccagagtttccgctactggaagacatggcagcgcttggctgcggcagtgcggcggctatggcgctgatggctcatggccttggcgccaaggaggccgtgcgcgctacgtgccggactgatcccggatcgagcgagccggtgcaggtgttcaagctgccgaggcggcggaagaagaattcctcttag

SEQ ID NO: 530989 - DNA, 867 bp, Stenotrophomonas maltophilia
atggctgcggccatggagtcggccattgtcgcgctggcggagaagattccgcgagagaaggcgcggccagctcccaagcgaacgctggatgatctggctaacgtctacgtcctgaccgactaccacctgggcatgctggcttggggcgaagagacgggcgcggattgggatatcaagatcgccgaggacatgctggttgactggtttgcggcggctatcgctgctggtccggctgcccgggttggcgttctggcccagcttggcgacctcctgcactgggatgggctggaatcggtaacccccacctccgggcatgtgctggacgctgacagccggttccagaagctgatccgcgtggcgattcgtgtcatccgtcgtgtgatcgggatgctgttggatcggcacgaagtggttcacgtcgtgatggctgagggcaatcatgacctggccggttcggcgtggatgcgggaatggctgtcagccatgtatgagaacgagccgcgtgtgtcggtggatacttcgccggatccgtactactgctatgagcatgggcagacggcgttgttcttccatcatggccacaagaagcgcatggcgcagattgacaccgtgtttgctgcgaagttccgcgaggtctttggccgaacgaagcacgcgtatgcccacatggggcaccttcaccatatcgacgtgaaggaaacgaatctgatggtgattgagcagcaccggacccttgcggcgccggatgctcacgccagccgtggcggttggatgagcgggcgggatgcctgcgttatcacgtactcaaagaggcatggcgaggttggccgggttcggatcaattcgcagatgctggaggctgcatga

SEQ ID NO: 530990 - DNA, 393 bp, Stenotrophomonas maltophilia
gtggcctatcccgacaacaaccccaagacggtggttggggcggccaaggtcccgttgcatctcgtgccgcccagcgccaagcactacctggccctcgcactggctgacggggccaagaaatatggcccctacaactggcgagattcggcgatcagcgtttcggtctatgtggcagcagcccagcggcacctagacgcgttctgggatggcgaggactgcgccgacgactctggtgtgcaccacctagcgcatgccatggcctgctttgcgctcctgctggacgccaaggaggtcgggatgctccacgacgataggcccaaacctggggcaacccataagttgcagatgaaatatgcaactcttaatttgccacgaaccgacacgggtgactaa

SEQ ID NO: 530991 - DNA, 609 bp, Stenotrophomonas maltophilia
atggacgttcgtgagaagctggcacaactgaacccgtcttctgtccgttacgacgtttgcccgagcggtgccggcagcaccgagaatccttatgcattggcccttggcatggtccagcccgggatgggacgcgatctgctggaatacctctactggacagacggggcggttcttcggggtgcagccatttaccgtggtattgccaaggtggcaatggaagagtgggcggcgcgtatgcgcgcccatgcggatgcaaggtgcaactacgggctggccttctccttggcgaagttcaaccgggatcggtctgaggccacagtccggcaattgtccattctggaggcaagggttggccgggcgcgtgagaacctctggccgcagaatctggaagataagttgccgatcctcgtccccctgttgattcacgggatgaagaaggacaaggagttcgcttcgaacaccagcaaggcggagcagctcaagatcaccgaggcaacctaccggcagacctgggcgaaggtgtatgagtggatgctgaccaagatgattgacgaagagcaagcagcagcaagggcacttgaggcggcactgcgggatcgtgctgcatga

SEQ ID NO: 530992 - DNA, 438 bp, Stenotrophomonas maltophilia
gtgagcggagcctactcccggaaccgtggcgcccgagcagagcgggaactgtgcgccctcctgcgcgagtaccttggcgtcgaggccacccgccagtacaagcaatacgcacaggcgcagcacggagacattgaggagctgattggcccgtacctgatcgagtgcaagaaccaggcgcggatcaccttggggccgtggtgggagcaggcgagggcggcagcacaggcgcgcaaagcgattccctgcgtggcctaccgcctacccaatcgcggcctgtacgaccgttggaggtttgtggttccgctgaacgaggcatggagtgccgggcaagactggaaagattctttccgctacacggcagacgttggccttgagggcttcgcgctgctggtccgtgaattcctatctcagggggtaaagagcgatggacgttcgtga

SEQ ID NO: 530993 - DNA, 450 bp, Stenotrophomonas maltophilia
atgaggcgcgctatccgaaagccaaacaagctggaacaggcgtatcaggacgcggctcgctcgctgggctgcatcgtctgccggtggcggatcaagcacggcatgcagcgggagggggcgggacagtgcgggcatacccgcgtccatcatcgtaacgtcggggacctccacggccaccggcagatcgggcaatgggcggtcgtgtcgctgggcgactggcaccacgacggtatccctgtgatgttctggggcgacgacgaaatgcgggaggtatttggcccgtcgttcaagtttgccaaggacttccgctgctggaccgccgacgttctgccggatgttccgttccgtggtaccgaggcatggcaggaggtgcaggaccaatacctgcgcgaggcaggctacggcgagctagtggacgcaatcagggccgagtgccgggaggcggcgtga

SEQ ID NO: 530994 - DNA, 174 bp, Stenotrophomonas maltophilia
atggacttctccgactacaagaccaaggccgagtattcgcacccattcaatctcggctactcggcacgtctttctggcaggccgatctcagagaacccgtttatcggcaagcctggaattgcgtggaccgctggctgtgacaaggccaacgagaacgaccggagggtgtcatga

SEQ ID NO: 530995 - DNA, 234 bp, Stenotrophomonas maltophilia
atgaagtttgaggagatcgacaccagcactacggcgggggacatctcgctttgcccgttctgcggagactggggcgcagagtgtgcggattcgtccgtgccaagcatcaatggcggtcaaaagaaggccgtctactgcaacacgtgcttctgcgaagggcccacttccgagactgagattggtgctatcgaggcgtggaaccgccgcgccgacctcgctggggagaagggctga

SEQ ID NO: 530996 - DNA, 210 bp, Stenotrophomonas maltophilia
atgaacctcgaaaagatcgacaccagcactcatggctctgtgaatgttctcaggtcgctggtctggcagctccgtgccgagtcccagatgcgaagcagtgaaggcgcgaagtcgggcgcattcccgcttgcggcacttctgaactctgccgcagatgcggttgaggagatcgtcaactttcgaactcaaggagccaaccatgaagtttga

SEQ ID NO: 530997 - DNA, 150 bp, Stenotrophomonas maltophilia
atgtacgcaaaccaagtgcacgaacagcttagtcagaatatcgccaacctccagaagatggttcgcgatcagtcacaggatatcgccgatttgcgccatcgcgtacggcaactagagctggaaaattccgagcgggagcgcaagcaatga

SEQ ID NO: 530998 - DNA, 450 bp, Stenotrophomonas maltophilia
atgaagatgatagtcaactccgatatcgccctgcagaacgctatcggtgaggttcgggccgcgtacttggcgcgccggtttgtaaccgtgagcatttcccatggcaagaaccgcagcgatgaccagaatgcaatcagccatgtctggtacgagcaggtatcccgcgagctgcgcgaggacacgcctctaggcgtcaaggccttctgcaagctgaccatgggtgtgccgatcctccgcgccgagaacgacgagttccgtgccaagtacgacaaggccgtcaagccgatggcctacgaggacaagttgatcctgatggagtggttcccggtcacgtcgctgatgaccactccgcagctttcgcagtacctggaatcagtccagcgccattaccagcggcttggcgtgtggttggagttccccgagccgcagaacaagcagagggcagcgtga

SEQ ID NO: 530999 - DNA, 192 bp, Stenotrophomonas maltophilia
atgcagttctccatcgagatccgcgaagtgaatcaacccgtgtctgaggccggttggtacttgggcctcgggtacggaatcaagccaatggtcctgtacgcagttcgcggccagacagtgtggcgcgagggttgccgacaggtacctatcactcagtacgccgggccgctgcccgaacggagcaagtcatga

SEQ ID NO: 531000 - DNA, 1269 bp, Stenotrophomonas maltophilia
gtgagcgacgtgacccccgccttcgcagaagaggccgtgctgggtggcctgctgctggagaacctgcgattccacgacattgctccgctgattggtgccgaccatttcacctcgcggcagcggtcggagctgttcggcctgatccgcgaccgagtgctggctggtgaggatgcggacgcggtgaccatcggcgagctgtcgccgaatcacttcgacatggccctgagtctggcggcgaacgtgcccagcgcgtcgtcggtggtgctgtacgcccggatcgtccgcgagaactggcgccgtcgtgaggcggtgcaggctggcctgcagctggtttccagcgccaaggctggcgaggaagacgcggtggacgtggcggttgcaaagctgctctcgctcaacgcgaccgtgaccgactgcgagttcaccggcaagcaggcgatgcagcaggcatggaaggaagttgtacgaacccacgagaacggcgggaacctaccgggtatcactaccggcctgaaggcgctggatgagattttgggcggctggcacgactccgaccttacggtggtagggggtcgacccgcgatgggcaagacggctttcctaggcggcttggtagaagctgctgcatcagtcgggaagaagcccggtgtgatcagcgcagaacagcccgccgtgcagttggcactacgtcgcctgtcgatggtttcctcggtgtcggcaagcagtctgcgctcgggccagttcaacgacgaggactggggcctgatgcaggcaggaatggcaaaggccctgccgcgtgacatgtggatctatgaccggtccgccgtgacgttggacgaactgattggcgttgcacggaagtggaagcacgccaatgacattgggatcttgttcatcgactacgcccagcgcatccgcgtaccgcgcgccgaccgcattaccgaggtgtcgctggtcgcgcagggcatgaaggatctggcccgctcgctgaacatcccggtggtgtctctagcccaggtggtgaagggtgtcgagacgcgcaacgacaagcgaccgaacgctggcgaccttgccaacagtgacgagctgacccgcgaggcggatcagatcctgatgttgtaccgagacgaagtttacaaccgcgactcgccagacaagggcgtggctgaggttctgatcgagaagaaccgccacggcccgactgggttcaagaaggtggcattcctaagcgaaacgatgcgtttcgccgaccttgggagggacttctga

SEQ ID NO: 531001 - DNA, 654 bp, Stenotrophomonas maltophilia
atggctaacgcatggttccgcatgtattccgagttcgcatctgacgccaaggtccagatgatgagcgaggcaatgcagcgccgactcctcatggttttttgcctccgttgcagtgacgtcacagtgacgcttagtgacgaagagatcgcgtttcagatgcgcatctccgctgaggagctggccaagacaaagagcctcttcatcgagaagggtttcatcgattctgcctggaatgtcctcaactgggataagcgccagtgcgcctcagactcaagcgcagcaaggactcgcgcctaccgtgacaggaagcgtgacaccactgtgacgtcacatgccacaaagagtgacgctctagataagaagagagaagaagagaagagagaagaagaaaagccgcgcaagcgcgcacccgccaggagcgctatgcccgctgacttcggaatctcggcacgtgtccggtcatgggcagccgagaaggggcatgaccggctggagcagcacctggaatccttccgggccaaggccacggcgaaggggtacacctacgcagactgggacgctgcgttcatggaggccattcgggagaactgggccaagctgccgaccaaggtcgtccagctgcaccaggctggcggcgggaggcgtgagctgtga

SEQ ID NO: 531002 - DNA, 183 bp, Stenotrophomonas maltophilia
atgaagcacatcgccagggccatggaaggcctgcccattcctgacattgaggaactgctggctgcccctccgctcaccgaggtggaactggcgcaattcaactctctgcgtgctgccgaaatggcgcgggcagaaaagcggcgcatgccttcgccgcagcttgaccttggggaggtcgcgtga

SEQ ID NO: 531003 - DNA, 204 bp, Stenotrophomonas maltophilia
atgagcgccgatgaattcgaccgcgccagtgagcgcgagacggcggaacgtgagttggcgattctcgcccacgttaaccgccccgtagccgcacccccggtctgccccgagtgcgaggaacacccctgccatgtggcaagtaatggcgccgtgttccggttctgctctggctgcagcgaggagtacctgcggagccaccactaa

SEQ ID NO: 531004 - DNA, 375 bp, Stenotrophomonas maltophilia
atgaaaacggacgtaatccagcgtgaaatcccagtgctatcaagcctcccgcagcctcggatggctgacgagaagacggtgcgtatgtgtgagtccgaggaagacgccatcgcggttggaatcgtcctcagcggcctgacgcaggccgagattgccgcccgcatgggcatcagcaaggtctacctgaccctgatgaagcagggtcagcgaaccatgaccgtgaagatgctcgcccgcttttgctcggctactggctggaacgtcgttcgccagtaccgggatctccagatggcgctgcgcgtcgctaccggcaccccgcgtgaggttgaccggattgcgcagatcgcctcccacacgatgaggaaagtcgcatga

SEQ ID NO: 531005 - DNA, 354 bp, Stenotrophomonas maltophilia
atggacgaggatcgggtaagcaggatcgtggatctgctggacagcaagttgtccgaaaggttggggtcgcgtaggcgccccggactgcgactggtcgagtgtcaccctcccccgctggggcttgatgcccttacaagggagtcgcattgcaagatgatacgccacatccgctggagaagaggccgagccacccaggtcatcatcgatcaggcgtgctttggcctggctgggattgagcagttggatgatgaccgtctagttgcgctgcacagggacatggagcgggcagaggactgcattcgagagggcatctcgtttgaggatgccggtcttattacatcaacgttcgactaa

SEQ ID NO: 531006 - DNA, 666 bp, Stenotrophomonas maltophilia
atgagccaggaagtcctcaccgcattccacttcgtcgccgacaccctccgcgacggtcggccggtcccggctgatggcgagctgctggtacacgatggcgaagtgcgcctgtgcgcccaaggcctgcacgcgagcatcaatgcgttcgatgccctgcagtacgcgccgggcaacactctgtgcctggtcgagctgaccgggaccatcgttcgcggcgacgacaaggtggccgcaagcgagcgccggatcatcaagcgaattgatgccgagccgctgatgcgcgagttcgcacgctggtcggccctgcaggttatcgatctgtgggatgcgcctgatgtagttcgtcagtacctgacgacgggtgatgagtctctccgggccgccgcaggggccgccgcatgggacgccgcacgggccgccgcatgggacgccgcacgggccgccgcatgggacgccgcacgggccgccgcatgggacgccgcatgggacgccgcatgggccgccgcatgggacgccgcatgggccgccgcacgggccgccgcacgggccgccgcatgggacgccgcatgggacgctcagcgcgaacgcttcaacaaaatggttcgcggcgcctttggccttcccatggaaggtgagctgatcgctgctggtaaggcggagggctga

SEQ ID NO: 531007 - DNA, 309 bp, Stenotrophomonas maltophilia
atgggcctccacaccgccaacgaccttgcccggaacgcccagcgcagctacgacgctcgcctgccggatgactccgagcgctgggacgcgatcaacgacgtagccaacgagtgcatcgaagaggaacgagtcggcgagatggtgcaggccctggtcgatgcgctgccggccctgtcgaagctgtcacgaatccccggcctgagcgcgcccgaagcggtgaacgcgttggctctgttcaagctggccctgagtctcgacagcaaggtcgatgagcagattggcctcttctctgacgtgaggaacagctaa

SEQ ID NO: 531008 - DNA, 243 bp, Stenotrophomonas maltophilia
atggacgcttacgagaacggtaacgcattggcgcatccgaccccgcatgtgtgggctgaacgctgggaaatgatcaataaggtcagggaaagcgagggcggccttaccaagcgcgagctgttcgctgcgatggcaatgcagggctttgcctcagaccccaatgcaacagggctgggaagccttgcggagtccgcagtggagtgggcagacgccctgttggctgcgctggagaagtcgaaatga

SEQ ID NO: 531009 - DNA, 201 bp, Stenotrophomonas maltophilia
atgaagccggattggaaggatattgataagagatttaactttttggccggagactatcttggctacacgctttggtctcatgagccgaaaaagattgcaacaagcgggggtgatcggtgggcgtgcgatgacttccggagtttcgaaaatattcccgacttcaaggcaaatcgcttgccattcttggagcgccgcccatga

SEQ ID NO: 531010 - DNA, 255 bp, Stenotrophomonas maltophilia
atgaatctgaaagcgttctatgtcgatgacatgccaaccatctacgccgccgagtcggcggaagaggctgcacgcctctatgaggaagacgttggcgatccctgcgacgaaggctatccgcgagaagtgtctaaaacagagttggaccgttctatccctgatttcggagaagacgaacttccgactggcgagatgacgaccatgcgggcgtggctggaagaggcaagcccaggctttctgtgcggagccgagtga

SEQ ID NO: 531011 - DNA, 234 bp, Stenotrophomonas maltophilia
atgcgcacccactacctggtactggcttcttgcatcggcctgatcgtcttcctctgctggggtgcgtggttcgtgtaccgctacgaggcttactacgtcgcggtctgtgcggcacttatcgccctgatcgatgcgttcttcatctacgacgagctgcacatcatccgcaagaagcgcaacgaccgattcaagcagccgccgttcaccaccgaacatgaaggagttacgaaatga

SEQ ID NO: 531012 - DNA, 183 bp, Stenotrophomonas maltophilia
atgagcaagagttccagcagtaacggtggcatcgggttcaccggcctccttaccgtcgcctttgtggtcctcaagctgaccaaggtaatcgactggtcatggtggtgggttctctcgcctatctggattgcggcagccctctcgttcgtacttatcaccgccgtccttttgctcaagcgctga

SEQ ID NO: 531013 - DNA, 261 bp, Stenotrophomonas maltophilia
atgagcgccgagaccgattggagcgctgtggccgattctgtccatcgcgagtgggtagagagcgagcgcgaggagaaggctcaacagcacttggaggagctgaaggacgagatcgaacgactgaacgaggttgtcgctgccgtctccgactacgccgatcagcttgcctacaacggcaagtgggccaatgccagcgacgagcagatcgagcagaaccggatcgcgcttgaactgcgcagcatcttgggagagatcgaatga

SEQ ID NO: 531014 - DNA, 675 bp, Stenotrophomonas maltophilia
atgaccaccgacgacaagaccctggcggacgtgcagcccggtgggagggtgaggctgggggatcaggccctcagcaccagcgaaggtgcgcgccggtacgtcgccgactacttcgccacgcagctgagccgccacgacttcggcaactacatcttgaccgagctggccgccgactttgcatgtgcgctggctcagcacctctccgcccagccctccccgggtggtcaggatgcgctggcagcgctgcaacaggactacgacaagctgctggactcgtttgatcggcaggtcgaggtcgccgagaagatcgcgggccgcgtcctgcagcaggacgacaggatcgaggagctggaagaagccctcgccgcccgccagccggtggtggagccggtgggccgcatctaccaaggtagctcccgcattccgcaggcctggctttccaaggagctgccggtcggaacgctgctctacgccgccccgccagcgcaggccgtggacctggggcagttccgggagccgattgcagcatggtccaagcactgtgcccacggcatcaagggctacgaaagctatcaggatagcgacctgcctgattggatggccgagcgtcgccagcaggttcggaagtgtggcgaactgctggccctgatcgacagccaggcggtgggcaaatga

SEQ ID NO: 531015 - DNA, 303 bp, Stenotrophomonas maltophilia
atggacgttgaacagagggcgcgggaatttattgcaagccgcacttcaaatccagagttccgtcaggacgtactggacggagactacgacgatacagattggtttggacacgtcgtagcagctctgacgccccctgagggttacgtactggtgccgattgagccgactgaggatatgacctgggccccatccgatgtggaagtcggctatccaagttgggcaggaagtcgagattgctgcacgaccgatgaagcgaaagcagtttgggccgccatggttgcggcgaggccggaggtgaagtga

SEQ ID NO: 531016 - DNA, 324 bp, Stenotrophomonas maltophilia
atgagggacttcgataagagggccgagtggtcaatcgaccgtctcacggagcacggtctcggggaagaaatcatttcccacgatgatctggacagaatcatcgagacaatcgacttccttcgcctgcatgcgggtgcactggagcatcaactgagcatggtcaacctagatggtcaggtagccatgctggacgcactgaaccttgcccgtgagtttgccactggcttccacggcatgagtcggaataacgccgagaacatggcggaagagcttctagaggtgctgaacgcggccatcgccaaagggagtaagcgccatgagtga

SEQ ID NO: 531017 - DNA, 261 bp, Stenotrophomonas maltophilia
atgagtgatttgggccgtgcgcgtgcattcgtggcggaagccatggtggaaaatggcgatcccgaattcgccaaagcagtgcttgccggtggctatgacaacggtacatcggtgaaggccgtattgaaggcaatgaccaattctagaaacccagacggatacgttttggtgccaaccgagccgtcagagaagatgatcagagcgtgggtgcaatggggctgggctgcgttcctctctgccaggccggaggtgagtccatga

SEQ ID NO: 531018 - DNA, 360 bp, Stenotrophomonas maltophilia
atgagcgagattaaactgaagtacgcatacatcgtgggcgaactgcgtcatatcgtcgttactggcgagggtgacatgttatggatcaaccggcaccatgccgcagccctgctgtccgccattgaatcgccgacgccgcagtggcagccgattgagtcggcgccgaaggacaccgtgacagagattctggcatgggatggatacgacatgcgagttactcgctggtattacccgtacaaggggcatccgggcgcttggtatgagagtcaggatcgttatgagacgctctcctgggagccgacacactggcagccgctgcccgctccgccagagcgcaccttggaggtgtcgaatgtctaa

SEQ ID NO: 531019 - DNA, 357 bp, Stenotrophomonas maltophilia
atgactgaagaacttctggccgctgcaagggatttctacaacgccacggtggcagacccggccgtgaccatccgctgccagtcatcggcttctcgggattccgtcaccgccgccggtgagcgcctgcggctcgcactgctcgatcaggggtgcacctcggtcatagccgattacccgcagttcgttgcgcctgccgcagctgggacacgtgaagtgcagcccgaagctgtcaatggcggcctcgacctggccgaacccggcgaacgtctcgtggcagcggatgcactggagcattcgcgattcgtactcctgcaagatgacaaccatgctacagaggtgccggatgggcgcggctga

SEQ ID NO: 531020 - DNA, 228 bp, Stenotrophomonas maltophilia
atgggcgcggctgagaggctgaacgaacgtggcatcccggtgcatcgctctgagcgcggacagctggcgggcttcattggctatatgccgcaagctccggcaatcggcgagatcatctatctgggccgtaagccatacaaggtcaagggcgtcagctgggtgtttgacccgtacccctccgaatgggaagcaaggcttgaactcaaatactgcgggggttggcgatga

SEQ ID NO: 531021 - DNA, 447 bp, Stenotrophomonas maltophilia
gtgcgcatcacgttcgatggcgccggcaacggcttgggacaggaggttggtgctgcaggtggcgaggtcgtcgcgcagctggagacgcccagcgcgcaggtcagccacaacagcagcagggacggtcgcggccgcagtgcggtcttcttcatgctttgctccaatggcggccagtgtctcagcctgagcgtgctcggtggcgcgggtctggttgacccgctgcacctgggcggaactgctggcctgctgccgggcttcggcgccttcagcgcgatcgccgcgccagacccaaccggcaccgaacagggcaccggaccaaatggcaaaagaggcgactgcgatggctatgcggttcactccgatcctcctgccctgatcgtgtcgctgtcagggtcgaacggcggcggctccaagctggccgcgcgcatgagcccctcaagcctgtag

SEQ ID NO: 531022 - DNA, 171 bp, Stenotrophomonas maltophilia
atggcacgtaacgaccctcaaattgcgcttcgccttcccgccgacctcaaggaatgggtgtcagccgaggcgcagcgaaacgctagtagccaaaacagcgaaatcatccgcgcgctccgagagcgccaggaacggctggctgcggcccaacgacaggaacccaccccgtga

SEQ ID NO: 531023 - DNA, 291 bp, Stenotrophomonas maltophilia
atgctgcaaagcttgtcggaaggtttttcgctgggcatctggacactaatcggtgccgcagtcgggcccctagtggtcgcagccgggttcggcttccgtaaggtcgtggcctacttcaacggagtacccacaccggagcgccctttcaaggcgtggtgtgcgttggctgcgatcctgttcgccatcgcaggttcgatgtggcaggccaaggctgggccgtttgccgagtgccgtgaggcaggcggcaccaatgcgcagtgcttcattctgccgcagagcagcagggcctag

SEQ ID NO: 531024 - DNA, 1764 bp, Stenotrophomonas maltophilia
gtggactttgccggtaacgagacaacattcagtcacaacgcgcgcctgctcgaagtccagcgtgtcgaagctgccaacgatgcaacgggtctgcggcgaaccgtgcagaccgactggcattccagtttaagggtgccggtcgagcgccgcattcttgatgcggcgaacgtattggtatccaagtccacctggacctataacgcacgcgggcaagcgctggctgccacgcaggtcgatccggcgacgggcgagacgcgaaccacgacaagcacctactgcgaagcggacgatgtggctgcagcgcggtgcccattgcttggtctgcttactcaggtcgacggaccccgattggatgtcactgacacgacctcctatgtctactatcccagcagcgatgcgggctgcgctgcgggctccggctcatgcctctacaggaaaggcgacctgtggaaagtcgttaacgcagcgggtcacacctccgaggtgcttgcctatgacggggctggaagaccgacgtctgtcaaagaccccaatggcatcgttaccgagattgcgtaccatccacgtggctggccagccattgtcagatttgattccgcatccggcgccggtgcgcgcgcgatcagtctcgactactggcccacaggcctagtcaggcaggtgacacagccagatggatcatctatttcctactcctacgacgtagctcaccgattgacggcgatttccgatagccaaggaaactcaatcaccttcatcctggacaatgcggggaatcgcgtcgcggaagagacgcgggatgtaaatggcgaactgaagcgagcgctcagccggatctacaaccagttcgggcaattggcgacagaggcggatgccggcgccaatcccactgatttctcctacgatgccaacggtaacatcgcttccacgaccgatgctctgggccgcaagaaccgacagcaatacgatccattgaatcgccttgtgctgtcccttcaggatgtcggcggtttgaatgtggaagtccgtacgcactacaacgccatggatcaggtgacccgggtaactgatcccaaggggctgtctacaacctattcctacaacggctacggcgacctgactgggcaagtcagtccagacagcggtgccagtctgtacacggttgactccggtggtaaccgtcggacgttcaccgatgcccgtggtgttactgcttcgtatcggtacgatgctctggatcgggtgattggaattgcctacccggataccagtcttgacgtgagctacagctatgacctggcgccagagtcgtgccctgccgacgagcggtttgcaaaggggaggctcggcgaggtgcagcatgctggcggcagcacgctgtattgctacggtcggcttggccagatcacccggaaggtgcagacgatcaatggtctgacacggacagtgcgatactcctacagtccatccggaaaccttgcgacattggtgtacccggacgggagcattgtcgactacgtccgggatggctttgatcgtgtgaatcaaattggcctgacccggcttggtcaggcccggcaggtcgtggtgaaggacgtagcctacgccgccttcggtccggcgatcggctggacgtatggcaatggtcggcggctggatcgttctctggatctcgactatcgcgcacaggctgtgaatgatccgactcccgggggctctcccagagctacagctacgatcccgttggctccatcgtggcgctga

SEQ ID NO: 531025 - DNA, 237 bp, Stenotrophomonas maltophilia
atgaatttcccaagtcgttcaacgggcgtgccgcccgagcgtaacaagaagtacgtggttatcgacaggcggcgctatctcccggatggcagtattagcccctcgtcgccaagtaatccttgggccgtgtatgaggacacaatgccactcatagagcccccgctggcggagtttgaatcgatggccgaggcgcttgctcatgccacgatgctaggagctacatcagagccgaactaa

SEQ ID NO: 531026 - DNA, 279 bp, Stenotrophomonas maltophilia
atggaactttctctagagcagttggccgcgcgccttgaggcatgcgagatcgacttagaagcccaccgcggctacatcaaggcactggaataccggttgcgggcggtcatcgccagccatccgcccccccaggtgttttcactagcatgggaaatggcactagccggagcgtcggacgcccacgcaggagaagacggatatgtattcaccaatgccatgcagcaggcgctctgcgccttgactgctgaggtgagcgtggatgtggtcgcgccgagataa

SEQ ID NO: 531027 - DNA, 1245 bp, Stenotrophomonas maltophilia
atgagcggtctctttcgaaaggaggcagtcgacgcacaacggcgggggtggctcggtgagatttcgcttgcacaacccgtcagattttgggtcatggctttagtcgcttcggtcgcagccttatccatcatcgctttcttgttcctagccgaatactcgcgcaggtctagggttgttggcgagcttgtgccagacctaggcctctctaccgttgtctcgccttcggcgggcgtcgtagcgagacttgaagtcgaggagggggatcgggtacagcgcgaagatggtttgctgaccgtcaacgtcccacgagtgacatcctctggccaggacgcagcattggcactaatcgaagcgcagcatgcgcgcatcgctagcgttggtgcaatgagtgagcatcaggaccgccagcttgcggcgcagcaggaaggcgccaaggcacagcgtttggcgatgatgcgtgagctcttgcagattgaggccgaaatacagacccgcggcgagcaggtgagaatcggtcgtgagacggtagagcgctaccgtagcgtggaggacgagcgttacgtaagtctggtgcagatcaaccagcaagagcaatcaatgctcgagatgatcaacgcgcaacaggcattgcagcgtcaggcaacatctctgcggcgcaacctcgcggaactggagcagcgcctgctggaaattccggagcaaagacgctcagcaaaagcagccaccgatcgtgaccttgccgctttgaagcaggagacggtccgcatggaagctgacggcgagctgcttcttcgagctcccgtctctggattggtagctagtcgtctggttgaagtggggcaggcggtgcaagccggccaacccatcctcagtcttcttcctggcggctccgagctgagggcgcagcttttggtgccaagctccgcaattggtttcgtaaaaaatggggaccgcgttctcctgcggtatcaggcctatccttaccaaaaatttggcacccatcggggcacagtcattcgcatttcgcgtagcgcggtgaccgcgactcaagagcaaggcgactcgaagcaatctgtctatagggtcttggtttcgttggatcagcaaagtgtgttggcatacggtaagtcggagccgctccggcccggcatgcagcttgaggccgatataatgggggagcgccgaaagctctacgaatggctgcttgagcctctttactcggtgactggcagacttggagattga

SEQ ID NO: 531028 - DNA, 2127 bp, Stenotrophomonas maltophilia
atggatgccgtggttcaatcggaggctgccgagtgcggcctggcctgcctcgcgatggtggcctcttaccatggaaacaacatagggctcagggaactcaggcggcggcatcatctctccctcaagggcgcaacgcttgcgcaaattatagatgtcggaaccaagatgggcttccgctgccggccgctaaggctggaactcgagcacctaagccagctccaattgccctgcattgcgcattggaacctgaatcactttgtcgtgatcagcaaggttcatcggaagggcgtcactattcttgatcccgcctttggcacccgaaagctctccatcgaagaggtttcgcgccacttcaccggcatcgcacttgaacttcagccgacaactgaattccaggttgttcctaagccaccagcgatctcgcttgcgcagctgacaggaaaggtcgatgggctctggcgagctctgggcttggttctgttgctatctgtcgctcttcaagtctttgtcctgacggcaccgttctttatgcaatggacggtagatcaagtgctcattgcttccgacagggatctgctaacagtgttgggcatcggttttggtctgacacttcttcttcaggtctcgattgcgcagatccgcgggagggttgtgatctatctgtcaaatagactaaaccttcagtggactgggaacgtcttccggcatctgctgcgcttgccattggacttctttgagaaacgccacctcggggatgtcacctcacgaatgggaagcgttcaagcgatccagcggacgcttacaacgagcttcgtcgaggcgcttgttgatggactcatgacctttgtgaccttgggaatgatgctgctgtacagctggaaactggcgctagtcacgttggtggcggttgcgctatatgctattgcgcgcgcccttgctttcgcccctcttcgacgtggcactgaagaacagcttatcgcaggagcccggcagcagagccacctcctggagtctatccgagggattcagtctatcaaggttgcaggccgcgagtccgttcgccagagcggctacttcaacctaatgaacgagacggtcaatagagatgtctggctgtcgaagtttggactaagctttagtggcgccagtcaactcgtgtttggcttggagcgtatcgccgtgatctggcttggtgcgctgctagcaatggagaatgtgttctcggttggtatgctcatcgcgtatctggcctacaaggaccaattctcgcagcgcgttggagcattgattgatcgatcggtagagtttcgcatgctgcgcctacacggggagcgcctatccgatattgttttgtgcgaaccggaagatcaagcgaatggcgaaggtgacgcaacgccagagagtctacgcatcgaggtagaaggcttaggatttcgctacgctcctggggagccctgggtgctgaaagattgcaatttcgttgtggaatctggcgagtcggtggctatcattggcccgtctggctgcggcaagaccacgcttgtgaagatacttcttggccttctgcttccgacggaaggacacgtccggatcggcggtgtgcctttgtcgaagatcggcagagatgcctaccgtcgaatgatcggagcggtgatgcaggatgaccagctatttgctggcagcatcagcgacaacattgccttcgaggacgctcaccacgacgatgatcgagtgcgtgaggctgcaaagcttgctgcagtacatgacgatgtatccgctatgcctatgggctacaacagcctcattggagacatggggacgtctctgtcgggagggcagaagcagcggttaatccttgcccgtgcactttatcgtcagccccaattgcttttcttggacgaggcgaccagccatctggatgttgagcgggaaagactcgtgaacgaggcggttaagaagctagacctcactcgggtgatcatcgctcaccggccggagactattgccagcgctgatcgcgtgctaatgatgagttccggcacgatttcggctgtggtggagcggcgcccaggcggatcggactcaaagaatccacaaaggcgcgaagcctcggagatgccggcatga

SEQ ID NO: 531029 - DNA, 165 bp, Stenotrophomonas maltophilia
atgaaagaactgagttttgatcaggtcaatgaagtttctggcggcagcgtcccgattctgcttgcgatcgcaggcgccgtttatcacgagcgcaacgagattgcggacttcgttgggggcgtgctggacggcttcaacggaaccagccacatggaaccgaagtaa

SEQ ID NO: 531030 - DNA, 159 bp, Stenotrophomonas maltophilia
atgaaagaactcagcgcttttgaagttgaatcggtctccggtggtgatggcatgacctacacttggggcaagatggtcggcgaagctgcccgttcggcatgggatgcaatgaaagaatatgcagcttccatggactcttcgacggatgtaatcgcgtaa

SEQ ID NO: 531031 - DNA, 186 bp, Stenotrophomonas maltophilia
atgagacatggcgaagcagctgagtccgatgagtccaagaatgcagtgtccgatgcttattacgtcttccgagtaaagaagcgcgatgtgcatggagtttcgatagtcgctgcgatctggtttgtttggagtcagggcggtgaagttgtaaatatgttcaagaatttgttcgatgctctcgcttaa

SEQ ID NO: 531032 - DNA, 786 bp, Stenotrophomonas maltophilia
atggtcattccgagagagcggatggacgacatcgaagatgagaacggcggggattacccccgctatcatgaagagatcgaagccagtgaattggtggccggcctgatgagtctggctttgctcagcgacgatttggcaatggttagccaagcctacaacgtggctgctgtggacaaattcatcatggggttggagatgcaatttctgcgcagcagctatgatgaagagaccccgcgcgaaaatcggggtggcatgttcttatctgcccaaaccgagatgtggatcttcgccgcctacgagcttgtccggtcctggcgggagcgggcgaagctggcgattaagcttgccgagaatggtgggttggacgtcaagatctctcacctcgttgggaagccagattgggattacggaagccagatggcggcccgccaactcagtcaggtccgtgatgagcccgcgctcgttgcaagacttaaggacgatctgcgccggagccatatcccattccacttgatcgagtgggtgagggttcagctggcaaagcatcaagagcccggtaacgcgaagtcttttgttcgctcgcatccgatgatggatcgaaacacggggtcgcttaattatcagctgactcaggggcctttgatcttggccaccatgagcagacgcgaattggcagacgcgcttcgggacctcaacgatccgtcggtcccttcagaagaggacatcgcgtctttcaataatttccgaaaggcaagagcggtgagcattgatacaccaggagagtga

SEQ ID NO: 531033 - DNA, 207 bp, Stenotrophomonas maltophilia
atgtatgcccttgattccactagactaattgacaaggatgcgcttgtttaccagccgcatcgtttgcagctttcgggctgtatggagggtctccaggagtcatttgacgcccagtcgctcggaagcgacgcagaggcgctgctccatgatgtcccgttcttcggaccgggccaagacatcgagtcagaggtcgttggcatcctctga

SEQ ID NO: 531034 - DNA, 1185 bp, Stenotrophomonas maltophilia
atgggaattaaggaacgagctccgctttacagcgcgcttgagaaagagcgtgggcggccgcttttagtctacgtgacgagtagccgagtcaacgcacatgcggccatagccgccgatgtcgtacccgagtttctggatcagctgaaggcgctgccagacgattgcgatgcgttggatctactactcgtgagcaacggcggcgacccaacggttgcttggcgggtagtttctctaattcgagagagggtctcgcacttcagcgtgctcattccgcaggcagcctacagcgccgcgacacttatcgcgctgggtgccgacgagatcgtgatgcacccgcatggcaaccttggacccaccgatcctcagatcacggtcagccgtcgcaatcaagggaacggtcaaactgatcgcattccgttcggctcggaggatcttggcgcgttcatgaagtacgcgaaagagacagtgggacttacggatcaagcccaacttaaggaggtgttccttaagttctgtgacgaagttggcacggtcggtattggcgttgcggcacgaagcgctcagcttggcgtcacgatgggggaaaagctgctgcaattgcatatgggcaacgacggagcccagcagaaggcacgcgccatctctgagaagctgactagggactacttccatcacggctacccacttagtcggagcgaagcagtagacatcggcctcaaggtcgctaacaacgacgagcaagttcttgatctcatgtgggccatttgggccgacatcagcgcagaaatggaactgcgcagcgcgttcaatccaatgcggctcataacactcgacccgaattgcgcctggattttgaccccgcctcccgcaaacaacccgaacaacatcccagtcgcgatgccgctggtagcgactacccgcttcaagctagtgcaggtcgtgcttgagagcgcgcggctcgcctctcgttacgtgatggctggcacggttgttgcagtgaggaaccagcccttcaacttccagaccaacgttgtgccagatgaacaagagtggcggacggtatggccagggactgcagattcaagtaacgctggccctcccgcgcgcctaccgccaaaaccgacacggggaaagcctgccaaaacggcagctaaacgcaaacccgccaaagaaccatcagcctga

SEQ ID NO: 531035 - DNA, 582 bp, Stenotrophomonas maltophilia
atgaatcgaatcgcaagcttcgcattgtctgctctgctacttgccaccccaatcctcgcagaggcgaacaattccctgaaaccgcttgactactacttcgtgaagttcaaaggcgaacacgatgtgatgcgagatgcagtgaagaacgacactacgattccatcaagtcaaaagccaagggtttacagggagcgtttcgaagaactgcagggtcgattcaaatccgagagaagcgcagagtacgccgcccagcggaccatagtggaacgaggccacagctgcacaaagggctcatccggcggaaccaagaaatgcggagaaaaatgcgccgaggcgccatccccggaatggatcaccgacccaagcatggttcagtcactgaacgaaaacggcacgcccgcttcgcgtcgcgcgtcgaccaaggccgacggatctgcggcttgcatttacttgcagaaaagcagaaagggccggatctttgtaagggtaaaggcgactttcaagtaccgacctgatttcattctccgcgccgtcgatgcggacaacaccgccgtcttcagccgaatcgttaccgacatctag

SEQ ID NO: 531036 - DNA, 717 bp, Stenotrophomonas maltophilia
atgcgctctgtcttgtggtggtggttgcggcacaggcgctgtggccggcgccgccggtgccctcgcctgtcgcgttccaaagcatcaacgatgatcgattctcacaactgcgccgccaggcgatgcagttcgtggaggctcggccaccgcagggcttccagttcgttgagcggcatcgggatgccgagttccaggttcattgccgaggcatacccgtgctgtggctggagaggcgctcgcaacatctgctgttgcaggtctcactggacgcgaagcagcgggcacccgccgttgtgcagcttggtgcgttgcttcaatggcagttggagccgttggactacctggagcaggtactggctggcgtgccggagcctgttctgttggatcgggtgctgcagattcttgctggtgatgtgcctgttggggcgcgatgtggcctgccgtagtcgagcatggctcgactctacagggctgagggcagcgagggtccgggctctagccctgccgctcgtcacctgcgcgacaggcattggccctgtgatcatgcgggtcacctcccggcatcgatccagcccgcatcgcgcgcatgcgcaagatcttctggcgtatcgatatccaggcccagctccggtgcctgtaggacatgcaccgtatcgacaggaagttgccgcaggcgcgctccgaagccgcggtcaccggttgcacctgcagcgttga

SEQ ID NO: 531037 - DNA, 702 bp, Stenotrophomonas maltophilia
atggagtttgagaagatccgggcagtagtcaggcttgcggaatacacggtcgtcgaccggccgccactccgggtgaaggagggtccgctgcttgcattttcagaagagtttttagtcggaccatggttaatcatgagtggcttcagcatcatctggaaacgcctactctggatcttcctcctcacgctcatcttcatgagtggattcttccttatggaatccgctttcgatcctgtcatgattatcgccgcattggtgctgagtgttgtcagcgtctacttcggtcttcctactcgaacggtccttgcgggcgtcaccgcaacgtctactggaaagcttgcagttgctatcgaggaatttgtgaaggatcaagcagagctggagcgattgtcctccggcgtgcagctagtgaaagctcaaacgaccgagcgaatggcgcgtttcaatgtgttcgctggcatcctttggggcgccctgttctggctcgtcacgacacgcgtgctatccccggccatttcactggacactgtaaaggcgagcatctttccagccatcgctgtagcaaccctgttcatcgggctgtctgtggttgcggctggctacgcagcagctgtacgaatcgcctatcagacattggactttgcgctcctggaggttaaggggaagctagcttgcggcatcctcgcatcatcagactcatag

SEQ ID NO: 531038 - DNA, 648 bp, Stenotrophomonas maltophilia
atggcagcgacgatccaggagttcgtacacgaacgaggtatcaagtatctggttcatttcacgagggagagcaatctgacttccatcattcagcgaggacttgtacctagggatctgttagctggagaaggcggggttaagtttaacgatactgtacggctagacgggacatcggcagtctgtctttcaattgacttccccaactacaagatgttcttcaaggttaagcaggcagatgtcgacgaaagctgggtaattgtggcggttagccccgctgtactgtcgtcacccactgtcgcattctgcgctggcaatgcagcgtcggccgcgatgacaagcattccgatcgctcaacgcatggggctacaagcccttcagggcatgtacgctgactggaatggtgtgagccgcgcaactctaggcatccccgatagatacccaactaatccacaagctgaagtcctaatgctagagggagtttcgagagagcacatacttggagtatttgctttgaatcaagcggtaaaggctaggcttgttgctacgcacgcaaagctgaacgaaagaaatgttgcagtcaatgcgagtattttccgctaccgccaggactacgcccattggaaacaggtggctgacagtggcatctag

SEQ ID NO: 531039 - DNA, 705 bp, Stenotrophomonas maltophilia
gtggcatctaggccagtatttgcgccttcactcagtggcgacctgctcgtgctcacgaggcacgtcgactttcagtggttccctgggatgtcgaaaactcagtctcaaaagtcgattcgatccctgcatgcggaagcgaataggcaatttgggctggacgatatacttgagatatcaagcaagtcagccgacgctcttggagtaagcttgagcgcctttaatctgatgatcaagacagtcaagcgtggccgcgagttcagcttggaatgcgcatatcaagcaagcaaggtgtttgagtctggaggtccctacgttgacttgatggatgcatcatcgattgatgccaagcgagatccgcgcctgactcgaagtggtcgactggttggcttccggttctttgggatcgactgggaactggagccaaagaccgcgttttatgattggttgtacatcaacgcacttcacaagcagcctgcaattgccgatgaggtgatgaggtatcaagcctttactgatatagcttttaatccggaaaaatccgtaaactgccaagcttattccgcagcgctctatgcatccttgcgggggcgcggtcttttgacggtggatgttcttaaagacaaattcgcgttcttatccattgtcgataccaatcatgtaagcaatgcacgcgaggatacctctgttcaaagtcgactcatttag

SEQ ID NO: 531040 - DNA, 480 bp, Stenotrophomonas maltophilia
atggctatcagcaaggaagattctgaccagcttcgtgacgtgcgtggagctgagttctttgagcgctataacaagccgcacccatacgctcacaaccttcttcagggccacctcttcatagaagagcaacttgaagtgatcattatgtccgtattctccgagcctgaggctgtaattgaggctaagttgagcttttggacaaaattgacgcttgcgcagggagtggttggcaagagtgtcgacatctggcccgcacttgaaaaactcaattccgcgcgcaacgagctagcccatggacgggacctgtccatccttgaaaggaagatcgatgatttcctaagcgcgatgcccggcttgagcgagcatcaccggaaggatgattcgcgtgcgcacaagttgaacatggcaataatcggggccgctggctatatcactcggactgcagagagctaccgccccagagcatccgtcactgaatga

SEQ ID NO: 531041 - DNA, 246 bp, Stenotrophomonas maltophilia
atgacctggtggcccttgacctgcaacatcgcgcgggaatggcggctgatgatggctgaggcggctccccggaccgcagctgcacggaaagcttcgaccacggcgaaatccagcgtcatctacctagccgaagcgctcagaattcgccgagaacgacggttctgcgtgcgtgatcccggccccggcgccgagacgtccaatgtggtctacatgagtcgtgggccgaaaccgcgtcagcgcgtgtaa

SEQ ID NO: 531042 - DNA, 1020 bp, Stenotrophomonas maltophilia
atgcgagtgctagtaaccggaggaaccgggtacattggaagccacgtctgtgtgcggctgctcgaatccgggaatgaagtgatcattctggatgatttcagcaattccgaccggaattgtggagagcggattgggcgcatcaccggtcgcgagccgaagatcattgaaggtgatgtgcgctccgcagccaccttggacgcggtgttcgaatcatcgtcgcccgatgcagtgattcactttgcggcgctcaaatccgtgggtgaaagcgcgcgcattcccctcgaatatcacgacgtcaatgtaggtggaacgatcagcctgctgaaggccatgaagcgccatggctgcaggaagctggtttttagctcctccgccactgtctatgggcatgccgcgcattgcccggtagcagaatcctcgccggtttcggccagcaacacatacggcaggacgaaactgatctgcgagcagatcatcaatgatgcccgtgctgcagacagtgaactgcaggcaatcaatcttcgttacttcaatccggttggtgctcatcaatcggggttgattggcgaagctccacatggcattccgaacaacctcatgccgtacatctcccaggtcgcctcggggatccggtcccagatgtacgtgtacggcggcgactacgacaccccggacggtacgggggtccgggactacattcatgtctgcgatctggcagacgcacatcttcgggcattgcagatgctgcccgatcttggcgatctggaagcactaaacctgggcacagggcgcgggcactccgtcctcgaggtcatccaggcgttctcagaggcatcagggcgaacgatcccctaccagatcgtagcgcgacgcgagggtgatgcagcgcaaagctgggctgacacatcattggcccacaaacggctcgactggatcgcgcagcacggtcttcggcagatgtgcgaagatgcttggcgctggcagctggtgttggatcagtcactggacaccacctcctga

SEQ ID NO: 531043 - DNA, 2172 bp, Stenotrophomonas maltophilia
atgcccgtccacgcgctgcataaccgcaagccccagatagcgcttctttcgctcgacgtcgcgattgtgcttgccagcctctacttttggctgattcaagctggcgcactgctgcaggaagctggaagaacatcgcaggcactggtcggcgcgattttcgtggtcggtggaaccattattgcggcgcgcctagctgctccccgtgtggatcggctgctgggctggacggtccagcgactgctgggtgtctccctgatcacactctgcatcggcatagccctgacttatgccctgccactcagcccgctcccgctgtccaccagcagcatcgaggtggacgcgcttggacgcacctcctcgccgaccggcggcaccgaagtgtgggtgcagctgatcaaggatggcaagccggttccctcctccgagatgaaggcaagcggcacttggaagcaggtcgacggcttcctcgtatcctcttctggcagcactcccaactcgctgtcctggtcgggtgcgtccacctcggacctgcaactgcgcttcgtcagccatccgtggtccggtttggcaagagtaagctgggacgggaagagccaggaactgaatctctactccgcgcagggccgcgacgtggtgatcaacggaagcgacaaccgtccggcacgccacttcctcgacccgtcgcggcgctcgatggtccagcgcgttacccaggtggcccaggccattgtgctgggcgcgatgattaccggactgttcctgcttcttgcgctccgcccgccaaagatcgcgacggttcccgccgaggccagcctgctcgggctcactgtgctctcatccctgcccctgctgatcaccggctcggtgctgttgacgatgttctcgcctgcggtgatgagcacggactcggttgaccaatggctgcaggcgaccaactggaagttcaacgatgttcacgccatcatctacacgctttacctggcagctttccagaagacgactggcagccctgtcggagctgctttggtgcagttgctcggactcgccctcgcctccggctggttgatcgcagcgatcacccgccttgcgcgggccccacgttggaccgccctgctggccggcattctgatggcggcactaccgatcctgcccctcacagctgtcaccttatggaaggatgtcccgtacaccgcatgtgcgatcgcgctggcggcctggctggtcagtctcgccgggcaacctggacagagtcgtttcggctggcccgcggccgccttgttctccttgctggcggcagcatgtgcactgttgcgccacaacggccctgccgtcgcgttggcagccatcattggcctgactctgttcccgcacctgcgtcgcaaagccgctgcggtcctgctgatggttctggcccttgtcttcgctgtgaagggcccgctcagcaacgcgctggacgttaagcgtgtgggtgcctcgcatatcgcctactcacaccatatcgccgcgcacatggcttcgggcggccatctccgcaatcctgacgacgccaaacttctcagcagcatcaaccatgaagaggccgactggcggtacaactgcgcgcaggtcaacccgaccgtattcagcccacatttcgacatggccgaagccattcgcaatcaggacaggctgctgcgcatatgggccgatctcgcccttgatcagcccatggtggagctgggtcatattgcctgcaccagtgcgttgatctggcgactctctgcggccccgggtgagcccctctacctctacacgtttggcgtgcgtggcaacggatccggcggcgtactctgggtagagccgatggcgggctcaccgaggccggagtcatggctacccaatgccgcccaggattttggtggcgcgatacagggcgtcgaactgcagagcctgtggcgccctgccggctacatgtacctgactctgttcatcgttggcgttgctgcactaaagacaaggaaccgctggctgctgctcgtccttctggtgcccgcggcccataccgccttcctcgccattgccaacgtcgcccaggacgccagatatcagctgccggtgtaccatctgttcttcgcggtgctaccgatgcttgccgctcggatcgcgccggcgccctctcgccctgcaaggtga

SEQ ID NO: 531044 - DNA, 738 bp, Stenotrophomonas maltophilia
atgcgcaagcacgctgtagtgattcctgtcatcaatgaaggccagcgaatccgctcactgctgcagcgtatgacggacatgaatctatcggccatcgccgacatcgttatcgtcgatggcggcagtaccgatggttctcttgatgaatccttcctgcgcgccaattcggttgccgcattgctgaccaaggtcggtccaggccggctgagcgcacagttgcgttgcgcctattcattctgccttgaagaagaccagtacacgggcatcatcaccatcgacggtaacgacaaggatgatccggccccgattccagagttcatttcagcactcgaatcgggagtggatttcgtccaggcatcgcgcttcattcccggcggtatcgctgagaacactccgttgtcgcgttacgtcgctatccgtggcatacatgcaccattgctgagcttcgcctccggattccgctggactgacacgacccagggattccgtgcatatagcaggcgactgctggaacatccgggcatccagcccttccgtgcagtcttctcgggctatgagcttctggcttatctttcatatcgcgctccccgtctcgggttgaagtgcattgagttgccaacgtcccggctgtacccgccagatgaagtgccgaccaagatcagcagcttccgcggcaacctgggagtgcttgcagttctgttcaagtcggtcttgggccggtacaaccccgcccgctaa

SEQ ID NO: 531045 - DNA, 357 bp, Stenotrophomonas maltophilia
atgaaatggatcattcttgcactcggcatcctcgccaacgcttcggccagcggcctgatcaagctcgcggtatctgcgccgcggtcatttccttcactgaatgcaccaatggatgcgctgcgcaattggcccttctggcttgggctggtgctgtacggaatggccttcgtgctctactcggcgtcactcacccggctgccactgaacgtggcgcatccgatttccaccgcaggcgccatcggcctggtggcctgcatttccatagtactctttaaggaacccatgggcatcaacgttgcagcagggatattgctgatcgtggccggtgttgtcctcatttccctgaaaccgatctga

SEQ ID NO: 531046 - DNA, 825 bp, Stenotrophomonas maltophilia
atgagctcgctgtcgatatccaacatcgcgtgggacgtctccgaagacgaggagatcgctgccatcctcctgcaaaggggggtgtcccgcatcgacctagcgcccagcaagtacttcccgaacctggcgacagtgtctgcaactgaagttgagcatgtccgccgcagatggaacgatcggggtatctcgctcatcggcatgcagtcactgctgttcggcacgaccggcctgaacgttttcggcgattctgtgtgccaagaccgccttctttcccaccttgaatcggtattcaaggtgggcgccgagcttggcatcaccaaagccgtttttggctcacccaggaaccgcctcaggggagcacgcggtgacagtgaggctctgcacgaggcggtcgattttttcaggcgtgcgggcgacctcgccatgcatcacggcatgatcctttgcctcgaacccaaccccacaatctacggcgccgacttcatgaccaatgttgatctcacggcaagcgttgccaaggcggtagcgcatcccggtatcggcatgcaatgggataccggagccatgttcatcaaccaggaagatccggcgacagcaatgaacgggcatgcatcgatcgtcggccacattcatatcagcgaaccgcagcttgccccgattggcagctctggaatcgatcatgcccccatggcccaggccatggatcgcctggctccgcacctcacccgaaccatagagatgctgcgacccgatggggggcccacagcggttgccttggcaattgatgcggcgcagtcggcctacggcaaggcaggccaggcatga

SEQ ID NO: 531047 - DNA, 804 bp, Stenotrophomonas maltophilia
atgacattcctggaatccagtatgcagaacgcgcttatcggccacaccggcttcgtcggcaccacgctcaagcagcagacggcttttgcggcgctgttcaacagctcaaatgtccatgaaatcggtcagtccgcgttcgataccgtcatctgctccgctgcgcctgcacagaagtggatcgccaaccagcagccggaggctgacctggagaatctcgaaaggctgatgtcccaccttgcaacattgcgctgcaagcagctcattctcatcagcacggttgatgtcttccccaatccggtcggcgtggatgaacgaagtgcgatccaggaggatgaccttcagccgtatggacgccaccgccggatactcgagaaattcgtcgaagccaacttccagaatcacctcatcgtccgccttcccggactgatcggccctgggctgcgcaagaacgcggtgtttgacctgcacaatgacaacaacgtcgatgcgatcgacagccgcggcagtttccagttctatcccatggtgaatctgtactccgacctgcagcaggcacagcaggccggcatccgtctgctacatctgaccagcacgccaatcaacgttgccaccattgccgaatccgtcttcgacaggccgttcagcaacgaactgtcgcgcccgccggtgtcttacgattttcgctccgtccatccgctcggcagcacgcgcaatcccggttatcagtacgaccagcgcgacattctgcttgccatgcgctgctatcgacagtcggagccacgcacgcgatcgatccactcatga

SEQ ID NO: 531048 - DNA, 1149 bp, Stenotrophomonas maltophilia
atggcggtagagcacgctgacgcgttgattgtcggcggaggcttctatgggtcattgatcgccgattatcttgtacgcgaacgcgggcttgctcgtgtggtactggtcgagcgcgagaacgacctgatgtgccgcgcctcgtacaacaaccaggcacgcgtacacaatggatatcactatccacgcagcttcaccaccgcatatcgcagccgtgtcaatcttccgcaattcgtcagggagtggcagcatgccgtggattcaagattcaccaagctgtatgccatcgcccggcggcattccaaggttacatccgcgcagttccagcgcttctgcgagagcatcggcgcgtcctgccagcgggcagagccggagcatgtgaatctgttcgacaagcgactgattgaggcggtatacctgaccgaagagtttgctttcgacgccgacaggatccggcaggttgcacgagagcgcctgcacagggctggcgtccaggtcatgctcggccatgacgtcgtggcatttgaatccatcgagggcggcatcgcagccaatgcacttcgcctgtccgatgggaccctgctgcaggttcgtgccacgtgggtgttcaactgcacctatgccgggctaaaccgcgccaccggcccgcagggcccttctatgacgccgctcaagcacgagatcacggagatgccactggtggcggtacccgaggaactgcagcgcatcggcgtaaccgtaatggatggcccgttcttttcgttgatgccatttcctgcccgccagctgcatacgctttcccacgtacgctacacaccgcacctgcattggcgcgatgatgcttcacgcgacccttatcaggaactggcagcgtactcacgcgacagccatttcaactggatgatccgcgacgttgcacggtacatgccttcaatcgccaagtcggtacaacgggattcgctgttcgaggtgaagacggtcctggtgcgaaacgaaggtgatgatggcaggcccattctgtttgaagagcatgcaggactgcccggcttctattcagttcttggcggcaagctggacaacatctacgaggccctagcattcctcgacaacgtgcctttgggcagggcgcccttgagccaatccaacccatga

SEQ ID NO: 531049 - DNA, 1008 bp, Stenotrophomonas maltophilia
atgcccagagttccggcattcgtttcagtcgtctacgttgtccggaaccagagcacttcactggcacgctggcttaccgacgcggtaacccgcctcgatgatctcgcatccgactttgagttgatcgtcatcgacaacggctccgaagacggctccatcgacgtccttcagcgactgaccgccgagggagggttgccgaacatccaggtgtacgcactcacccaacgggtctcgtgggaagttgctgcatgggcgggtgccgaatgcgcgctgggcgactatgttgccatcctcgatccgctcactgaagacctgtcggcgcttcccgaaatgctcgagcgagccaccaccggcaccgacgtcgtcttcgcgcggaaccgacaccgcccaaggttgacgacggcctatcgactggccaaccgggccttcagtgtgttgtcgaggtggaccaacggcgtggaccccggcaccgatgcccctccctatcgtctgctgagcaagaaggtcatcaacttcattctccagcatccgcagccggcagctgcctatcgcctgctgccggcgacagcagggttccgaaaatcgcacattgattacagtttcaccccagaatctgctccggacaagcacctgctcgacagcgtcgaccgtggcatccatctcctcctgtccaacagtcgcgcccccatgcgtgcagttacagcgctgtctctgtttggcgcagtcgccaatatggtgtactcgctctatgtcgttgcgatcgccatcttcaaggatgatgtagcaccgggctgggtcagcctgtcacttcagcagtccggcatgttcttcctgctgtcgatggtgctgctggtactcggcgaatacattctgcaggtggcagcgaaatccagccatggccccgcctaccacgtcgcgatcgagttcacgagtgccaagctgggccgcttggagcggctgaatgtcgagatagccgcagccaatcgaaattccacagaccatggttga

SEQ ID NO: 531050 - DNA, 1173 bp, Stenotrophomonas maltophilia
atgaaggtgcaggtctcgctggggggctatgcttcgccttcaggtatcgcatatcgagatagttttgccttccctgacgatgttttcaatgattctggctggcataaagtttcgctggaagcaggtgtcgatgcggacggcgctcctctcggcgttgatatgcagttcatgcttctcgatcggcagattactgggcaggattggctaaggctttcgaactcttccagcgaccacccgcacagggttgtgttctttggactcaagggtggtgtgggccggtctactgccttgtgcatgaccgcctgggggcttgccagggaaggtaagcgggttcttctggttgattttgatcttgaatctccgggtctttctggccttatcttgccaattggaaattcctccgaattcggagtggtcgattggttagtcgaggatgctgttggccaaggtgaagctgtactcggaaatttagtttctgcgagccccttgggtgaaacaactactggtgcgattcgagtggttggcgccataggtggtattgaagaggactatctttccaagctttcgcgagtatacgttgatgtttcctcgggatcgcagcaaatgcggattggcgatcggatgcgtcgtctaattgagattcttgaggaaagagagaagccggatgttgttttgattgatagccgcgccggcctccatgatcttgctgctatctcaatcgctggacttgcggatactgctttgctttttgcaaccgatggtgctcagacttggaacggttaccgtcaattgttctcccattggcagaggcgaccggaggttgtttcaaacgtaagagagcgactcgctttcgttcgagctctgacgcctagctcggagagagcaggcaaggtcaaagactttagaagaagagcttacgaactttttgctgagtgcctgtacgacaacgtacccactggtgctgaggatggaggaattgacttgttccatccgagcgagggggatgaggcggctcctcatttcccaattcttgttgattgggatgaacgattccaagagtttgatccatcgctgaggccggaagacggcggcgcaaccgaagcgcaaattaatgccacctttggggcattgataaggtgggtgaatgcaagggtggcaggtgaagacgtatga

SEQ ID NO: 531051 - DNA, 1458 bp, Stenotrophomonas maltophilia
atgagtgcaaatgtcgttgcaataagaagaggtgtggtcgaatcttccgctttcttggaccaggcgcaagcgactgctgggcgccctgcgggtttcacctatgtacctccgacacacgcgcgcgcgctggatccagatgccacgttggtggagggtattcgcgggtctgggaagtcgttctggttctcccagttggcatcagttgaacatcggaagtttgtatcggagaattttccagagagcaatcttcccagtcgattgagagttgctcagggctttggcgccggactttcggttttgcatgcgcctgatgccgcaacgttgggggctctatctggaaagtatccagctcggtctatctggcgtgcggtaatcggtttgcatgcaggccttggcttcgagtttcgttcgctgcgccgatgggcggatagggttgaatgggtacattccaatcctgagcagttcgccgaagaactggaggacgcagacctgcgcctcgcaaaagagggcaagacgcttctggttctatttgatgcacttgatcgccttgcagatgactggagtcatatacatccccttgcgagggggttgctgcaagtcgcgcttgatatgcgtgggactagagctattcgttgtaaggtctatgttcggccggatttgcttcaggatccgagtattaccagctttccggactattcaaagctattgggaagcaaggcttcccttgcatggaggagggccgatctctacgccctgctttaccagtgcttaggtaattcaaagggaggagggcgcgcatttcgagaaatgttgaatggcttcgttccttctgaggcgaataagaaggtgggtagcgtatggaaagtgcctagtgagcttcgcagtgacgagaatctccaagagcgagttttcgagaagctggcggggcatgcaatggggagcagtactaagagagggaaaccctatacatggctcgtgaatcatcttcaagatgggcttagccaggtcagtccgcggagttacttcgcggcgctggcgacggcggctatcgagacggatgtagggtactcgctgcctctggattatcgagggattcaacggggtgttcagcaggcgtctcaaatccgtgtgcaggaaattacggaggattacccttgggttaggctggttatggagccgctgagaggtaacttgacggttccatgctcctccgcggatatcgataagatatggaagaaagacaggactttggtgggtttggcggaagcacttgagatgaacgaggttgtcgtcaagctccctcctcaaaatatcgatctaggcgcgtcagggattattttggatctcgagtcgttaggaatggtgcagcgtatggaagggcggcgagtccaaatgccagacgttttccgcgtggcattcggtttggggcggagggggggcgtcaagccgctgcgttag

SEQ ID NO: 531052 - DNA, 174 bp, Stenotrophomonas maltophilia
atggcctggcgcgagaccgagaacgcgccggtgatgaccgactgcgaggcgatcaccgccgccatggtggccaggatgatcatcgggtacagcgcccacgagggcaccgcctcgaagaacgggttcttcagggcctcggggtggttgagcaccagtgcgccctgccccaggtag

SEQ ID NO: 531053 - DNA, 210 bp, Stenotrophomonas maltophilia
atggtgaacaggaagatgcccagcaccaccgggaaccaggcgccctgcagcagcttggcgccgttggcgatgacgaagccaaggtcgatgatgaagaacaccacgcacagcggcagcagccagccacgcgacttcggccacagcgaacgtgccaccaccgccagcagcagggtgtcgatcagcatcgtggccgacaccgagatgccgtag

SEQ ID NO: 531054 - DNA, 903 bp, Stenotrophomonas maltophilia
atgacgagcaatgtcattgaacttcgtaaaaacagaaagaatgcggtcgtcctcaaaactgaattagccatactgcggaaccgagagccggactgcacagcaattgtttttgagggaaagcccgacgcgattgtctttgaagtttggatcaatcgcgtaaattctgagtttgaatggacaagtctgatagctgatggaaaaggcaatttgctcaattttcgagcgatgctcggcagagacatgacaggactagctgacggcacttacttcatcattgattgtgactatgatgagcttagagcttttcagccaggtgacgacatttatgttcttccagcacattctattgagaatatcctagcttctccaggctcaatggatcgactaatcagatccagcttgacttttcccggaggaagggaatctcgggcactagcaatcagtgcattcatggatcggcgcagagagtttatggagcttcttgtcccaatctgcggggcaatgctcgccgcgtcccgctcgggaaataccaacattcagattgacgaaaatgttgggaaatacatctcaatcgatcttcattccatcaccataaagagcggcgtagagctgagcatgatcgctcacttttccaacatcccctcagaagacctaatttccaatggcattaaagaactcaaagccagaggacttgagctttggatcagaggaaaatttcttcattatcttttccgaaagttttgcgatctactagaagctgacatgagaagtccacaacccagtctattccccgcacaacatctcggctcatttaacgcgcagcacttagatctaccgcatcttgcagcacttagcgagttaccaattgggctaaacgatgccgtcgcgcgttgggcgaactaa

SEQ ID NO: 531055 - DNA, 1443 bp, Stenotrophomonas maltophilia
atgttaggtagacacgcaccgattagacgattctcgataagcggcctccacggatacaaggatgtggaaatcgtattccatagcagcgtctccatacagatcgcaggaaacgggagcgggaaaactacggtcctgaatgcgcttaatgatctcctgcgaggaagacttcataagctttcgattcttcagttctcaactatagagtgcaatttctcgaatggatcgaccgcgcgactcactaaagatcagctaacgcgtcgaactggaagcctcaatgaaactgccaagaagttgtcggactatggaatatcagcctctgagctagctcactttttgacccatgtgtacaggccatacctcggagccgagcacttctctaatcatgcgttagtacgtagagcctatgcgggatccccctacagctacgaaacgcttacggagatgtttgatcgtgcacatgaagcgtgggaaatagctccatctgacgaactcagtgcgcaacttaaaataatagagcgcgcattaaatgagcatgaaatagtctatcttccgacttggcgccgcgtggaagatccacttcttagtcctcagcatgcggacgacgcaacactctcattccggggctttagaagcaggcaagaatctgatgatcaggaccagattaattatggccttgacgacgtcattgcgcgcttaaatgaactcacagaagaaatcgattcgatatccaactctgaatatcgaagcgcgagcgcaaccatcatcgacgacgcactgagcggtttggcactgaacagccgaacgatcaacaggtcgtatcttccagacatagacgccctcgcgcgtttcctgcaaagagtctccaagagtgacgagtatcacccttactctagtcactttcccgagcctgatcgcctgagcgacgaaagaatcatgaggatacgccatgcttacagttccggcgaactagaaaacaaccctttcctagggtatttcctgatgaagttagggccggtgattgaacgaaccaaggccacggaagagcgccttcagaagttcgtgaatgcctgcaactcgtaccttctccaaggagacggggagaagggctttacctacgaaccacaaactatgcgcgtcagcgtctacaactcatacacaaagcggacagttggcatgggacagctatcctccggcgaaaagcaaataatatccatactagctaagctatatctttatgaaggaagcaaaatcatcctcattgatgagccggagctatccctatcaattgagtggcagcgacgaataatcccagatatgatgcattcgggcgtagtttcacaaatcctggcaatcacacactctcctttcatatttgaaaatgaatttgatgcgtatgccggaaattttggaatccaaaggcacaggctcggaacaactccatga

SEQ ID NO: 531056 - DNA, 1041 bp, Stenotrophomonas maltophilia
atgaagaagcctgatctcaccgcatcaatccgcgcaaacgcacgcggcgacgcccgttccatccctcacccgggactccgccacatccgtgaggctgcattgagccgggcatggatcgattcgaagctcttggaggatgaatcggcactgcaagagctcgcatggattgaataccgttacatgacgccacttgcgcgtaccgaactgttctcaaagatgtacttcgaggcatatctgcgggcatacgccaagcgcttccctggcgaagacgtgagcaagaaacgtccttgtgagattgacttcgagcgcaactcgacgcgcgtgatgaacgcgctgtggcgggcgcgcgcaactgctgatgtggcgggggtgccctatgaggtcttcttggacacggtgctggagtcgcatctgatcaaagaccgttggaaaaatccgccacgtccgaaccagctttacggcaaacttgtgatgccgcgcgtgcaggggctgctgacgaatgagcttgtcgcagagcggctgtacggcgtgaactgggaccggcgcttcttcgcagcagagtaccgcggcgatcctgtccaaaagtccgctctcgcgctgctggcacgtatcgtcaatgagtctgaggatccggccgaaaagctcgccgagtacctttgtgaccgtcgcgcgataacggtcgaggccgccaaggaggtgttcgacgtcgaccttacccggcgtgcaattcagcacggtgagcaggtgcctgtggagtcaggggcagcaacgcccaagcctttcgttccggcatgtgttggatactactgggacaatgaggactcgcagtgccagttctgtcctgtaaagctgaactgcattcaggtatccgaacgcgtaagcgaagatgtaaggacgatgacaggtagcgtcgacccgcgtggtgaccatatgcgcaagaaggggcgggagcgccagcagcggctgcgcgataagaggtctaaagccgaaatgattcagcgcttgggggctgattctctgaatctctcaactgaagcgtag

SEQ ID NO: 531057 - DNA, 810 bp, Stenotrophomonas maltophilia
atgacaaccgcattcgacgttttcgaggcatgcgttcgtgcagttactgcagggcagctgattcattcggtttctgcgaaggataaggagtttcatttccagaattggttcgaagctcgtctgaatagcctcccgctgcattttgatggtggtgggcgtaacacgtatccggatttttctctcgtggcgcatgccgaggggtatgaggttaagggcttggcatggcctggtcgcgagcgtgactatgactcaaatagtcaagtgccaacaggtgtgcacaacggtcgcgaaattttttatgtgtttggccgatatccggccgacttgccgggctactacaaccgagtgggttggaccggaagatatccggtagttgatctcgtgctatgccatggtgacttccttaatgctgatcacaactatgttcataagaacaagagtgtaaagggctttggcacctatggcgacgtgatgatccgagatcggaaaatgtatgttgcccctactccctttgccttaactgagggaacgactggtctcatgacattgattctccccgagcactatgggacgcaccctcgattccaggtggttgggaatttaactcgtatcgaagcgaatacattggttgtagggtacaactttgacttgcggacgaacgaacttatcgctgagcgtgttcgaaatccgcgggctgggcaacggcacaatttcatcgcccatcgtctttacgatcagtcgtctaataaggtttacatgactggcggcgacgttcagcctgacgaaaatgaatatttggaagaagtgtga

SEQ ID NO: 531058 - DNA, 2175 bp, Stenotrophomonas maltophilia
gtgactagtaacgtcaagattttttcggaagcgtcttcgcaggtcgtcactgctttggaatctcactttccattggttgagatcagtcaagttgccgagcaggaaagttggcgaaaggaaattaataggccgatttatcacattcataagtggtgggcgacgcgactgggctctgtgtttcgggcgatcaccctgggtgcattgagcccgcctctaaccgacgtgtgggcggagttctataagatgcacgacttagcgggcaaggttgtgcttgatcccttcatgggtagcggtacgacgctaggtgaggcggtgaagctgggcgcgaaggctgttggctgtgatgtgaatccggtgagcactttccttgtgcgtcaggctttcacgccggcctctgagactgagctgcgtgcaatttttgaaaggctggagcgtgatgtggcgccggagattcggcgttactatcagacgcgcgatcctaggactggcgagttaattccggtgctgtactacttctgggtcaagactgtgacgaccccaggaggcgaagtcatacccttgttttcacggtatgttttttcgcaagatgcttatccgaagaagaagccgcgcgcgcaaattttgtgccctggctgctggagcgtgctggagggcgcgtatgacgcgaccgacattcagtgttcatattgcggccaccagttcaacccccagcagggccctgcagccgggcagtacgtcaccgacgcaagcgggcaacggtaccgaatcaaggacttgctgtccgaagatggagctccgcccgctcaccgcatgtacgcgatgatggccttgcaggccgatggcaaaaagatctacttgtccgtgcaggattgggatttagctttgtacgaagagtcgcgagagcgtcttgcactcgaagtgctgcctttgccggaaaccatcgtacggcctggccacaatactgaccaggctcggggctacaactacaccgaatggcgtgaattcttcaattcgcgtcaactgctctgtctgggcttgctgttgcgagaaattaatgccattgaagatctgaccatgcaggagcagatgctttgcttgttctccagtaccttggagttcaataacctgttttgcagcttcaagggtgaggggacgggggccgtacggcacatgttctcgaaccacatccttaaacctgagcggaccccgctagagaattctgtgtggggcactggaaaaagtagtggaacgtttagtacgctgtttgaatctcgattgttgcgcgcgaagcgttatcttgatgagccgttcgagatcgccttagagtacgacgagcatggtggccgtgcaggctcgcgcaaggtggtggctagccgcccggttcgcgccactcgcgtcgaaagctgggaggaattggcggccgcagatcacggtgtcctggttctgaatggtgatagttctaagcttccagttccggcgggctctgtagatgccgtcgtgactgatccgccttacttcgacttcgtacattactcagagctgagtgacttcttctttgcttggctttcgcccgcgctgcgacaacggtatcagtggatggcgcgcgaggattcgtcggatattggcgaggtgcaacacaaggatccacgtgtgttctcgcgtcagttggcggcggtgttcaccgaggcatgtcgcgtgctcaaggacgaaggagtgctggcattcagcttccaccactcgcgcgctgaaggctgggcagcaatttatgaggcgatcaacgaggcaggtcttgcggtagttgcggctcatccagtccatgcggagctgcgagcagcaagtcctaagatatcagccaaagagccgattagcctcgatgccattctcgtatgtcgcaagaaggagttcgctttacagctagcgtctggtacccgtggtgtgttcgaagctgttgatgagcttgcgggacgattgcaaagcgctgggctgcgtatctctgctggcgaccgcttcgttatcgcagcagcggagacattgatcgttcgggctcgcgacagtttgagtttcgaggcgatcaatgtcgagctggaagagatccgcctcgcgttgttgcagggcgctaaacccgttgaagtcagggaggtcaaactgggtgctctgttcgcgacaggtagctag

SEQ ID NO: 531059 - DNA, 783 bp, Stenotrophomonas maltophilia
gtggacccactgcaggacgcgattggccgcgccatcgcccagatgccgccccgcgatacacagccgagcgctcccccccgcgagtcgttgatggcacttgccgccgacgcccagaaattcgttgaggcgacgcgtaccgcaatggccggaggagccggcggcccaaggactaagaagcgggtggtagtcggcggactgctggcatatgccctggacattgcgtggtcgagctgccatctgttgcgtaccaagccgatggagacccacatcgcggtgctcaccctctggagaccgctattcgaaacctggtcacgcgcagcgttctttgcgctggaagccactgaagatgagattgctgcattccgcgataagggtgtcgtgccacgccgtccctggccgtccagaccgaacaagccacaagacatcaacccccgactgatcgccaggctcattggcccgaagatctgcccagatgatccgggattgcttaatagccttgccgacgaggtgccggactggcatggccttgtgcacggcgggtccaccgttgtggatatctatgatggcggcgacactctgcaatcgcaggtaggcccggacgacatggcgctcaaggtcggccgtgtcgccgtcgtcgcgttcctgagcggaataattgcgctcaatctgtcggttgatgagggtaggcgcagcgaggtggaggacatagctgccaacctgcacgccaagatccgagcattccaggcgcgctggccgcatcagctaccgagtggccagcggtaa

SEQ ID NO: 531060 - DNA, 489 bp, Stenotrophomonas maltophilia
atgctcagccgctcggaagatccgcatggcagtgcactgccactgcaaccggtggacctggctgcgttggcacgcggggtggtggagcgctacgccgaccgtgcgttggcggcgggcgttgacctgggctacgaggggccagacgacggcgtgcaggtacagggcgatccgcagctgctgcgcgaagcattgggcaacctgctggacaacgcgctgcgctacggtgccgtgcccggtgtgatcaccctcggcgttcggcaggaggccgaaggcgtgcaggcatgggttgacgatgacggcgccggcattgccgaagccgaacgcacgcgcgtcacggaacgcttctaccgggccagcagcgaaggcgacggctgcgggctgggtctggcgatcgtggccgagatcgcgcagcggcatggtgcgaccctgatgattgataccgccccgatcggtggcgcgcgggtggggttgcggttccgtttccgctga

SEQ ID NO: 531061 - DNA, 1776 bp, Stenotrophomonas maltophilia
gtggccgagctttcatctcaacctactccaattcagtccctctacgggatgtacagccagggtaagttgatcgtcaatcgcagatatcagcgcaagctggtctggacgttggtcgaaaaacagaagctgatcgattcagtgcttaataagtacccgattccggcaattcttgttgccgaacggaaggatgagcccggtgtctttgagattatcgacggtcttcagcgtcttcatgcaatagtctcgtttattgaggttgctttcccagtgatgggtggggagtattttgcgctggaacactatccaaccgctaaagcgcggtctgactctggggtgtttgcccctccaaccgaagctccactactgtctgcagcccaggtttcaacgattttggactataccgtagcgctttcagtgatgcgaaatgctagcgatgctgaggtgaatgatgtatttgggagaattaacacttatgggcaccgtttgagcgatcaggagcgacgtcaagcaggtgtcagtgatgcattctctgatttggttcgaaatcttgcctgcggcgttcgaggtgatgcctccccaagtacgctgctcctctccgagatgccaagcattagtattgatttgccgatggcaaagcatggctacgatgtaaaggccgaggacgtggtttgggtaagccatggcattctgcgttccactgagctgcgcgacagtatggatgagcagtgtatcgctgacattgctgcttgtattgtcggcggtagaccgattgagcgttctaaagaggcgcttgatgaaatatatacagatggttcggaggagtcgattcgcattaagaatgcccttgatgtttatggtgttgagcgattctccgaggagtttaagttctgccttgatgaaatattgaaggtttgctctgcgggcaaagatcaaaaattgagggaaattatattcaaggacaggaatacgaattcatttcctgccatctttgcggttctattgattgctttccatgagatgatcgttggagataggaagctcgtttcggattacgcgggtctaaagcgcgctattaccgatgtgacggagcgcttgatcacgagccgtagggccggctcggtggatggtcggcgaggaaatatcgacactatcaagggtctcatttcgcagttctttactccggcggatgttgaaaaggagatatatggaaatccggcgacgaccgatattgatgtaatgattcgtcgttccgaggttgagttggcgaactatgagttgaagcagggggtgctacaactgtcttcggctagagacgtcgatggcgaagtttttgataaggtaattaatacgatttgtgccatcgccaatgcaggccctggtcgcgtggggaagatatttatcggtgttactgataaggacgccgacgcggagagagttgctgagcttgataggatcgagccgcgaaaggttggacgccgctacgttgttggcgtgaggagggaggcggagcttctgaagatctccatggaggagtacctagggaagtggcgggacaaaattgctaagtctcagctcagttctccactgaaggaggatgtgcttgcacacatcgatttcaacgagtactacggattgggcgtgatcataattaatgttccagcccagacgcaggcatccacagttggggactcgatgtattggcgaaacgttgatcagacgactttggctacttcgatgaagatggcggcggagatcggcgcaaagtttgctcgctag

SEQ ID NO: 531062 - DNA, 279 bp, Stenotrophomonas maltophilia
atgagcgccaccaccattccagacttcgccgtcatcgaagtccccggctgcggcatgcggttgcgtgccatgcgggatccggctggttggagcgtctcgggctggcgtcgcacaaagggcaccagggtcatggtcatgttcgcttccgccgacggtgcgcccaccttcagcgagaacgccggccagcatcacgtcatcgtggaccgtgcctacgtggcgctgcccgccacctccagcagaaagctgcgcgacttcatcactgaagtggagggcaattga

SEQ ID NO: 531063 - DNA, 381 bp, Stenotrophomonas maltophilia
atgagccgcgtcctggtcaatcaccgcaaggagttcaccgcgacccagctcagggcacctaacgagctgatggccgcgctgcgcaaggcggccgaagaaaaccggcgctccgtcaacgccgaaatgatttcgcgcctgatcagcaccttcgaaggacttgccatgcctgcaaccgatgccggcgacggcaaggcccacttcaagatccgtctggatgattcgctgctcgccgcgctcaagcagttggccggcgacaacaaccgcagcgtcaccgcacagatcgaattcatcctcgcggccttcatcgcagaccacacgccagtcgcggatcactcgccggacgccggcagtagctgcccaactccggaggccaaccgatga

SEQ ID NO: 531064 - DNA, 420 bp, Stenotrophomonas maltophilia
atgacgccttcatccccccgtgcccagcagcacgccacccgcgccgccttcttcattcccggattcgccaccgccgcatgggcgcccatggtgccctacgccaaggccaaggctgggctgtccgacgccagcctcggcgccgtgctgctgtgccttgggctcggctcgctgctggcgatgccgttggcgggcgcgctgaccgggcggctgggctgccgccgggtgatggtgatcacctgcgcgatgatgctgtgcgccctgcccttgctggtgctggcgccctcgccggtggcgctgggtgcggcgctgttcgtgttcggcgccggcgtcggtgcgctggattgtgcgatgaacatgcaggcggtcgcggtcgagcgcgacgccgggcgcgcgatgatgtccggcttccacgccttctaa

SEQ ID NO: 531065 - DNA, 558 bp, Stenotrophomonas maltophilia; identical to SEQ ID NO: 503995

SEQ ID NO: 531066 - DNA, 1020 bp, Stenotrophomonas maltophilia
atgcgtgttctggtaacgggcggtgcagggtacatcgggagccatgtctgcctgagtctgtattccgccgggcacgacgtcctgatcttggataatttcagcaatgcccgcagggatatcggagaaaggattcaacaaattgcgggagttcggccacggattgtggagggcgacatacgcgatgaagaccttctgagaagcgtgatgcatgacttcgagccgcatgccgtgatgcatttcgctgcgatgaaggccgtaggggaaagctccgttattcctctggaataccatgacatcaacgtcggcggcaccataagactactgaaagcgatgcaggcatatcgctgcagaaggctcgtattcagttcatcggctaccgtttacggtcagataggaacatgtccggtgaatgaatccgccccggtttcggcggcaaatccgtacggcagaaccaagctcttctgtgaacagatcatcaatgatgcacgtgctgcggatagtgaactgcaggcaatcaatcttcgttacttcaatccagtcggtgctcatcaatcggggttgattggcgaagctccacacggcattccgaacaacctcatgccgtacatctcccaggtagcctcgggtatccggccgcagttgtacgtgtacggcggtgactacgacaccccggacggtacgggggtccgggactacattcatgtctgcgatctggcagacgcacatcttcgggcattgcagatgctgcccgatcttggcgatctggaagcactaaatctcggcacagggcgcggacactccgtcctcgaggtcatccaggcgttctcagaggcatcagggcgaacgatcccctaccagatcgtagcgcgtcgcgagggtgatgcagcgcaaagctgggctgacacatcattggcccacaaacggctcggctggatcgcgcagcacggtcttcggcagatgtgcgaagacgcttggcgctggcagcttgcgctggatcagtcaatggacaccgcctcctga

SEQ ID NO: 531067 - DNA, 1269 bp, Stenotrophomonas maltophilia
atgcggaaatttgatcgatctgattgttttctgctggctatactcgcaatagtgatatctattgttagtttcccgtgggctggtcgtcagtatccggatacggtggattatttggctcaggcgacgcgttcctggattgatgttggcctttatagcggcgcgcgcgcatctggatatgtgatttatctcaagctatttggggcggagtgtctggggctatatattcagtggattctttaccccgttgcctgggttgccttggcatgggcagggatgaccctggtcgatgagaagagaagtcgggtacttcttgtggccttctgcgtggtcgcgggagcgagtgctcagtattcccagtgggcagcaagcctgttgacggaatcaattgcgagctctttgtttattcttttatcagctttgtgtctgcgaatgctgagggacggcagggcgcgttattggatcgtatttgttgttgtttcggttgcgtacgttttggtgagggatgtcaatgcctatcagatagcgtttttggttccggcacttctgctactgcgtggcaacggtgtggttcgcttcattgcagtcctcgttatcgcaggtgcatgtctatttgttgtgaatagtgcagagcgaaatgagcgttggctctttccgtacatgaatgtacttggtcaggatgtcttgcccaattatgctatgagggcgaagctagaacagaaggggcttccgcacgagcttgcgctgagacactccggaaaatgggcttcttctgatgatatgtgggtcatgaacgaaggcgagtccgagccattgagagcgtgggtgcgctcgcatgggaagaaggagtacgctgagctggtcgttgcaggtgccccgtatgccgctctcaagtttctacggcagctgccagcgcttgttaatttttccggcgatgagctggcttattatggaggagcgagtctggccggaaagtatcaaggtatttttgcatattcggtctggccagtacttgcgataattattttcgctagcgtggtgcttttggttgatgcttcagggttctccgattcgagtggggttcgcggatacctgttcagtgtttggttggcgttgtccggatttctggttattggaatcagctatttcgccgatgcaatggaacggctgaggcacgcgcttccaggaagcttggcgtggacggtggccgcgataatgctgttttgcctggttgcttctgggtgcaggaaaagggaggtttccgccaattga

SEQ ID NO: 531068 - DNA, 411 bp, Stenotrophomonas maltophilia
ttgagcagatcacgtttgatctttgcctactcggtgtttgccgtcgtctccatcggagtgaacatcggcgcccaggctcttatagtttttctatacagaagcccttatgccgttgttgcctccgttgccatcggcacagcggccggcctgctttgcaagtacctactcgacaagaagttcattttcaatcatcagtcgaagagcatcgcgcatgaagcacgtacgtttgcactctatatagtcatgggccttgccaccaccctcttattctggggaaccgaagctgcctttcacttcgtatttcaaagcaacccaatgagatatctaggtggaattattggcctgagcatcggctacttcatcaaatacaagctcgattcaaagttcgtattcaatacgaagccagtgtaa

SEQ ID NO: 531069 - DNA, 390 bp, Stenotrophomonas maltophilia
gtgaccctagtcgggctccgcatacgacgagctgatggctacgtggagaccacggtcaccaccaagctgtccaagatgatagggtcgtacagatttccgctctacaacccggtcaactccaacaacaaatgggtggccccgccagaggcgaatggcgggctcgtcgtcaacgatttctccggcggcgagcccttctactacttcacctgcgaggggcagcgatcggtgtacgggatgctggttccctccgtcaccgtgtcaggcaacagcatcaactggtcctgggatcctgacgtggtgaactatcacgtcaggatggagatgttcttgagccagtcgatcaccaacaccgtgggcggcatcacccttcactacgggatctacagctga

SEQ ID NO: 531070 - DNA, 351 bp, Stenotrophomonas maltophilia
gtgctgttcacggccgatcgctttgcgttcgtcaacctggtcaacgggcagctgacctcgccgttcgtgatccagggcgggcagaccttcatcaaccaggcgctgatcggaaccgcgtggatcaacacggccaacatcgcggatgcggcgatcaccaacgcaaagatcggtggcgtcatccagtcagacaactatgttccagggcaaaccggttggcgaatcagcaaggacggtggtttcgaactgaacgggaacacgccagatggctacaagttgcgcgtggtcaatcaaggcgtctacgtctatcacccgaacggagttccagctgttgaagtgggggtgttgttgtga

SEQ ID NO: 531071 - DNA, 882 bp, Stenotrophomonas maltophilia
atggccctgcttgcttctgaattgaagcgatttcggacttccaggcccgaaactcgcttccgcgcggagaatcatgcagagtccacttacgcagcgcacatgggatttttccaagcctttggtctagagcacgggaatcggccaggcgaagctcaaggcagcggcaactatctacccctgacctatttgaatgtggaagagattaggcagcaagccgcccagagctacgaacccgttggtgagttccttgaccgcgagtcgggacgactggcccacgttctcactaggctgcatgaaggccagctagttgatacgctaacctactcattgcgagaaatactcagaaatgcggtagagcactcacagtcagagaagcttgcctattgcgcgcaatactggccgacacggcatcgtgttgagattgcggtactggacacaggcatgggagtgcgcgcctctctcgcggcaaatccctacattgaggttgactccgacagaacggctttgcagctgtcactgatgccaagtatatcgggcaagatgtatcgcggggtccgtagaagaccgggggaccactggcaaaactcgggctacggcctctatatgaccagtagactttgccggaacggagggagcttcttcattgctagcggtcaatccggggttctactcactcccgggcaaaagacagactttgcatgtaacctacccggtaccgcacttcggctggtgatggacaccaacctaaccctaagcctgcaggaccgcctgggccagtttaggtctgaaggatacgcggtcgcacagcggttctccggcgagcacgccatctctccctcatcagcatccactatgctggcgagagacttcgcgggcgaatga

SEQ ID NO: 531072 - DNA, 1437 bp, Stenotrophomonas maltophilia
gtgccagagctacccaccgcagtgcgacaagatatggaacaccgactccgccttcatcttgctaccaagattggctatagcgctccttgctatcttgcatctggagggtcggcagcgacgtatgcagtaaccactccattcggcaagcgtgccgtaaaggtctacgaccctaggttcctcaccggtccagctgctccggcagaacaaaggcgtcttgccctgcagcgaagtctcattggtcactcttgtgaccagctagtcaccgtgtatgccgtagatgaaagcgagggcacggctttcattgaaatggagtttattgagtggccacaactgaagagtgttgctgcccgcgtccccgatgaggcggtgtcaatcttgatacaagagttagtgagcgcagttacgtatctagagaggttgcagattgttcatcgcgacatcaagcccgagaacattcatgtctcaccagattttacgcacctcaagcttcttgacttgggagtcgcaagagctattgatgctcatgaggatgattccgggcaggggacagaccatggcgacgctcgtcccttcatcgccaccgcgcagtacagctcccctgaatatttgttccgattggatgagccatctcctgctctatggaaggcgcttaacatctaccaggtaggtgctgttctgcatgacctcattaacaaacggcctctatttcaggacgaagttgataagcagaatcgttggctcgtagctcgggctgtgctggaaaagccgccctcatttccagaccccgacccttcccgcctggtccggcagaaagcactcgccgcgcgatgcctagcaaaagacgggaacattcggctacaaattgctagctggagcgactttaatcttgatgctccagctgacggaatcgcaacgttgcaagcgagagttagcaagcagaggggctccctgggggcaatatcgcttgcagcttcgagcggacggctggagtttgagcgccgtggctttatgaagcggctatgtgattcagtaaggctggagctaatcgcggcgtgcaaccagcagattcggctaaacatgtacgccgaggagcacacctccccagtagtttatgtatacgacttctctcttgcaaatggactcactgtcgtatgcaaagtttcgtccatctggaatgatggaatccacgcgaggacagcaacgataatgctcgaggccgcgctagggctggctggccgccctcttccgcagacgagcgtctctgctcttacgtcggcgacaattggggagtcggaagagcttgcaatgaacgacgttgccaacgcgctgggaaatatagtcgctggagctatcgacctttctgaagctggagccgaacccgatagccttcatggcacggatttgatgtttgcattcaatagtagggggactcattga

SEQ ID NO: 531073 - DNA, 1155 bp, Stenotrophomonas maltophilia
ttgagcacaacatggtggaagaacaaaagtgagctggacccgacgcagattgagttcatcaaccttcctgctaaaggtcgctatcagttggaaggaccagcaggttcaggcaagacgaacctcctgctcctgcgagcacagtttgtggccggacaaggggataagaatgttcttgtagtaacctacaccaatgcgctttgccacttcctgcgaagtggcctagtggactcagggtacctagaggcagaccaagttagaaccttccactcctgggcacgccaccatgtgaagctctacctcaataaagatatcgctgatggcggcgactttgacgagaagaagcgcaacgaagcaatagagatgcttcgagaggcaaataaaagggcacccaatacgaagctaattggctctgtctttattgatgaggcacaggacctcacaattgatgaaatttcctgtctgtctgaaattgccgagaacatctgcatctgtggagacctgaatcaaggcatctatcatcgagatgggctggatgctgcgggagcactcggcctaaagaagtacgccctacagggccactatcgtatcggtcatcgcattgctcatgtggcagaccggctattgccgcctgctacgcctgaagagtcgcttgaggcaacgtcgaactacgacgagcaaaagctcggaaaatctagcgcgaagctacacacgctctcaagcagggacgagcagtttgaaaagatgctagagatactgaacgtccaagcggcagccttcgccggcgaacgaatcggcattctttgtggaaaacggagcacggtgcagtacgtctacgaccggctactggaaacggaattgggagcgagcacttgctgccaccttgccgagggagcggacttcgccgacgacttgcagattcatgttatgacgatgcactcatccaaagggattgagtttagagcagtccacatgtttggcatcgaggaattgaagtatggacatctgaacaaccccacgttgtcctacacagcagtgacacgcgccaagacggcattgaatgcgtatagcaccgggacaacaaaccctgagctggaacatgcttttgcagaacctaagcatatgactatcgatgaattatttccgggcgcgcactga

SEQ ID NO: 531074 - DNA, 1416 bp, Stenotrophomonas maltophilia
atgaataactccaagcttgcttggtatcaactaagcagagatgagattccggatacagttctaggcactgcgtcccttgcatccagggaacaacagatttcacccaccccattaactggcaccgacaacgttggctgtgcaggtttcgcttgggagggagccagtccccttgagcaccatgcaccaacggcctttgttctagatgaacggaccattgccgagactctctcatggcttcgagtatatgccggggacaccttcccattgagccagttctctcgggtcctatcatctgatgattgggagatgctttcggggaacgagggcactagtcgctcattccgcgatgaccgctggtcaagcgtcgttcttggtgagctgcttgcccagagtgaacaagatgtcacactggacaacctttctctgtccagagtccaagcatgcttctcaattgctgtcgctcgcgcgcataagttctatgattcttacaaagtaaccagggcttgcaccgagcgcctaagggcaatcgaagctgaccccaggtttctgaggcgcagcgtcaatatcgattcactggtaccggtgtggtcgctcgcatctgcggagtttggacatatttccgacctgagagagctgtctgactttatccttactgccgcattttcttatgacgacccgaaacagcagcgcctaattaaaccaaccagctacctccctgatgcgctttatagtgattccattgaagagcgcgtcgtggcttttcagaaggtggccatggaagctactgaaagatttatttccatgccgaactcatactttcgctcagctgctacagtagcagtcgcagctttcttggtcgggaaaggaacaggtcacgcctttttgataaagaggcagggaagactggcccccatggctcatgtatggttcggactcattgccggccttgcaggccccgccttctgggacccgctgtgggctaaggccctaaagggcgttgagaagcacgtcagagtttcattctcgtgggcggacccgccgctgtcagatatatcatgggctgaacacaagtgggttagcggcgcgattcgtggtgcccaagctctccagggcatccctcgccaggtgcaaacagcactctccattgagatatttcctggcgtctcatgtcagatgcgcctacacactgatgataatcgaagtcaagtgaaatcatccgtttcgcacaacgtggcgcctcctcagcaagagcgtgcctccctgcctcctgaattgattgcagccatcgaagacctgtatcgatactcagagaaggcaagaaatcttgtccgaaagaacgccaaattgaccgatgacctttttaagccatcggagtcttcgaaagcaaagaagacaagtaggaaaccgaaggcctga

SEQ ID NO: 531075 - DNA, 267 bp, Stenotrophomonas maltophilia
atgaagaagtcccgcttcaccgacagtcagatcatcgccgtgctcaagcaggccgaagccggcacgccggtaccggagctgtgccgcgagcacggcatcagctcggcgacgttctacaagtggcgcagcaagttcggcggcatggaggtgtccatggtggcccgcatgaaggagctggaggatgagaaccggcggctcaagaagatgtacgccgacgcccagctcagcgccgacctgctgaaggaggcgatgtcaaaaaaatggtga

SEQ ID NO: 531076 - DNA, 807 bp, Stenotrophomonas maltophilia
atggcccgatgcgcagttgagggcggacgcacgaacatccggcacgcctgccagaccttcgaggtcagccagacctgttatcgctaccaggccagggccagcgaggagaacgcccggatcgccgactggttggtccggctgaccactgcgtacaaggattggggctttgggctgtgcttcttgcacctgcgcaacgtcaaaggctatggctggaaccacaagcgcgtctaccgcgtctatcgggagctggagttgaaccttcggatcaagccgaagaagcgcctggtgcgcgagaagcccgagccgttggcggttccggatacgatcaaccaggtgtggtcgatggacttcatgcacgaccagctcagcgacggccgcaacttccgactgttcaatgtgatcgacgacttcaaccgcgaagggctggggatcgagatcgacctgtcgttgcccgcggcccgtgtgatccgttccctggagcagatcatcgaatggcgtggcaagccgtgcgtgatccgctgcgataacgggcccgaatacatcagcgggacactgctggcttgggcggagcagcacaacatccgcattgaacacatccagccgggcaagccacaacagaacgcctacgtcgaacgctacaaccggaccgtgcgttacgcctggctcgcccgaaccctgttcgattcgatcgagcaggtgcaggaaaaggccacccgctggctatggacgtacaaccacgagcgccccaacatggcgctcggcggcatcacgccgatgcaggcgctcaacaggcgaatgtccggttaa

SEQ ID NO: 531077 - DNA, 936 bp, Stenotrophomonas maltophilia
atgaccgaacccattcatgttcatgcgctgacgatcttccttggcctgacgaaggtcaaaggcatcggcttcaagaccatgaaggatcttggtgggccgataggaatcgctgagaggctcgaatcgggacacctattcccactcgtagcctcgctcgccggggtggaagaatccgccctgcgcgactttgtgagacaggaaggccgacggctgctgcggcaactgagactgaatcgcgtagcgatcatcacgcgtcaggacgagctgtatccgctgcccttccgtttgcttccagaagaatctcaacccctttggctgttctatcgcggcaacgcggaactcgtgcagcggccttctattgcagtggttggcacgcgggacccctcaaaagagggcgagttcctcactcgctacgcgacatatgccatgaaggagtttgacctgccggtcgtcagcggactcgccctgggcgtagatgggcttacgcatgagactgcgctcaacgccgctattcccaacgtctcgatcctgggaactgggatactccggccctatccggctcgcaatggttggctggctgaggcaattgtcgaaagtggcggcttgctcatctcggagtactttccggaagcagacccggcggccgaccagttcgtgtggcgcaatcgcctacaggccgccctcgccgcctgtgtgatcgccacccagtggaacaagtcttccggcacagcccacaccatccgattcgccaagacgttcggtcgtcccagcatcaacttagtacccaatggtttgttccagcccctggatcacggcaaggctgatcaccttttcgaggtgcctagccagcacgccagatttatggaatgtgtgtatcgcgcaataggccactggccgcacggaaagctcgcacttcaaccatctctttttggatga

SEQ ID NO: 531078 - DNA, 1227 bp, Stenotrophomonas maltophilia
atggcattgaagctactgctggtatcagtgactggtaccgtcgtcaatctacatgacaaagtcgatcaccagatcgcccagcaacttggcgcgctcgcggctgagcttcatggtcacggtgtaagggttgcattgtggtcaaacgaaaagtggacctgcaatggaatgccactagcaaagtacattgagcaattctcaggagtgccaatctacgcgcacggaatgggatgggatggatcgccggcgcggcacaagggtgattcagcagcgggcatcctcaagacgcataacgtaaagcgcttcgagacacttttcttgggcggcggcgaaggggacatgattgccggcgtcaacaatcgactcctccatatccgaagcgattggtatggtcagacgtcggatcatggctttcaagtacagtcagtggaagaactgcggcgcttctgcctcttgttcggtctgcgcgagcacaacctcttctggcgcgtccagcacggcaacctagacgcggccaccgccgggccgttctcgaccataaaggaggcatacgcccatttcgggtacgacgcacgcgaagccgccaagtttggcgcaggccacccggacttctggttttacatcaccatcgcgtcgctgtacttctcggggatgatggaggatgtggactacatctgtagtttcccagggcataaggctggtcataagaacccctccgcagacagcatggaggcgatcctcgcgcgcatggggcgctgcactcgatcaagttactaccatgacctcatcctccggcattccgatgccctgaagagccagccgatcaagtccgatgatcgacttttctcaacgcagatcaattcaatcagactcaacaagcaccctcaccgcaacttggccgacgaagccagaaagagcgccatatcgctgaaaggcaaacgggtgctggtcgtcgacgacatggttacgtccggaagaagcttggagtgcgcgcgcgccttcattgaagcggctggcggcactgcggtgctgtttggatggcttaaaacgatcaacacggcatatcgcgagatatcgccggcgctaattgggctgaagccattcgcacccaacaccataacgactgaacctaaatccgttgctcattcctactacgattcgatcataggcccacacgctcctgcggaactggatggcatcttcaaacgtttctgttcatggccaaactaa

SEQ ID NO: 531079 - DNA, 210 bp, Stenotrophomonas maltophilia
atgcgcatccaaatcggcggtacccacatcacgaacaccatcaccatcagcgacagcgaccatgtcgccgttaacctgcccagcaccagcccacccccgcagcgtccaccgacgtcgccgaattgggcagtgctagcagtccaggtgaccatcgccatcgcaggagccgcaaaggcgcttgccccgttgctagggctggtgggcggctga

SEQ ID NO: 531080 - DNA, 321 bp, Stenotrophomonas maltophilia
atgaccaccaagaagcccgcgccgaccttcagctgcgacatggccgccggccctgacctcacctccgtcgcggagatcgtgaacagcaaggtaatcaacgtccgccatctgcctcgccgagacccgctgacaaagaagtcggaggtgctccaggtgctgaaggccggcggcctcatcgtcactggtcaccgtgatggcttgtggcagctgctcgatgccgagagcaggtcagtccccgcttggcaaaccgcgctgaaagcagccctgaaggccacccaggcctcgtccacacagtccggagacacccatgaaccgcagtga

SEQ ID NO: 531081 - DNA, 180 bp, Stenotrophomonas maltophilia
atgggcttgggaagaacctacaccgcaagcgccgctgccgaagcgttggcgaaggcaaacaatccagaggagcagcagcgcgttttcgacagcctcgagcgaaatgtctcgggtgcagctacctgcttccgggatgcactgaagctgctggatgaggtgatgagtactgaaattgcatag

SEQ ID NO: 531082 - DNA, 486 bp, Stenotrophomonas maltophilia
gtgaacgaggccgtgcactactacggcgtgtcacgaagccagttcgattcgaacatcgccgactacggcatcgaaccccgaaatttcatgggcaagaagctctacgagaaggctgccctctactgcaatctacggctccaagcaatggtcaaggtcacaatcttctggcgcgatggcgccgcgtacctcaactggcgggaaggcggcaagcgaagccgtgtcgccattggtcgcgtcagcccacgcgaagctgagggcgtacgagcagcgaaagaagcggaactgacccatggagtacgcattcttccccggctgcccacggtccgcgacttcctggagccgtatctggagtggtacaaggccgagcatcccaccacgcatggcaaggccaagagcgaggttcggctgtctatggcccgcttcggccatcggcccatcgatacgctgcgcccgatggaatggagtcctataagacggaccgcctga

SEQ ID NO: 531083 - DNA, 276 bp, Stenotrophomonas maltophilia
atggagtcctataagacggaccgcctgaccacggacaaggtttcaccggagactgtggggaaggaagtgcgcaggctgcaggccgcgttccggcgtggcgtgcagtggaaggaactggacttcaacccgctggaggaaacccgggcaccgcgaggcgtgcgtagcgtggcggtgcggttctacgaccgggccgcgatgcgcaagctgtaccgggccaacccctctcgccccccccctatggctattcatggcccacacgggtctgcgccgcggtga

SEQ ID NO: 531084 - DNA, 909 bp, Stenotrophomonas maltophilia
atggcgcggaaagctagtgggaaaggtataccgtcttggtttgagcttgagaagtacaactacctcagcggcctagatgctgctggttggcttcttctgttggatcgactcattcctttaatgagaataaaggttccagacgagatcacgggcgaaggccgggacggagctgtgaggctgctggccgagagattcattgccctacaggagggcaagttcagtactgggcgaagttggcggatcagatcatatctgcgaccggttcatggtttcggatttgggacggtccaggcgttagacaaccatgctgttgcttggatgggggtaacccttgcacgacttcctggcggtgaaaagttcatgaggtcactgaaacaggctgaggacgctcgtatggcaggcgactattcgaaggcgaatcgtcttggtcgtagccttacggatcaacgcgattttggcgacaagccattcttcgtgacgcttcgtgattctgatcttctatcagaaagagggagcagcttgacaccaaacagagcaatttcggtcaggcttagtgcgcctgacgacatcattgtcgaagatttcaagcgttggcttgcagatatgcgaaagctcgatcatcacgtagctgcaaaacgtagctttgggaagtccgactttgcaacttggatagagaggggctacgtccctctcgcgctgatagaggcgtgggctgcgatcaccggggagaagcccacgcttggggtgctttgcgagacggtttacccgggcaagtatgaagtggacgacatacggaagacgtatcggccgggaatgcgagcttggttgaccgcagccactgcggagggtcttgcggctcagaccgcaagggaccttgaggcaaatggccaggaagaaggaagggggtaa

SEQ ID NO: 531085 - DNA, 210 bp, Stenotrophomonas maltophilia
atgagcatcgaaaatcaggtcgaccagagcttagtcgcccacatctacgcgacagcggcagcagaagccattgccagacaggatggtccggcattcgaggatatcttggctcagtccatcgtagcggcaagggttttcgctgatgagatgggtaagcgcaatggccagcagattgatggctggcttggcgccgtgaaaggcatgaggtga

SEQ ID NO: 531086 - DNA, 510 bp, Stenotrophomonas maltophilia
atgggcaattccgattggttagccatccaggccgagcacgagaagaacaggcggctctatggcgggaagccgccgcgtgactcggtacggcgtgcactgctagctgcgcttgcctggtccgttggcactgttgtcgccctgtccgcggctttcggcctggccttattccttctggctcgatatggctctgatgagtacgtgctggtctgcgaagggacagtctccgcagagggtacgggggcagttcccgcgaccatgtacgccgagatgcgcgagtttgggcagatcatccggctttggagcaaggatgcggggaccgtgaggatggagatccccaatgatttctacgatgctggccagcttcgctctgccggcagtcttacgtccatttccacttacgcgggcctctctggccacttctcgggcctgagcggcgccttagctatgcgtatgggaaaaggccgagatttccaagggcagtgcgtgcgccgtggtcagccgatcagttag

SEQ ID NO: 531087 - DNA, 1089 bp, Stenotrophomonas maltophilia
atgtctgggtacttcaaagtatcgatgagcgcggcaaaggccattgctgatgcaagtgacggccccgacctgctctctgggtacatcacgttgttggcatatgcccacggcccgaaaagagacctcgtttccggcggggctaaggtcattcgccagaccactcggtgcactgacttccgatcaaagaagatcctgaagcgccttctttcctttggcgaggatcacgggttgccctctggtctgatcacccccaccgggcgcaaaaaagctaatgcggatctgcgcagcattgagctgtggggcggtgagttcgcctatctcccttttctactcgttgagcgccatcccgagtacgggtcacatcttgcccagctgctgcagctggaccagccagactcagcaatcagagacgcgttgatagtccttctgcatgtctacacagtcaccgactacgccgaatggtttggctgcccgccggacacgatgcccagcaaggagtgggatcagtcaggctccggtgggcaagattttgagcttggctatcaaggggacgtgggagcactgcagctctggctggtctctgaaagggaggaggaggcttggcgagttcctcgccaggtagttgccggcctcttcgggtctgattcggaggacaacatggcccgattctggagggcttgggactgtctgatccaagcggggtcgctcgtcactgttgtgtcggttcagtccggaggacgggcatacccgctatgggtgtattccaaggggtatcggcaatccttggctgagcagcatggaatcgtcgctgacctaggaagggaggcccagctggcggcttgttcaagtgggttggacccggacaacttggtcatccgttatgcggtcgacgagatgggaaggcctggatcgggtctcttctactgctttggcaagtccccgaaggttcggactgtcgtggccccgcgtttgcatgcaccgacccctatcaaccttgatggcttgaaggaagctgccaccgtcacccgcagcatctcccgggaaattagggccgcccgccttgctgataggcaggcgtacaccggatag

SEQ ID NO: 531088 - DNA, 312 bp, Stenotrophomonas maltophilia
atgacaacgaacatttttgaattactaagcgacgatcctgtcgatttcaacctcaagtcgctcaaagcaaagcttgcgatagctttggtagcgttgatccgtgagcagggatggacacaggcagttgcagctgagaagctgcaggtaacacagccgcggatgagcaaccttttccgggggcgtctggagaagttctcaattgatgcgcttctcggaatgctgatccgaagtggttacaaggtcgagtcgacctttgatcccacgaattccgctaaccccatgtcgttggaactgaaaagggcgatgctctga

SEQ ID NO: 531089 - DNA, 360 bp, Stenotrophomonas maltophilia
atgaaaagccacaagagcaccgacagtgaagcacagcagcaaaagcgtccccgtgaagtaattttcctcggacagacgctgaaagactacaaggatctgccggcgcatattcatgatccgttcggattcgcactgactgcagttcagtacgaccagaccccgaccttgaggttgaaacacttgaacgtgtcgaggggaagtgccatcgaacttatcatcaatgggcgtccagcctaccgcttggtgtacacgaccaaggagccgggaaaggttcacatcctctacgcgggcaagaagaccgcacagggcacggatcgcgccctgattgatacggtagaggctaggctgaagcaaatctaa

SEQ ID NO: 531090 - DNA, 792 bp, Stenotrophomonas maltophilia
ttgagtgtcagaatccgatctcagggactgatacgggggggcaggatggcgcagcgcgacagctggacctacacgttgcggatacgtgaagccagtccggatcgtatccggatggatcgattgggcgagtatctcaagctttttgcagagcttcttggactagagaacagtccagttttcaaaggtgtcaagaacgcgagcatcggattgagagcggcggtccctgcgcctcggcgagaggctgtttggattcgcattcaggaggcgaagtacaagcacaagagcagggcgcacgcgcaactgcagaagctggaacacatgctgggggaggattccttcggttcagctgaacttagggacgttcaggacaatgtagttttgctattcgaagctaagcagcccctaaccatgtcgaagatgacagtgcgccaaactggagatgttgacggcatggtcaccggcctagtcggggctgatgaaaccatgcatctccatttgcgcgacatctatgaccgcgatatcaaattaattgtccgcagtgagagtttggctcgggagctgctggagcgattccgaagaggaacggtgcgggttcgcgtgcatgggctgtggacaaggacggagcttggctgggtccctgagaacaataaatgcacagtcgatagcttcctcgtgctgatagatgagcctctcaccagaatcatggagcggctggccgaggtgcctggaaacggctggcgagaattggaggatccctatggattctggcgcgacattagggggagacactaa

SEQ ID NO: 531091 - DNA, 543 bp, Stenotrophomonas maltophilia
atgtcatacgaagtcccggctgtcgttgcgctggatgccaatgcgttgatcagtctttgcggaggcccgagcgacgagaggacgaagctggaatacctcttggagatgctggatcggaaacgtgggcttgtcattattccgacgccggcggtttcggagtttttggtagccgccgatcaagcctcgcacgatctgatggaggttcttcagagcaagtcgagtgtgcggatatgtccctttgatctagctgcggcgtatgagtgttcgcagatcaatgccgccgcgatcggtcgcggaaacaagagggatggcgttcaacacgacaagccttggcagcatataaagtttgatcgacagatcgtggctattgccaagtgcaatggtgctcagctcatcgtctctgatgatgagggagttagagcttgcgcgaagaggcttggtattcaagccctgagtatgagcgatctcgaattcccggagcacgagaggcaggcgaagatgccgctggaggctccgcatccccacttgggggggcgaggctga

SEQ ID NO: 531092 - DNA, 363 bp, Stenotrophomonas maltophilia
atgatgatgagtgacgcgacgccgggcttccgcaggaggttgggagcggggttggccttgacgttggccttgtgcttgtctgcaccactgaaggcggagccgtccggcgacaatctgacgatcctttcgctgcgtccgtacattgggggcaccgcgggagtcgtgtacgtgcacgtttcgagcatggacctctgcagtacggacatcttcaccatcgatatgtccatgccgggcgcaaaggaagcgtatgcggcggcactggcggcgctgacatcggggaagaaggtccggcttgaggtcttgaattccaccggttgcaatggttgggcgaccgggcttcagtcggtcaccattcgcgcttga

SEQ ID NO: 531093 - DNA, 435 bp, Stenotrophomonas maltophilia
gtggccatcgacgatcactcccgggtcgccttcagcagcgtccaccccaatgaacaggccgaaaccgcctgccaggcgctgctgggcgctctgcagtactacgccagcctgggaatcaccttcaagcggatcctgaccgacaacggtgcctgctatcgctccaccgcctttgccaagctgctcaaatcccttgggatcaagcacatcagaaccaagccctacacgccgcggaccaatggcaaagccgagcgcttcatccaaaccagcctgcgcgaatgggcctacgcccgcgaatacgcctcctcggaccagcgcaattccgtgctgacccaatggctgcaccactacaactggcaccgccctcacatggggatcggtggccagccacctatttccagagtcctgctgaacaacgtggtgggtttacacagttag

SEQ ID NO: 531094 - DNA, 768 bp, Stenotrophomonas maltophilia
atgagtagcgccggtaggtggaccttgcttctatcaggcgtcagcgcactggcctggcttttcctgctcgccctttggggtgtggtcactttcaatcggaacaccgacaactccctcggaatctacgggttgtccactccgggtgtagaagcgctcttctgggtctgcttcttcgggcagcccatgctgaccgtggtgatgttcatccggatggcattgcggcaccgttccgcgatctacgagatcccactcgcgatcgcggtctggggccttttctgtacaacctgtcgttcttcagaagctgagcggcatgccggctggccgagcttcggcctgaccaggtcgcgcagtccatggttacaatctgcccatgatcagctcccgccttctggttaccgcactgctggcgctgacggcctgcaccgccaccgcgcagcacaacccgctcgccacctcggtgccatcgcccaaccacaacgcgcgcacgccgatcatcaaggttgcggccgaagctcactacttcatccgacaaagtggtatggacgatgtgatttctgtaaggatcaggaatcagtgagtaccgagcgcattgcaatccatcttcaggcatggcctgacagatccatctcgattgccgagaggcatctccatgtcatggataggatgtcggtaatcgagtgcccactgggattccgtggtctcgagctgccccctgtacccgacgtggagaagaactgctggcaagctatgagatcaagactggactga

SEQ ID NO: 531095 - DNA, 435 bp, Stenotrophomonas maltophilia; identical to SEQ ID NO: 531093

SEQ ID NO: 531096 - DNA, 228 bp, Stenotrophomonas maltophilia
atgaaccggacttttggcgaatgggaagtgtcgagtgctgtggagagcgacggggggccgttctatcgccccgttctttgggccaagcatgaagagcggggcatccatcgccccacgtactttgagggattccgccacactgaagcactccaggctacggagttcatcgaacggcaactccagtgcatcactggcgtcaacgacgacgggagcctgcgcatccgatag

SEQ ID NO: 531097 - DNA, 360 bp, Stenotrophomonas maltophilia
ttgagggctaagcgacagcaggtcatggaagacattgacgacaccatgggcctggaaggtgcggcgaggatgctgcgtctgggcctggaagcgatgaaagacctagtagacaggggcgaggtgccggccgtgcgtctgaatcagaagcacacggtcatgctgcgagaagacctgatcgacttccttcgttcggaaggtcgcaggcaagccgccgagcgaaagcggtccactattggcgcacggccggcttccaatgcgcccgacgctgggtcaacgaggcgcaaaagcagctcgcgccgcacgaaactgccggaccttcgcgcctacgagcaccccgatcaccagcgatcgcaaggttga

SEQ ID NO: 531098 - DNA, 2208 bp, Stenotrophomonas maltophilia
atgaaccaagtacaaagttcggatctaccggcagccgccactccgggcgacgacgcgccgccagtgaccttgcttggaaagcaagtggaccttcctcaaaagttcaccatgtccattcaaggcggcatgcttgaagcgctcggcatcaacatgtacacgacactcggtaagtgtttggtggagttcgtggcaaacgcatatgacgctgaatcaccttccgtggatatttcaattccagttgaagctattgaagcagctcgtacagaagtgagagatgccgcgaaggccgccgcaaaagcgcaagctgaagcggcaggagagagctataaacccaagcgaggccaagttcttctcctagccttgccagagagcattaaagtctctattcgcgacactggcaacggcatgagcccggaccaggtgcagaacgctttcctacctgttaatcgcaagcgacgactcagcaagtccggcgaagaagacaatctaaaaacggagactggcaagagattcgccatgggacgtaaaggattgggaaagctcgctggttttggcgcagctgaagttgttcgtatcgagacaaaacggaaaggacaagacttttctacaagctttgtaatgagatacgccgatcttgccaactcgccgaatctgcaagaggccgtgcttgtagcgacgtacaaccacgaccagcctgctgaggcctctttcacggaaattgaactgtccggtcttaaatgcgatgccgttcgcaacagcgttgattccatcaagaatacaatcgccgaggcattttttggcatccttccggaagacttcaccataagagttaacggcgagataattgttgccgagcaacccgagtacgatttcgtacatcccaacggaagcgacgttaaagatggttttgcgtcaacccgaattgagattgacgatcttaccgatccacttgaattcaagtactccgtgaagttccgtaagcccggtgctcatcttaccgcagccaaacgcggcgcccggatctactgcaacaatcgactggctgctggcccgacgcttctcgatctatcaaccggcatgcacaattttcatgcacaatcctatatggagtgcattgtgatcgcggatgagctggaccgtttcggtgtcgacatcattaatacaaaccgcactcatcttcgacaggatagcgaacttgtcgaaaagtttctaaagactatcacttcggcaatggaagccggaattcgtgcccattccgtttaccgagagaagaaggcgcacgaagaaattcagaaaaatgattccagccgagcattggcgaaggtagcagaacagctacccaagcgcaccaggaaaccaatacagtcgctactgcacaacctagcggcgcggttcggtgttgaaagcgacgaattcaagcatgtagccccattggtcattggcgctgccaacgcaagcgaagtactgatcaagctggttgaggtaaaggctgatcctcagtcgattgagaacgttgcttcccttctccgtgaacttgcggaaattgagaagagcgatgcgcttaagttgtatcgcgggagaaagaacggcatctgtgcgctgcagaagcttgaaatggagggcgaggaaaactggaagagcaaggcgttcgagaagaggctccacgagctattcaagactgacccgtggctcatccgccccgagttcacacggccaatcgtcagcgatcaggacttgaagaagctttcgagcaagattgctcaatacctcgaggtcgatgaattcactccgccccaggctgaggggaaagacgatcagacgagaccagatttagttttcttgatgacggattcgggggcgatgtcagtcatcactattgttgagctcaagtctccgtcgttgccgctcgaatggcagcatctagatcagctgaaagagtacatgcgcaaagttgaagaattcatccaccaggaaatgcagtcaaggcaaatgacggtccaggggatcttgatcggcgcgatgccggatccgaactccacggcactcggagccaagcgcctgcgtcacgagatgtcaaagcgtggaatcaacgaacagtgggaagtcgtcggaatccgccagctcatcgacagcgcgatgaccatccatcaagaggcaatcgatgcccttgagaaggacctcgaggcggacgacgacctgaaggactaa

SEQ ID NO: 531099 - DNA, 978 bp, Stenotrophomonas maltophilia
ttgaagatttcagctattcctaagtcgcctaaggttggtgatctcttcagtggggcgggattgtttggccatgcatttgccagcgagggtgccgagcttcggtttgctgtcgagctggacactgctgcggctgcgtcctacgcgcgcaacatcggacatcacgttcacgtggggaaggtggaggcgatgagtgcgcctggtcgagttgacgttttggtggcggggccgccttgccaaggcttcagtacgctggggcggcgtgatccaaaggatgttcggaacaagctttgcttggaaattccccgctgggcgagtgaatcctcggcgtctgtggttgtggttgagaatgtgcctcccttccttcgctctccccagtggaggacgatggccaggaaatttagggctgccgggtttgatgtaatcacttgggagctaaacgcggcagacttcggcgtacctcagctgaggactcggtcattcacaattgcctcctcgataggtatccctaagcggccggagccattggccggagttggctgtgatgtggtcttccgagacgtgaactcggaggaccctatgcatgtctggcctgaggcaactgagcttcagcgcgcccgcatgaggtacttgcccaagaagggtgattggcgtgacatctatcgacaggcacctgaactttgcccgccatcatgggcgcggctgggggcgcaggccacagatgtgtggggccggatcgatccgcgcaggccttctaacacgctgcgttgtgactttcaaaatccttcgaaaggtagatatcttcacccaacgaaaaacaggccgatttcactgcgagagggcgcgcgccttcagcaggtgcctgactcctgggtattcgaaggttcacggacagccatcgctcggcaaattgggaacgcggtgccgctaggacttgggcgagccgtcgctcgccaagtcatagcgctttttgaggcttag

SEQ ID NO: 531100 - DNA, 927 bp, Stenotrophomonas maltophilia
atggggtggatgatgttgaatgatgtgccttggccgctggtttctgtgcttatcgcgctggtggcattgtgggtcgctgtgaagaactaccagagaaagggtgggctagatatccgcggcggttatggggttacttcgagcgtcgaatgcagggattcatacgttagctcggttatgctcgagaatgccaaggatagatctgttacgatttttgaagtgtatttgcagttgggaaggtcaatttatttgagtgttattgattttggctcatctccgcttgttctgaagccgttcgagacttttagtaaggagttgggtcctattgatttatatcaatctaacctatctcgttatgatttgaatgagatgcttctcgatttcaatgtgcggaagaggttggtttgttccacgtcagatggtaagtatgtcgtcccatccaatattcggatgtgggctcccagttcgttttcaaatgtcctgactggtgtcattcagcctttgcggtcggagtacaagggtgtaatggtgggaagcaacgttgactacattgttgaaatggccaaggggaagagtgatcccgaactggtgcttcttagaagtgaatcgtatagggttagagttttcgactcatttatgctgacccctgcatctcttgaatcgcgtgattcgttggtggcatttcttaatgagaggcgagacgagggcgaatttgctgtcgctgaatttgacgttgttgacgtcaagacgtggagggcgaagcgttacgctcaatacgattatttctccggggagatccgtgttcttagggatcattcattttggggttaccatgttgtcggacgctgggtggcctatcaggagcggcgcgcagagcgtgcatattccgagggattctcttcaagggttcagcaagtgaagagggactga

SEQ ID NO: 531101 - DNA, 132 bp, Stenotrophomonas maltophilia
atgcccaagcccatcatttcctggccgggcggcaagcgccgcctactgagacacctctatccgcacttcccaatacacgactgttacgtcgaggcgtttgccagcggtatgtcctttaatggcatgtactag

SEQ ID NO: 531102 - DNA, 1080 bp, Stenotrophomonas maltophilia
gtggatggcgaagcgcgcacccatgacgcagcgggcaacaccaccagcatcggcagcaaggcgttcacctacaacgatgccaaccgcatgaacgcggtgaagcagggcgatgccgtgctggaaagctacggttacaaccatcgcggcgagcgcgtgctgcgtactccagccggtggcgcagctcagatcacgctgtacgatgaggccgggcagtggctgggcaactactcggccacggggcaggcgcaacagcaggccatctggctggataactacccggtggcgctgatcaacgtgccgggcaccggcgtggcggaacttgcctacgtccaaccagatcatctgggcacaccgcgcgtggtgatcgatccggtacggaatgtcgcgatctgggagtggagcaacaagagcgaggtgttcggcaaccagattccgagtgccgacccggatggggatggtgtggcgctcgagctggcgctgcgattcccgggccagcaggccacggatgcgagtgggttgttctacaactaccagcgggaatacgatccggcggtggggcggtattcgcagagtgatccgatcggtttgagaggcggagcttcaatctacgcgtacacaggaaatgatccgttagactttgtcgatccattaggacttctccgctatcactcgtgggtcagcaagaagtaccccgcgacgacggaattcttgaatggaacgaaagatcgaatgaccagtcgcaaatatgatggattccagcgatacggaaacatcggacaggggcatcttgatcagcttctatcgaaatgcgatgggccagtcattacgccaaaatacatgaggcatgacgatggtagttacgcgcctggctcgggtgagatatttattcatgagacctattttgaccgcttcgaatcgggtggccgaagcccagaactcctgcagaagctggaaagaacactggagcacgagttggttcacttctcggagtatttctggaacaaaaatcagtacaagggcgaggagggttggagctatgaagagtacgtctatgggatcagaaggcctgcttcacactaa

SEQ ID NO: 531103 - DNA, 210 bp, Stenotrophomonas maltophilia
atgtgcattgatggcggcgcgcgacaggaacatagagggccgaacaagggcttctcgattctccggccccagctcaaggtgatcttctcgggattcatgccagggtgctcactgttcaagccgtgggtgctcttcaaccatctgttccttgatgctggcaccacgggtggtaagaggggaaaggtcgtgcgcgccttctgctataagtag

SEQ ID NO: 531104 - DNA, 165 bp, Stenotrophomonas maltophilia
atgaggttgccggccagcggccggcactacctgttgcagggcgtgcggatgctggcgctggagatctgggccgcgcagctgtttgggtggatgcggcaggcggtgccccgcgtggtagtgccggccgctggccggcagctgcaggttcctgcagaaggttcatga

SEQ ID NO: 531105 - DNA, 1932 bp, Stenotrophomonas maltophilia
atggaagttgcgtgggtaggggatacagatcagcgccgagttgcttgggctgattctgaagcgcgaatgatcgtgatggcaggtcccggaacgggaaagactgaggtttctgcccagcgcttgattcatctactgcggtctggcctccaacctgcacagatacttgtgctttcattctccaatagtgctgtccgcacgttgacgcgtcggctggagaagcaggtcgataccgatgctagcgtactggaggatttgagatacttggcgatccgaacgttcgactcatggacgttccggatgctccgcttggccggaagaagcacgccggagctaatggggcgggagtacgatcagaacatcgaggcgcttgtcgatctgatcaatagcaatgaagcagaggctattcgtggccaacttaagcaagttcgccacgtcatcgtcgatgagttccaagacttggccggtgtccgtggagccttggtagcttgtcttcttgaggccctttgcgagaacccgtcgatcggcttcaccgttttgggcgacgacgctcaggccatttatggcttctcggtaaaaagagctggtgtggatgcgcggtactctcatgtttccaccgcctggctgctctccgaactgcggaggcagcaccctagtgtggaacaggtcgtcttggaccgaaactacaggtccaccagcgagctggccgcgaacgcgcagaagctgcgaacggtagtcagaggtgccgggagtgggagggacaaggcagaaaagttagcaaggtttgtcgatgacctgcctgagctaacgggtgcgctgggctacgccttattagatgagatgggcgaaggcactgttgccatcctcacacgcactaatggagaggcgttgcagattgcccagaagctgggcggtactggcgagcaggctgacgtcaaggtccggttggggtctggtgcaaagcagcgctccgcgccggggtggataggtgcgctgcttggaaggataaaaacggagtcggttgctcgatcgcacttgtcgaggatctatcggcatgtgactggcagcgaagcaggacaagctcgcgcactggctctctgtatgccgactgaggacgtggcatggaagcgactcctccatgcttctggtagcgcaacaggatcaaccagctttgatttgaaggagctccggaaccgtatgccttggccggacgcatttccagacgacgaaggtgtctcagaccctacggttagggtgctgacggtgcaccaatcgaaaggaatggagttcgattcggttgggctgttcaatgccagcgcaccgattgatgatgcagaagaagcggctctcgaggccgcaagtctctcattcgtcgccattacgcgagctggccacaagctggtgcggttgccaaaaaaatcggtctatcccctttaccaatggcgagatggtcggggtaacagccgttggaacagtatccagaaatctcgactcaatgtggagatcggacagccaaaagatctcgaggccctcagttttgtggacaccacgctccacggaggagaagatcaggtgatagatcttcaaaatttccttgcggaaaattcggcagaactacaaggaaggaaagtcatgctctgcaagcgtccaatagtcgcgggatcaaagtgccaagtgtatggaatccatattcaggagggtgctgaggcaggtcgccttctcggcacaaccacgaatagtctgacgtttgatctgctgcgaattatagggaaaggccgtcgattgcctagagctcttttcaatctccgtatagcggatgtggtcaccgtgctcagagatggggatccgagagaaggaatatctaaggagttcagcataagtggcatgtggttgggtatccagttacacggcgttgcttttggtcccaatatctga

SEQ ID NO: 531106 - DNA, 3246 bp, Stenotrophomonas maltophilia
atgtcaaaagtagctgcccgagataatctaacggaactcatggtgtcggtcctgcatggtccgtacgctgctgatgagttgctaaaatcgaatccttcagatacctatctgactggcgttctgtggccgaaagactcaacactagattcgctggaggatgatggggagggcgatccgctctcggatggatctttgggggcggctgagttcacgatcccaggttatcgcgcaattcgtccttgctccatcggaattacctgcattattgagagcggcgcctcgattgaagtctccttggcaggcactgcgcgctacaaggcagaggtcgtccacggccgggaagaagagtttcgcccgatcgaggaaggtagtccgcatcagagctatgaatggaggcgaagcccactggactaccgcatcaagatacttgacagtgaatctaggtcccattggaggacaagcaatttcctaagtgacagtggtcaagctgtctccgaccctggattagctatcgacataaagcgaagagtcggcgatggagtgatcgtactgaccgtaacgctcattaatctgcaagtgcgacctgaagagtgggccctgtccgacgttggcaacgtcttccaagcaaagatatcgattcatgcccatgtcgatggagcccccgccatcattgccagacggagcttgccagtccctaccgatgaggatcagcttgtcaatgcgctgctctatcgcgacgttgaagagtacgcggttgggcatggagtttccgcgcactggcccgatgaactctccggaaagatgccttgggtggcgacgtcgtggttgccggttgtctccgtgaagggaatggatcccaagggacacgcgcgattgaaaccgctacaaacgagcagcgagaaccctttctctgcagctacgttggcttctggcacgcaatctgaatgctgcagcatgttggataagtttgtcgaactatacgcggtctggatccatgaagagcttcaggctaggaaaaacactttcactgactctctgcttcgtgcggcggagcttaacctcacgcgatgcgaactgacgctgtctaggcttcgcagaggagtggcaatactccgaaagtccgatgaggcatggcgtgcattcgcactcgcaaacagtgcaatggacattcaagcacgcttcccgtcgaaaggagatcgggctgggcctttggtctggcgtccgttccagctcgcctttctacttctcgttgtcccgtcgctggtcagtcctgaagaagatgctgaggcaaggcgttgcatggatctgctttggttccccacgggtggtggtaagacagaggcttacctggcgctgacggcttttcagatcttctatcgtcgattgacaagcgcaccgcggagagctgagggcggtgtggacgttctcatgcgatacacgatgcgacttctgacaattcagcaattccagcgcgctacagctctcatcgtggcttgcgagcagttgcgcttgactgattcagtatccttaggcaatgcgcggatctcgattggcctatatgccggtggagacgcgacgccgaaccggataggggacgcacaagcgcgactggctgatgagcagctcggcgcagagcccgcctcgacgccgcggcagctactcgaatgccctgtatgtggtgcgaagctgtcatcccatgcctatacggttaatgcagagaagctacagatggccatcgtctgcgcggcaccgtcatgccttctgggcggaaaggcgctgcccgtaatgacggtcgacgatgtcatctacgcggagcccccgtccctactggtgggcgtcgtagataagtttgcgcagctcccgcgacgcggagatatccggaagctatttggactcgattccgagctgcgtcctggcctgattgtccaagacgagttgcacctaatctcagggcccttagggtcaatgtcaggactttacgaagccgctattgatcgattgtgcacagtagatggcattcctccgaagatcattggttcgaccgctaccattggccgtgcggctgaacaggtcagggcgctatttgatcgggacgttctccagtttccaccacctggctttgactctaaggactcattctttgcgatcagggacgatcaggggcctgaccgcagatatataggtttggcatccgccggacgcagtccaaaatttgcgcttcaggcagtgttggcggcggttagccagatcgcggcgacgctgcgggaaagtgggagcgtgactgaagctgatgtagatccactctggacttgtgttgcgtacttcaacagtttgagagagctcggcggcgcccacgtgctcgtgatggacgacgttccccggcagatgcagttcattgccacaatgttgggctctagtgctcgcgtatatgaagactatgcaaaggagctgagcggccgagcatcgactcgtgagattccccaacgtcttatagaacttgggcagtcactcggtggaagtgatccgttcgctccaatgcctgtagatatggttctcgctagcaacatgatatccgtgggtgttgacgtccctcgccttggactaatggtggtaaatgggcagccaaaatcaacggcggagtacattcaggcttcgagtcgcgtggggcgaggtctgcctggcctcgtagtcacgctctacaattttggcagaccgcgcgatctatcccattttgagcacttcagcagctatcacgccgctctttacaggtctgtggaggccacgagtgtcactccatgggctgcacgggctagagacaaggcactgcatgccgtattcattgcgttagtacgtaatcttgttactgggctcctaggtgatagggatgcggccaattttgaccccaatcatccaatcgtgaaagaggttgcccaatttcttcttaggcgcgccgacgctgctacgcgaggcttagagtccgttgatgctaggcatgacctgacggaaatcatcgatggttggcacaggcgcggcacagaagcgaaggctgcgggtgggaagcttaactattgggagaaggcgacgccgttcggtaagcccgcgccggcgctaatgtactccgcagaaggcggcctaagaagaagtggtgcgtcttggccgacgcccaattcaatgagggaggtggagccttcatccgcgttcatttggaaacaaattagcaagaaggaggcacttgccgatgaatag

SEQ ID NO: 531107 - DNA, 1860 bp, Stenotrophomonas maltophilia
atgaatagtcgattcagcaaaaagcccggtgcggatagcgcgcccgcaatcaaggctgtaggtaaggtgcgacgatcgcaggtgatctcgacatacggaatcggggcgattgtcgacctcgaggctggttcattcatgggaatggggctcgacgattggagcggagcgggtcgcgccggttcgctcatcaccgagtcaaggttgcagttgcagcttggtgtcgatcatttcaggctcccacctgttgcaactgatgtcatgggcgaagctggaatggttgatgcccgtgcgaccctgcctgccatcagatttcccgaatggcaagaatgtccccgatgccaccgcttgggtcgacttcagcagccattcgagcaggcagctgatggcagtcgaattatatgtcgtggatgtgggccaaaggctttcgttaaccctgtccgtttcgtggttgcgtgcaggcgcgggcatattgaagagtttccctgggaatggtgggtccacggcaagcaggtctgtagcggcaacccacgcctattcttgcgttcgcacggaaagtcctcttcgcttggagatctatttgttcagtgcgatacgtgcaagcagacgaggtcaatggcggatgcgtatggggaggctggcatgcagggccggaagtgcaatggcaccaggccttggttgtatgatcgagtcaagggctgcgaagctcccccgcgagttattcagcgtggtgcttccaatgtttactttccagtaatcgcgtcctctatatcaattccgccagcatcagaggctgcctttcaagtcatcgaagaaaattgggtgactctgaaggctattccagaatcagccatggaggcagttttggctggcgtctcggaggcatatggcatagatcttccaggtctcctgcgtgcgcttgagagtaagcgatccttcggtcagaccagatcccagtacaccgatctaatgggtcgatacgaggagtatgtcgcgttatgtgagactcggcacgatgacaccgagggcggtttcgtcccccaattcagaaatacagtctccgatgttccggaccgcatctccggatggttcgatctagtgggggcagtatcgcggctgcgggaggtccgtgcactggcagcatttgcgcgtatagaacctcaccccgtaagtacagagcagatcgcatcagcgatctcagaaggttatgtctcgcctctttccaagcgatcagtcaattggcttcccgctgcggaaattcgaggcgaaggaatatttctacgattcagagcggaagctattgacagttggattcagcaaaatgcagagatgcagcggcgtgcggacatccttgaagaacaatcagcacggctcgccttcgaacggggctacacacgtgattacaagataactcctaggttgctgttggttcactccttctctcacgcgttgatccggcagctctccatggactgtggatactcgtcatcagcacttcgagaacgcttgtacgtgtctgattcagtgccaggtggaggtgtgatgaatggcgttctcatatatacaggatcacccgattctgaggggagccttggcggattggtgcgcaatgcatccccaaagcttctagaaggggcggttcttagggttgttgaatcaactgcttggtgcggcagcgatcctgtttgtttggaaacagaccctcgccaagcgggcgagcgcattagtggtgcagcttgtcactgctgtttgctcgtgccggagacagcatgtgagaaattcaatagggaactggacagaaccttcctcgtcggagattctgaacggctctggcgcggcttcttcgaagaggaggcgatttag

SEQ ID NO: 531108 - DNA, 1746 bp, Stenotrophomonas maltophilia
ttggccacgttgataccagatactcctaaggattgcactaatagtgagcgcgtccttttcgaacgctttgagcgagatcttcgggatcatccaagctgggtagtctttcattctttgggattggcggatcatcagaagaagatctggggcgaggtcgatttcgtagtactttcgaataagggaattttcgtaattgaagttaagggaggagccgtagtctgtaaggacggaaaatggacttatggaagtggagcacgcgcatacaccaagacggagggtccgtgggcgcaagctggcggtgggatgttcgctctgcaagctcgcctagacaaagaagatccccgattagggcgcctgctcatgggtttcggtgttgtaatgccccgtgaaacattcatggccacgggtccggaaattgagcagggaacactgcttgaccaaaggcagttcaacctcaacttagggttctatatcggccgcttgcagcgtcactgggaagacctttataagaaacggcacggcaagatcccgcctagtccaacggatgatgacatccgtaggattcgtattctcctaaggccagacgtggagagctcgatcagcctcgggagtgatctcaacggattgaatagcgagctgattcagttgacgaatcgccagataagagtggctagaaggatgtcggcaaatccgcgatccatcgtccgaggtcgtgcggggactggcaagacgattcttgcgcttgatcgagctaggcaatctgcatcgaaaggaaaaagtgttctgtatctctgcttcaataagctcttggcatcgcacgtaaaatcaaatcttgcattggagagagtgtcttcgatctcagtgaggcacatacattcgctctatcgggaggtcatcgataaagcagggtatgccgacaagctaagccaagctggaatgcgggagcatgatttcttcgggaaattgatgccgtctttatttgttgatgcagcaattgaagtcgacttcgatccatttgacgtggtaattgtggatgaagctcaggatctaatgacgtcagagcaccttgatgcgatagatattatcgtcaaggatggactgaatcgagggagctggcacttatttgtagatccacttcagaacatctatggcggtgacgctgatgccgtgggcgtgcgcttggaaggcgtgggaatagtatatgacgacctatttgaaaactgtaggaatactcggcaagttgcacagcaaacgtctattgtgtccggggtcgatatggcaattgagggcgcgattgacggtgtctcttgcgagtgcaggttctctcagaaccgtgaggcgtcagttcaagtgctggttcgcgaggtggagggcttgcttagtaaaggtgttgatcctgcagatatcattatcctgtccacaaggcgaagggaaaattctttaattgctgagctggatcggattggtgggttacccattgtggatctgacaaattccaacgcgaggcctgggctgcagttctctacgatgcatgcattcaagggtctagagcgcaatatagttgtggccatcgatatcgatcaagtgggtagcgaggaagtggcgatgcttcactacgcgggcctctctcgagcgagggtgctcttaattccgataatgtgtgcgtctgagaggcctgggtatgaacaacaagcgtctgcattcggtcgccggctggcgttgtgtaagacgccgtccttgtcatga

SEQ ID NO: 531109 - DNA, 1575 bp, Stenotrophomonas maltophilia
atgacatcctggcgccatcagaggggcgcagctgcgctcctacttacaattgcgaaacaaggtatgcacatcccagtcgtcgatatcttcgcagggcccggtgggcttggcgaaggcttctctgcctacaccccactccgctccccaaagtcgcgcccgttcaggatagccatttcagccgagatggagaccaacgccgcgaagacgctgcgtctgcgcgccttctatcgccagttttcacccgagaaagttccagaaagctactacgactatgtggcgggacggatagccctcccatggacagagaaaacaaagggtgcgtgggatcgcgcaggccatgaggcgaagcagctgaaacttggcgacccaaaggacgacgaggttctgcatgaacacattcgcagagttgcctcgcaagatgatccttgggtcctcatcggcggaccgccatgccaagcgtactctttggttggtcgagccagaaatcggggtgtaaccggctataaggctgaagaggaccctcgtcactttctctataagcactacttgaagattctcaggaagtacgcaccagctgcttttgtgatggagaacgtcaagggcatcctttcctccaaagttggtggagagctgatgttccctcgcatcctatcggacctgcgcgctccaggcggccgtaccggaccgcgctatcgaattattccgctggttgaggatcagaccgaccttttcgacggggacgacggccgacattatattttgaaggcggaggaactcggtgttccacaagcacgacatcgtgtggttctattcggagtcagagaggacatcgacatttcctcgattcgccagataaagcgtgcgacgactaagtacagcgtgggtgacgtcattggcgaaatgccacacctcagaagtgggatcaccaatgtggaagttgacagctggcctgatgctgccaaggaaattctgctgcgagcggctgcgctcacagaggatttgcgcgtggccgcggaactacgtgcgcagtcaaagctggtacctgcatcagacgccggcgccggtggtcgagctagaccgtggactaccggaatgaacagcgttcccgagcaccttaaatcttggctcttggacgatcggctaggtcacatcctaaatcatgaggttcggccccatatgtggatggatctagtacgctacggatacgcgtctgcgtttacgaaggttcacggtagatcgcctcgcggttcgggcgagttccctgaaggcatgcatccagatcatgagaactggacaagcggaaaatttgtcgaccgcttcaaggtgcaacgacgagatgagtcaagctccacagtgactagtcaccttcagaaggatggccactacttcatccaccctgatccttcgcaacttagaagtatctccgtcagggaggctgcgcgactccagaccttcccggacaactacttctttgaaggtccacgtggggcacagtttcgtcaagttggcaatgccgtcccgccgtggatggcacgacagattgccgacgttgtttactcgacgctggtgccgtag

SEQ ID NO: 531110 - DNA, 363 bp, Stenotrophomonas maltophilia
atgaggcctgtgatctatggtgccgccctgctggcggcgctgtctgcgacgatcgccagctgtcatgaacccaaagctggctttgaactgcggacgtttccgaaggtgtccgacgctgagtattctgtcatgcgcgaggaggcggttcgacttgcgcgtgggggcgtggtgcaggaagcacggcatccgagtgataggtacttcgtggttatttgtcgtggcgtacccgcgatgctggtggacaactcgttggagcagcttttgattgtgctgtatgccggcagggatattgatgctccatgcgttgagtcgctgatgtcgcattggagttggcggattgtgaccgaacgagcgcgcgtatag

SEQ ID NO: 531111 - DNA, 435 bp, Stenotrophomonas maltophilia; identical to SEQ ID NO: 503996

SEQ ID NO: 531112 - DNA, 660 bp, Stenotrophomonas maltophilia
atggccgtggccctgcgcatccttccacagcaccacgatgcggtcgtcgtagacaccacgtcctcgcgcctcggtggtgcggttctcgtcgcgcagccccagcaccacgcgatcctgcgtggccatcgcatcgttcgccgcggcgttgccgcgctgggccacgatgctgccatacacgtcgtactgctgggcctggctcaggccagcagtctccgcggcgtcgggcatgcgcggtgggcgcgtcgcgtcgctcaggcgatccagcatcgggttgaccgtggccgcgtcggtggcggatacgccaccgctccgtcgcagcgcctcaagctcggtggcgccccgcgccgcgatgtagcgatccagcgattcctgcaccaccgcacgctggccgttgtgcagggccgccaggcgggcggccgcgccacgggcatcgttctgccgcaacagggcgacgacttcatcggccgctgcgctgatatccatctccggcatgatctttccctgaacgcgatcggtatgggagtccagcctacccccaccgcaccggcgcagccgttgacacacgccacacacctgcgcgaagccccgttcagcagacgccacgccgtagtgctgttcaccctcgtggcccgcccatcaccggcaggatcaccccgctga

SEQ ID NO: 531113 - DNA, 342 bp, Stenotrophomonas maltophilia
gtgctcggtggtgactggcattccaccttcgtcaacgacctgaagctggatttcgacgcggccagcgcgccggtcgtcgccaccgaattcatcgctccggcgatcagcagcggcggcgacgatacgccttatggcccgtactacggttcgtcgattccgcagaacccgcatatccgctatttcgacggtgaccgccgtggttggtggaagctgcagctgaaccggcagaccgtggatgcggagctgcgcttcgccgacagcgtgctgcacgcggatgcgccggtgcgcactgcggcgcgcttccaggtcacccacggccgcccgggcgcagtgccggtgtga

SEQ ID NO: 531114 - DNA, 210 bp, Stenotrophomonas maltophilia
atgttggctacccgctacgctcagggtgacggagtcactactgaggtcgaggcccgccttcagattttgagtgcgcagctggaaaagctttcgccacgcgtttccgctagccaggtggagcagctggaacgtgttgcaaaggaggcggagatgatcgcgtccaggcgcgaggagcgcgcggcacgtctggcagccttgcttgggcgatga

SEQ ID NO: 531115 - DNA, 906 bp, Stenotrophomonas maltophilia
atggccttcacccacagcagctcggacttcccgcagctgctgggagacgcttcgcgccgggcgctgctgcagggctaccaggaagtggaagaaaccttcgaccagtacacccgcccggtgaatgtgagcgacttcaagccgaccaacctggtgggtctgggcgccttctctgatctggatgtcgtcccggaaggcggagagtacaagcagggttcgttctccgagcagtcgcaggccatgaagatcgtgacctacggcaagctgttcaccatcacccgccaggccatcatcaacgacgaactgggcgtgtttggcgacgtgccgcgcaagatgggccaggcggcacgccgtacgctcgccaaggccgtgttcgatctgatcaacagcaacccgatcctggctgacggcaagcgcctgttccatgccgaccacaagaacctgctcccggctgcactgatcagcaccgccagcgtcagcgcgatgcaggctgccatgcgcctgcagaaggatgcggacggcaatctcatccaagtgccgatgcgcggcctgctgacgccggtggcgctgagtggcctggcaagaaccgtgcgcaccgcccagttcgccgtgggcgcgggcgttggcagcaacgaccccaacatcgtgcgcgagaccttcgaagtctgggatgacggccgtctggacgccaaggatgcacaggcctggtacggcatctccaaccccgcctacgtggatgggatcgtggtgggctacctcgacggcaaccagacaccgtacctggaacagcaccagggcttcaccgtcgatggcgtggcttggaaggtgcgcctggatgcggcgccggcgattgccgatttccgcggcatctacaagaaccccggtaatccggcacccgctcagggctga

SEQ ID NO: 531116 - DNA, 231 bp, Stenotrophomonas maltophilia
atgtctcaaactgctgctgactcgtcccacctgaagctcggcgagaagccgattcagtgcacctaccattatggaaaccatgatccgaagccgggcatcttccatcagttcgtggacgccgttgatacagacgaaggcaacaacaagtttgccgtaacctatgctctcgtcgaagatctcgacggtggacttcaccaagtggagcctcagttcgtgaagatcaaacgctga

SEQ ID NO: 531117 - DNA, 3528 bp, Stenotrophomonas maltophilia
gtggtgtatctgcgggcggcaatgctgctgctgatcctcctgtgcggcctgtcacccgctgccgcgcagccggtgccaccgagcccgcgccaggtgacggtattcgacggcctgccgtccaataccgtcaaccgcatggccgaagaccgctatggctacctgtggatcgccaccaacgacggcctggcccgttacgacgggcgcaactaccggatctggcgttctgaggatggcctgcgcgacaaccgcatctggacggtcctggtcgatgcgcgcaaccagctctggatcgggaccgagaacgcgggcctggtacggatgtcggccgaccgccgccagctgcatttctacgaccgcagcagccagcctttgatggggaccaacacggtctggagcctggcgaccacgccggacggtgcgatctggttcggcacccacgaaggtgggctgtaccggctggacagccaggaccgcctgcagcgtttcctgcccgaggccaacaatccccgcagcctgcctgccgcctcggtgccgtacctggctacgctggccgatggcagcctgtgggtcggcaccaagcatggcgtggcgcgctggaccggcaccgacttcgagcgggtcggcaccgacgtcattcccagcctgctgatcaatgggttgaccagcgaacccgatggcagcctgtggatcagtacgatggccggcgccacggtgcgtcgccccgacgggcgttttgaatcgccgccctggaaactgccgctgggcgagcaggtgctcggcatgatgctgcgcgatgaacagggcgggcattggttggatacccgtaccgggcttggtcgggccgtggatgggcagtaccagaccgttccgctgtacagcgccgttgcgcgcgggccggtgcggccgaactggacgggcgcctacgaggaccgcgaaggcggcatctggttggccagtaccaatgccggcctgtggcatctgctgccgcgctggtggcagttctcggtgctgtcgcgattggaggacgacaccggttctctgcgcaatgccttcgtgctcggcaccagcccttccagcaatggcggcatctggacggtcggcagccacggtgcgctggaccggttcgatcccaggacgggcaagatcgagcagcaccgcacctgggtcaatggcatgtactggttgtcctcggtacgcgaggatcgccgtggccaggtctggatcggctcgaccgatgcgttgctgcgctatgacccgaagcgacgtgagctacgtcgctggggccgtgatgccggggccgacgcgaccatggaaggggtcatcgagtcgatgatgacctgtgacggcgacagtctatggttgatgttgcctgcaggcctgcagcagcgtgacctcgacggtcgcctgcgccgccagctggaaaacggccagcgcggcctgcagcagggccagctcaacctggatgtggaatgcgggccgcaggaccacatctggctggccagtagccgtggcctgctgcagtggctgccggaaagcgagcgcttccagccggtgccgggcgcgccggcgaccgcgatccatgcgttgcacgtgggccgcgatggccaggtctggctgtcggaggatggccgcctgtcgcgctaccgctggagccagggccggcttgaacggcaggccgtggtcggcgcggagcagggctacccggcgatctccgcttccgggctggtggtcgacgcacagggggtggcctgggccaccagtgcgcgcggcctggtccgggttggcgccgacgggcagagcgtgcgcctgtacggcgtccacgacggcctgcccagccaggagttccgcgagcacacgttgacgatgtccggcgatggccatctggtggccggtaccccggccggcgtggtggtgttcgacccggaacaggtgcggccgtcggtgcggcgggcgccgttggtgatcgaacgggtcgaagttcgccgcaacgagcaggtactcgacctgacccatgacacgcccttgcagatcgccgatggtgaccgtgacctgcgcatcgtcgcgcgactgttgtcgttcgccgattcggcctccaacagctaccgctaccgcctggccggctacgaccccgattgggtggaagtggggccggccggtgagcgcctgttctcgcgcctgccgccgggcagctaccgcctggaggtacaggcgcgctcggccgaccatgtctggtcgcgggtgcagagcctggaattccgtgtacagccaccgtggtggcgcagcctgtccgggctgctggtgctggcctcgatcgcgcttctgctgaccagttggtttgcctggttgtatcgccgtcgcctgcagcggcgccatgcctatcagctggcactgcataaacaggaactggccgaacaggcctcggcggccaagacccgcttcctggccaatctcggccacgaaatccgcacgccgatgaccggtgtgctcggcatgagcgaactgctgctggcctcgccgctggacccgcagcagcgcggctacacgcagtcgatccggcacgccggcgaacacctgcttcacctggtcaacgatgcactggacctggcacggatcgaatccggacggctggaactgcagtccaagccgttcgcgctgagctgcctgctgcaggacctggccgcgctgatgggacctctggcagcgcagaagggtctgcgcttcaccctcgacaaccagttgccgccgggcctgcaggcgaccggcgatgcgatgcgggtaaggcagatcctgctcaacctgctctccaacgcggtcaagttcaccagccgtggaaccatcaccctgcatgcgcgcagcgacggcgagctgcgcgcgttgcatttcgaagtgcgcgacaccgggccgggcatcagccaggaacagcagcagcgcctgttccgccgcttcgagcaggccgatggcgcccgcaccgcggcgcagtacggcggcagcggcctgggcctggcgatctgccgcgaactggcgcaggcgatgcaggggcgtatccaggtcgagagccagctcggccgcggcacgtgttttggcgtgaccctgccgttgccgctggtggtcgatgccaatgcagagtccgagggcgaagtgcaccgcgaggatgcggccaacatgccgccattgcgcgtgctgctggtcgaggatgatgcaaccgtggctgatgtggtgcgcgggctgttgagtgcgcgcggccatgaagtggtgcatgcgggccatgcgctggcggcactgcgcgagatcagcgcaggggatttcgacgtcggtctgctggatctggacctgccgggcctgagcggcttcgagctggcccagcacctgcgcaaccagggctacatgctgccactgctcgccgtgacggcacggaccgatccggaccttcagcagcaggtggaagcggccggcatcggtgatttcctgcgcaagccggtaaccggtgagctgctggtggaagcgatcgccagggtcatgggcaggtag

SEQ ID NO: 531118 - DNA, 1248 bp, Stenotrophomonas maltophilia
gtgaactgggcgctggacgctctcgggctcgacgccggcgccgacgaacgggcgatcaagcgcgcctatgcgcagagactgcgcgcggcacgcccggacgaagacccggtggcattccaggcgttgcacgaggcttaccaggaggccctgcagtgggtacgcaaccgcgcgcaatggcaggaggagagcagtgcagaagcgctgacgagcacggctgcagacaacagcccgccggacccaccggcgccgtacgacagccattcgccgatggaccacatgtcggtgctgcatcatccaagcacgctcgacaccgacatgccggacgatgtggtggagccgtcattgaacctgccccggtttgcgcgccggctgatcaacaccgccggcgacgccgacccggccagcttcgagcactggctggccgggcgtccggagctgtggtcattggccgacaggccacgaatcggcgacgtggtgctgcagcagctgctgcaacagggcggcccgctgtgcgagtccaatttcgatctgctcagccggtatttctactgggatgagatccgggctgatatcgatccctaccgggtgggtgcgcgacgcagccagctgcatcgccactggctgctgcagccgcgcaaccacgcggccctcaccgcagcactggatcttccgcaggaccgcgtgtccgcacaggaagcccatgcccgcatggaacgcttgacccgaccgtggcactggctggaatcgatattgtcggcctgcgtgcccgggcgcgcaggcaccatgcggcgcacgatgcagcatctgggggtacacaccgtccgcgacacgctggcgccactggacgcagatcagatcgccttctggatggcgatatcgcagcccaggcgcttcaacatcccgaagttgcaggtcgcgattgtccgctgcctgctgggcgcactcatcgtactggcggttttggcgatcctggcactgctgggtgaggccgcgcggccacttgcgatcagcacgtccggcatgaagcgtgtggcgatccgtgcctcggtggtcattacgctcggcatcctcatgctggcgtccttcgtgggatgggttccatcacggacggcgtccgtgccagcacccgccggagcgccgtcgccgctcgatggacccggcatgctcacacactggcctcgcccgcgcaggccaatcccctccttcgccgtcgtgaagcggatggcccttggcacagacggtggttga

SEQ ID NO: 531119 - DNA, 1458 bp, Stenotrophomonas maltophilia
atgagctgggcacttcacgtcctggagctggacgacaccgctgacgagcgtgcgatcaagcgcgcctatgctaagcgcctgcgggtgacccgccccgacgaggatcccgtcgccttccagcacctgcatgaggcctatcagacggcattggactgggtccgccaggaaccggtggcggataccgcggacgaggccgaaccggcggagcatgcagccgatgtcgcaccctggccgcacgacgccgacgtggcatgggcgccacccgaaacgcgttcgtactcacctccattgccaccccgcggcacgccagtgctgctgcgcacggcaccggtggtggagctggagggggtggtcgatgtaccaagccacgcgcagtcgatcctgcgccaggcctacctgttgcccgtcgacgacttcggcccctggctggaggccacgccggtgctgtggtcgctgcgctacaagccattggtgggcgacgcgctgctggatgaactggcacgcagtcccaacggcatcagcgccgccaacatggatctgctggcacgttgtttcggctgggatgatgttcacgacggcctcgatgcggacaggctgatatcgatccgatcgcgcggtcatcgacgctgggccgccgagaccggcaatgcggcagagctgtcagcgcagcttgaacaagagggcagcctgcggctggggaagatcaccgtcagccgctgcctgtgctacctgtcgcagccatggaacctgtggcgatccctctggcaggcgcagctgcccgagcacatcaatgaagtcaacgcgctgctggatgccatcgagtcggggggaagggagcaggtgcccgaggcatgggatccgcagcagatcgtgttctggcgaagtcttgccgacgtctcccggcccaaccggtggcgctggcaggtgaacgcgctgcgtggcgtgctgctgggcgtctgcagcctgttgttctttggtggaatcgcaggtgtctcgttggtccagggaaaggcgggcgataccgcgatgttcgtccagctgggggcgctcttgggcctgctgctggcggtgatgggagtactgtgggtgcctgttcgctgggcgctgcgccaacttacgcttgacctcattcatcagcgtgcagggctgctgctggccctaccggcgccgttgatggcaatcggcagcctggttcttgtccatggcctgggccaccgcatggaaggtacgctgctgatcttcatggcactgcccttggcgactgcacgcctgtggcgacgcgtcggtgcccggatgcggttcggagtccgccacgccgtgttcatggtgcttgccatgctgatcgccgaagcaggcatcgttctgaccctgctgcagtggggtgccgagttcgtgcatcgcgcgcgtcgtcacgcgccgattgaccggctcccgccggcctctggaaacactgcgtga

SEQ ID NO: 531120 - DNA, 1122 bp, Stenotrophomonas maltophilia
atgcgctggccgtcgcttcttccagcactgctgctgttcgccgcactacctgcttccgccgacgcgctgcactgcggcgagtaccgcagtgtcgatgacggcatggcactggtgttcaccacccacagcagcggctaccgccacaacggcatcggtgagccgcagccgctgtgggtcgatcgcagtgcggcacagacccgcctggtcatgctcgacgatggcgtggcggagccgatccggatcagcgccgatgggcggcgcatcgaggacgacgtgctcatggtctacaccctgcgccagccccgggcctgcgctttcgagcccagcactgtggccggcagctgccgcgctgctggcagctactgcatggtgcagctgccaacggcctcacccggccaggcccggcgcgcctgcgacgagggcgtgggtgcgggttgctcggcactgctgcagcaaaggctcgaaagcaactccgcggcagcgaccgatggcgccggcaccgcgcgcttcgagcgcccgccggcctgccgcgagcacacccccacccacgatccgcaggcctgcgaagcgctggccgacgctgatctggccgccgccatgcgacgggttgatcagcgcctggaacgtgccgagaaggcaccggagggaccgccgttacccctggcagcactgcaacagctgcagcgactgtgcctgcagcaccgcggtggccgcttctgtgtcgaagtggccgaacagcaattgaaagcactgcaacccgcgctggcggtacaggcgctgcaggtggcctgcgacgcaggccgcgccagcgcctgcgaacgtaccgcgccattgcgtgaactcggtgccgatctacgcctggtcccgctccagcagctgccgtgtggccgctaccaggccgagggtggccaggtcgacatgctcgacttcggtgatggcacgcggggccgcctgcaggaaggtgcggtccagctgcagcagaacggcgaaacccatgtcctgcgccagctcggcaatggcgacctgctcggcatggattcgcagaccggttaccagcgctaccagcgcgttccagacgcggcacaatgcgtgaccgcgcgcgagggccgtggttcgccgtag

SEQ ID NO: 531121 - DNA, 777 bp, Stenotrophomonas maltophilia
atgctgacattgacacttctcctgctgctttcatgcggcgcgctggtcctgaaacgacgcctgcgcagtgccgctctcctggcgacgcttccgctggccattgcagccagcgccagcacgcccatcacgcaatggctgctggaccgtgcgcaggacacgccgcttgtcactgaacatgcgctccatccgcgcactgtgatcgtagtgctgggtgctggcatcgatcacgatgcccgtggccccaggcccgggctggccggttatagccgcctgatgagggctgcacagcgttaccacgaatgcgaccgcacgggggaagtctgtaccgtgcttgccagcggaggcgtcactgccacgggcgatgccgctgaggccgatgtctacgcaagggaactgattgccctgggcgtgcccaccgagaagattgtccgcgagcgtgccagcagcaacacctggcagaacgccagaaacagcagtgcgatcatcgggcgcaacagctcgcgagtggtgctggtgacctcaggcctgcatctcacgcggagcctgatctacttccgtcacttcggtgtcggggccgagggcctgcccagtgaccacctccgtgccacccgtgggtggttgccctccacattcaatctactgctggtggaagtgatgctgcatgagcgtatcggcgttctgcgctaccacgtctacaactggatgggctggaaccaggcgccggctggaccggatgcagtcacttctgcagcaaccacccgcgcatcgccgcactga

SEQ ID NO: 531122 - DNA, 819 bp, Stenotrophomonas maltophilia
atggacgacatccacccgatcgcaccggacaagcgcgccgccatcctcaccaccctggccgacatcgagcgcacgcacgatgtgcgcgtgctcctggcctgcgaatcgggcagccggggctggggcttttcctcgccggacagtgactacgacgcgcgcttcatctacgtgcatcgccagccgtggtacctgagcgtcaacgaggccaccggccccggcgaagcgcagcgcgatgtgatcgagctgccgatcgatgacgagctggatgtgagcggctgggacctgcgcaaggcgctgcggctggtgtccaagtccaacccgacgctgatcgagtggctgcgttcgccgatcatctaccagcacgatgccaaggccgttgcctgcctgtggcaggccgccgagcgcttctactcgccgctgggcacgtggtggcactacttcaacatggcgcgctccaaccatcgcggctatctgcgcggcgaaaccgtgcgtaccaagaagtacctgtacgtgctgcgcccgctgctggcctgccaatggatcgagaacgaacacacgccgccgccgatggccttcgaagacctgctggagcgcctgctgccccagggtgcggtgcgcgaggccatcgacgcgctgctgttggtcaagcgtgccagtgccgaggtcgccgccggtccgcgcatcgcagccatcagcgagtacatcgacgctatgttggccgagcgtgccgaggggccgcagctgcctgcagggcacggcgacgccgcctggctggacggcctgttccggcagatgctggcgacgcacgcgccagcctga

SEQ ID NO: 531123 - DNA, 1125 bp, Stenotrophomonas maltophilia
atgacgccagcggatctgctgcagctggcggcaggcgctgcgattctgggcctggccgccttgtccaccggcgtgagcttcggtcgcgctcggcgtggcagtcatctgctcaccaccttcttcgcctgtttcgccgccgccaatctgttcggactggtgctgttgggtggccagacctggctttcgcccgatgcggtgcgctggctgcgggtcatcgaagtgccgctggtctatctgctcggtccgctgctgtatgcccatgcgcgtgcgctgctgttgcccgcatcgggccacacttcgttgctgccgctcgcgcatctgctgccggctggcctcgcattcgtcatttccctgttgaacgcactcgcgcctttcgagggctcgccgctgggcaaggtcctgttcccgctcagcttccatggctggctgctgcagggcgcaccctacctgctggccacgctatggctctcgctgcgcacgtcttcggccccgcgcggaaccgccatccagcgcagcggactgcgcgggctggcgatcgtgatggcgggctgctggcttgccagcgcgatgaaccggtggccgccggacgccgctccgctgctggccagcatcgggctcagcctgctgaccaccgccggcatgtatctgctggcgtgccgggtcgtacgtcatcagctgcgcgtacgtgcgagcactgcggcacccgtcatggtggacatgaccgcgtccgccgaggatacgacccacgcacgctacgaacgctcgggcatcgacgcagcacaatgcgcggccatcgccagcgcgctgaccgcattgatgcgggacgaacgcctgcatgaagcgcccgggctggaccttcagtccctcagccagcgcagcgggtggtcacccaaccaggtctcgcaggcgctcaaccaaggcctcggccagagcttttccgagttcgtgaacagcttccgcgtcgctgccgcgagggcgtgcctgtccgatccggccgacttccgcagcgtgctggacatcggcctggccgccgggttcggcagcaagtcgaccttcaacagcgcgttcaagcgcgccaccgggcagacaccgagcgagtaccgccgccgcgccacctccggctga

SEQ ID NO: 531124 - DNA, 429 bp, Stenotrophomonas maltophilia
atgtcagagggagacgcggcactttcggtgccgggggtagcgcgcgcgcaggatcaacaggatctggcgttgcgtggtctggtgctgcttgcccaatttcatggcattgcggccgacaccagtcagctggcacacgacgctggactgggcaatgcccccatggacgaaacgaccctggtcttggcggcgcgcaagctgggcttcaaggcgcggatggtgtcgacgccctgcgcgcgcttggcgttggccaacctgcctgcgcttgcgcttggtgaggacggtgatgcgttcatcatcgcccgcatcaatggcgatcaggtgctgatccacgatctggcccagaagcgcccgttgagcgcgatcttgccgcgcagcgcaatcgcgtgcaggagatccggtcggcccagcgggctgccgaagaagaactga

SEQ ID NO: 531125 - DNA, 207 bp, Stenotrophomonas maltophilia
atgtccggcattctcaatcttgattcgtcccagtgcgccacgcctcagaactaccgaaactcaggccagcatgccgaggcctatcgccacctgagagaccttgcccatacccaggcacgggggttggatgcagctaccgctgcagaactcaacaagatggcgaactggttcaatgccgcaggcaagatcaacgccaacgatgaatga

SEQ ID NO: 531126 - DNA, 489 bp, Stenotrophomonas maltophilia
atgagaagcatctcaatgctcctgctcgcgcttgcgcttgccagcccgacggcagtggccgcggatggagcctcggcacaagctctgctcaagcgcatcgccagcgatgggggacgcaaggttctctgggacctatgggagcacgagcggcagtttgatcaggtcgtctctggcatcgagtcaggcgatccctcgtggctcaaagtcgcagttgctctcaagccgttctccgatgcgggcgcctcgccctccatcaactacgcggtcgcccgtgcactgcccaacgcacccgagcgggtgctggcactgaccacgcatggattcaatgtcgaagaggtctgcacatcgcccttcatcgagccggccccgggcgtcgccgacgcatacgaacgacgtgctcttgcagcgcctgcaaggatgaaggggaccgcgctcgcgccggtcgcggcagcgtgtgccgtgcaggtccggcttccggatggggcctga

SEQ ID NO: 531127 - DNA, 942 bp, Stenotrophomonas maltophilia
atggacctccgacatttacgttgttttgttgcggtcgccgaagaactccacttcgcccgtgccgctgagcgattgcatatcgagcaatcgcctctctcgcgagctatcaaggagttagaagaagaactgagcgtggttctctttgcccgtaccacccgcagcacgcggctaacccgagccggaatcttgttcctggagcatgtgcgtcgcgtgtttacggcattggatcaagcacgggacagcgtaaaagcagcggcaaatggctttcatgggcagttgcgtgtggcgctgtctgatggaatcacgccatcgcgcctttctgctttgctagtaaattgccgccaggaggaacccgaagtcgaaatccgattcttcgaggtgcctctatcgcaacagatcaaggggctaaatgaagacctctacgacgtagggttcgcccaatccaatgaggtgggggatggcgtcgtcgcgatccccgcctggagcgatacgctcatggtagcactgccaagccggcatccgctgctggctcacaaacgcatcccgctggacgaactattgcgctttccgctggttctgtgtgatccgcaggtgtgtgaaggccatgccaagcacgttgagcgggtattgcgtcgcacggagatggagcccctgattgcagagcgtgtcgtttcttgcgacctgatgatgacactggtatcggccggcttcgcacttgggttggcgggtgcagcacatattgcgtcttgccgcgagccgggagtcgtggcccggccgcttgcattgcgtgtaccgccgttgacgacctatttgcttcatcttgatgatgatccatctgatgaacttgcacggttcatcgagcgcgtgcaaaccatcgaatcgctggagtctcctaggccgatacgaggcaaaacccccgatcctccagaggacaagccatga

SEQ ID NO: 531128 - DNA, 981 bp, Stenotrophomonas maltophilia
atgaataccatccagtcacttgtgcttgcggcgatcgtattggtcaccagcgcatgcgccagcaatgccgccaagcaacagtctgcagtcacaggcgaagcgcagtccgcctcaggatcacttgtcgcgtcttcgaccgaggcgatacggccaacgacgccagtcaaaccgccgctcctgcgatcggacaatttcccggatcaggagtccagtgaagatatcaatgccatcgccgcctccgccatcgattcaaaattcgtcagtaccaacccccctgaccaaactgcatccggcagcacagatccatctgacaccactacgcaggcggagcaggacgccgtggatctgtacggaactccgcctgttcgcgatccctgggaagggttcaatcgcaagatgcatggcttcaacaacgtactcgaccgattcgtgctccatccggtggccgtaggctacgacaaggtcgtacccaatcccgtgcagtcgggtgtgtcccgcttcttcactaacctacgattgccagccaccgcgattaaccaagcgttgcagggcagaccctcccacgcaggccagtcgctggggcgcttcctcgtcaatgccacggtcggaatcgcaggtgtgttcgatccggcaacgcacttcggcattcctcggagtgaaagcgaggatttcggccaaacgctcgcgagctgggggtggagagattcccgctatctagtgatgccggtactggggcctcgcacggtacgagacgcgattggctccgtcggcgacgggcagatgtcacttacagctcggatcgacaattccagcattacagacaagctgatgatcatgcagatggtagatggtcgtgcacgactgcttccgatggatcaggtccgcaaggatgcaatagacgactatgcttttgtgcgagacgcttgggcacagcgacgttatcggcagattgagcaggatctccggagcaatcgtgactaa

SEQ ID NO: 531129 - DNA, 804 bp, Stenotrophomonas maltophilia
atgtcgcgattctcaaaagtttccaaagctgctcatcattcgaaagcaggtctcattgtcgccattgctctgggcggagcctgggcttcctcggcctctgcccagaccgcaacttccactgaacccgaaaagtcgtcgtggggactgggtgtcggcgcggtcgccatcaagaagccgtaccgcgacattgacaacgagacgatgggcttgccgattgtcagctacgagaacagatggatcagcgcatctcttccaacgttcgacttcaagatcaatagtggtgactcattgtcgttccggttgcgtgcgcggtatgcgggcggagacggctacgaagcagaagattcatcagtcctgactggcatggaggagcgtaaggcgagcttatgggctggtgcggccgtaatctggaagacggaattcgccaatttcaccggcgagttcctggccgataccatgggaaaaagcaagggtactcgcgcccgattgcaggtggatcaccgctttgcctccggaaggttcggcttcaccccacgccttgccgccgaatgggtcgatgacaagtacgtcgactactactacggcgttcggcaagctgaggcaaccgcgacgcgcgcattctacgaaggtaagtccaccaccaacttccttgccggcgtccgtctggactacgcgccagccaagcatcacattctgtatctcgatctcgctgccagtcgctttggtagcacagtcaaggatagccctctggtcgacaaacctaaccagacttccatcgggcttggctacgtttaccgcttctaa

SEQ ID NO: 531130 - DNA, 3096 bp, Stenotrophomonas maltophilia
atgaacttcgcgacatggtccctgcgtaatccgattccggccgtcctgttgttcgtgttgctggcgctggcgggcctgtacggctttcggaagctgtcgatccaggaaatgccggacatggacctgcccttggtcaatgtgacgctgtcccagccgggagcggcccctgctcagttggagactgaagtcgcgcgcaaggtcgagaactccgtcgccacggtgagcggcctgcgccacgtgcgcaccaccatcaccgatggacaggtgcagattcaggctgagtttgcgttggaaaagtcgctgtccgacgcgctgatcgaaaccaaggatgcagtcgatcgcgtgcgctcggacctgccgcaggaactcctgcagcccgccatcagcgccgtgaccgagaccgacgttccggttctgacctattcgatcagctcgcagaccatggacgaagtggcgctgtcctggttcgtggacgacgtcttgagcaagttgctagccgaggtgcctggcgtgggtcgcgtgcagcgcttgggtggcgtgcagcgcgagatccgtgtggacgtcgatccggtgcagatgaatgcgctcgggatcactgcggccgagatctcgcgcgcattgcgacgcacgcagcaggattcctcgggtggacgtggtcagttgggggggcaggagcaatcggtacgcaccgtcgcctcagtccgacaggccagcgacttgctcgcgatgccggtcatcctgacaactggcgacaaggtgcgcctggatcagattgccacggtgcacgacactgccgccgagcgcagccaggcagcgttgctggatggcaagccggtcattggtttcagcattcaccgcaccaagggcttcgatgaaacccgaatcgccaagggcgtcactcaagcgctaaagaagctcacggcggagagcgcatcgcttgagttctccctgatctcaggcaccgtcgcccatacgctcgaacagttcgatggctccatggccatgctctacgaaggtgccatcctcgccgtactggtcgtctggctgttcctgcgggattggcgcgcaatgctggtcgcggcttccgcactgccgctgtccattcttcccgccttcgcggcgatgtggtggctgggctactcgctcaacacactgactctgctcgcactggcggtcgtcgtgggcattctggtggacgacgccatcgtcgaggtcgagaacatcgagcgacatcggcgcatgggcaagacgaccatgcaggccacggccgacgcggtcaacgagatcgccttggcggtgattgccacgacggcgacgctgatcgtggtgttcgtgccgaccacgctgatgggtggcgttcccggtctgttcttcaagcaattcggctggacggcggtcatcgcggtgttcgcctcgctgatggtcgcccgccttatcacacccatcatggccgccaggctactcaaaccgggtgcgcatgccgcgattgagcaggatggcccgctgatgcgccgctacctgcggctggtgacctggagcctgcgccaccgcggcaagactatggcggtggctgctgcgttcttcgtcgcctccattacgctgctaccgttgctgcccacgggtctgattccagcttccgaccaggggcacatcaacgtcacgatcgaactggcgccgggtagcacactcaccgagaccctggacactgcagaacgcgtgcgcgtcgccgttcaggatctgcccggcatccgcagcgtcttcgccacggctggcactgccgggagcggtggggatgtgcaggtcgcggatgtacgaaagggcgaaatcacgctggtgctcttcggccgcgggaagcgcgcagtccagtccgagatcgaacaggctgtacgccaggtgctggacgggattccgggagcccgcttcagcgtgggaggcgtttccggcgggcagttgtcgatgattctggccagcgacaacgcgggcgccttgaagaccgcagtgaatgctttcacccgggagctgcgcgcggcgggcctgcccggcgtccgtagcacagccggcctggaacgtcccgagatcgtcgcccatccggacctgcgccgggcggccgagcatggcgtgagcagcgccgccatcggtgaagtactgcgcacggcgaccagcggagacttcgacgcacagttgtccaagctcaacctggacaatcgccagatcgacatccgcgtgcgcgtacccgacgcggtccgccaggacattgaggcactttcccgtctgcgcgtctcctcgcgcgacggcctggtgcctttgtccagtgtggcaacgctcaccgtcgagagcagcccggcgcaaatcgatcgctacgatcgccggcgctacgtcaccgtcactgccgatcttggcagccgatcgctcggtgaggccgtggccattgcccgcaacctgccttcggcgcagaacctagcgcccggcgtctcgctgatcgaagcaggggacgccgaggtcgcgaccgaactcatgtccaacctcgcctttgcaatcctgagcggaatcctatgcatgttctgtgtgctgatccttctgttcaaggacttcttccagcccatcaccattctctcggccatcccgctgtcgctgggcggagctttcgttgcactgctgctgacggggagccagttggacgtgccttcgatgatcggcctggtaatgctgatggggatcgtcacgaagaactcgatcctgctggtcgagtatgcagtgctggcgcgccgagagcatgcgttgccggtcttcgatgccttgctcgatgcctgtcacaagcgcgcacgccccatcgtgatgaccaccgtggcgatgatcgccggcatgctgccgatcgcccttggctggggggcggacgccagcttccgccagccgatggcgatcgccgtcattggcggcctgatcacctcgaccctgctcagcctggtcatcgtcccagcgactttcagttgcctccacgacttcgagacttggctcaagcgacgcgtgcatggcccgtcggcacgttgcgatgcaggcgctggccctgctgggtggctgtcggaggacgttcgatga

SEQ ID NO: 531131 - DNA, 978 bp, Stenotrophomonas maltophilia
gtgatcgcaccatggcaggaggcgatcatcggtgcgcagacgtctggactgcgcatcgcccaaatcaatgccgcggtgggtgatgccgtgcgccagggacagctgcttgcgcgattcgatgcggccacgctgcgcgccgagcagttgcaactggaagctacactcgcccaggcgcgcgccgtggcggcgcaggcggatgctaatcgtgcacgggcgctgcaactcgaacgcagcggcgctatcagtgcgcaggaggtgaaacggtacgtcaccgaagccgttaccgccaaggctcaggtcacttctgcacaggcccagttggaagccaagcgcctgcaactgcgccaggccgacgtggtcgcgccagacgatggcctgattagtgcccgctccgcaacgctgggcgccgtcgccagtaatgggcaggaactctttcgtctcgtgcgcaagggccggctcgaatggcggggcgaattcaccgcccatcaactcgccagtgtcgtcgtcgggcaaacggtggttctgcgcttgcccgatggccagagcgccaaagcccgtgtgcgccagatcgcgccgctgctggatacccgctcgcggctgggtctggtgtatgcggacatcgagtcaaacagcatggcgcgtggcggcatgtacgtggacggacgcatcgagcttgctcccagccccgcgctggtcgtgccggcggcgagcgtcgtggtgcgagacggccgcagcatcgtctttcgggtagaaggcacagccagcgagtccatcgttcaggcccagccggtgaccgtgggccgtcgtcagggtagccagatcgagatccttgatccgttccagaccggccagcgcatcgtcgcacagggtgccgggctactagacgacggcgacaccgtgcgaatcgagcccgaggtgccgacgcctcatacgggtgggcaatggcgtcgcacatccatacacgaggaccagcgatga

SEQ ID NO: 531132 - DNA, 1335 bp, Stenotrophomonas maltophilia
atgccggcccctgagtcggctatcgccactccagccgaccaagactggtggcagcagttgaatgatcccgcgatcgataccctggtggatgcggctttggctgatagcccctatgtggcccaggccattgcacgcgtggacgaggcccgcgccctggccgacgtgacggcagcacaacgtatcccttcgatggctctaagtgccagcagcacgcgcgcgcgcagctcggacttcgctggctcgaccaccagtgcatctctgagtgaacgcagcagcatcggactcggattctcgtgggagatagacctgttcggacgtgtgcggaactcgatcgaggcgcgcactctacgaatcgaagcacgcgattcggcagccatggccactcgcttggcgctgaccgctcaggtcggcgaactggtgctggcctcacgggcatgtgagctgtccaaggctgttctgcgtagcgagatcgattcgcgcgagaagacgctgatgctgatgcagcggcgcctgaacaccgggtttgtggcacccgtcgaagaatcgcgtgcacgaagcggactagctaccgcacgtaccgcgttggccacgcgccggggcgcatgcgcgcgcagcatcaatgccttggtcgcgatcagtggacagccgcgcggcatagttcaggcactgaccgccgcggaaacaccagcggccagcactgctgacacggtcgtggctattccgtccgctccggcgatacaactggcgctgccggccaccattctcgcagtccatccaatggtcgttgaggctgaacgcgaaacggcagcggcctggtcggacatcgcggtcgcgcgcgccgaacggctgccccggctggacctgggcgccgcgttgagcggacagtggattcgcgcagcggggcaatccatcaacgataccgtctggtctctcgggccggccctgggcggtcccgtcttcgacggtggacgaggtgcggcaaacgtctcggcggcacaggcccggtaccgtgctgccgaggcgaacctgcgccaagtggttcgctcggctgccgaggacgtcgagaacgcaatggcggccatcgaatcggccacgcagcgcaggcgcaccacgctcgaagccctcgaagccacgcagcaagtgctagatgctatgcaagcaagctggagcgctggtgccgtcagcctgctcgaagtagaggatgcgcgccgccagttcgccgcggcccagaacgaggccattgctgcggcgtatgacagtcaccgggcatggattgcactggtacgtgcgtcgggccacgccacggcggccactactgggggagcgctgtcttga

SEQ ID NO: 531133 - DNA, 1389 bp, Stenotrophomonas maltophilia
atgaagccgcgatccatcaaggctcaaatgatcttggtgatcatcggcgtcaccgctgtgttctggacaatcgtggtgacagttgtactcacgaagacgtcaaccaaccgcagcagcacttgggatgaaaggcttgaggccatcgccacacaactgttggtcgccattcccgccaatggcaacttagagctgtttgagggaccaagattgacgctgccgaaggcacttgagaccgtgcgcggtccacttgtctttcagatatggatagatcgcagcagacttctcgccaatacccctggagggccggaaaccccgctgcgccccgacttctctgatggccctatgtctactcgcattgaaggacagaagtggcgtgtctactcggcatcggatagtacgggacgggttacggttcaaattggcaatctgcacagcgttgtggatgccgactttcgccatcaagcggtggaagaagtgatccagacgaccatactgctcatgatcgtgggtgtcgtcatgtggattgttaccttcatcgcgctcaagccggtgcgcgccgttggccaagccatgcatcaccggccccgcttcgatttcacgcccctgccgctggatgccttgccgcaggaactgcatccactggtcacttctttcaaccgcctgctccaacaactcgaggaaacaattgagggcgaacgccgctttattggcgatgcggctcatgagctacgcacgccgctatcgactctgcaaggacaggctgagattgctcttcgcgagcaaaatctgcaggagaaggatgcagcgctacggaaactgcttgcagtggttcaacgcagtacccgactatccgagcagttgcttgaccaggcacgcatcagtgcaagcggcaaggcacccaagcgcatatcagcggaattgaggacgctcgcacagcatgtcgtggacgagttcgaagtctacgctagccagaaccagcgctcgctgtttgtggatctgtcagcttgtacgattcagtgcgacattgacgaaattggtatcctgctgcgcaatttgctgcacaattccatgcgctacacaactgtaggcgggagcgtggtggtgcgttgcgggtacatgccatctgcgatgcctgggggagagtcagcgagcttcctggaggtcgccgatgatggccccggcgttccggatacagagcgcgatgccatattcaaacgctttcatcggtcagcgagtacctccgtaaatggcagcggcattggcctgtcactggtcgcaagcattgccgagtcgcatagcgccactatccagactgacaccgggctgaagaaccgcgggttcagggtacgcgtgatctttccaggaatggctcctagccacgcagactga

SEQ ID NO: 531134 - DNA, 663 bp, Stenotrophomonas maltophilia
atgaacttactcctcgtagaggatgaccattttctggccgaaaccatttgcgatggtgggcgtcaaagcggatggcatgtagaccatgtcggtgacgcgaacgccgccaagatcgcattggtggaccatgcgtatgcagcagtcctgcttgacatcgggctcccaagggaatccggtttggtcgtcctgcgcaacatgcgcgcacgctacgacgccactcccgtactgatcctcaccgcacgtgggcagctgagcgaacggatagccggcttggatgcgggcgcagacgactatttgatcaaacctttccagttcgacgagctttgggcgcgcttgcgctcggttatccgccgcagccaggggcgtgtcgtcccagtgtttatctatggggacgtgcagatcgaccgcagccgtcgcgtggtgacgaaggcgggcgtcgaggtcattcttagcgcccaggaataccgtacgttgctggcgcttgttgagcgccctggacatgtgatgacacgcgatcatctgcatgacgtcgtctatgggacgaccagcagcgtcgagagcaacaccattgctgtcttcgtccaccaattgcgacgcaagctcggtgaagaactgatccgaaccgtgcacggtctcggctatgtggttgggcggcccacatga

SEQ ID NO: 531135 - DNA, 3051 bp, Stenotrophomonas maltophilia
atgaacttctccgcctggtctatccgcaaacccgtgccggccatcctgctgttcgtgatgctcacggcagcggggttgatcgccttcagcaccgctaaggttcagaacttcccggacgtggacctgccgatggtcactgtcgtggccagccttccgggcactgccccggcccagatggaaaccgaggtcgcgcgcaagctggagaacgcgatggccacgatgaaggggctcaggcacctgcacacgacggtgcaggacggcgtggccacggtctcggcggagttccacctggagaagccgccgcaggaagctctggacgacacccgcgccgccgtggcccgggtgcgggcggaccttcctgccgccttgcgcgaccccgtcatcagcaaggtcgagttcaagaatgatccgatcctgacctatacggtggcgtcgccgcggatggacgacgaagcactgtcgtggttcgtcgatgaccagatcacccggcgcctgctcgccgtgcccggcgtcggagccgtcacccgcgtgggcggcgtgagccgtgaagtgcgtgtggaactggacccggatcggctgctggcgctgcgcttgagtgcagccgacgtgtcgcgccgactcgtccaggtgcaacgcgaagccccgggcggtcgcgccaagctgggcagcggcgaacagaccgtgcgcacgatcggcacggtgtcctcggccgccgcgctggccgccatcgaaattcccttgtccaacggacaggtcgcgcgcctggatcaggtggccaccgtgaccgatgcggtggccgagcgccgcagtggcgccttcctcgacggcaagccggtggtcggattcgagatcctgcgcaccacgggcgccggtgtcatcgacgttgccgaaggcgtgcgccaggcgctcgccgcattgaagacggaacagccggacatcgaactcaccgaggcgttcaatgccgtcgatccggtcgcggagaacttcgagggcagcatgtcgctgctcatcgaaggcgccgtgctcgcggtgctaatagtgggactcttcctgcgcgacatccgcgcgaccttcgtcagcgccgtggcactgccgctgtccatcatccccaccttcctggtcatgcattggatgggattcacgttgaatgtcatcaccttgctctcgctatcgctggtggtcggaatcctggtggatgacgccatcgtggagatcgagaacatcatgcgccacctggcgcagggcaaggagccgctggtggccgcacgcgaggcggccgacgagatcgggctggcggtgatcgccaccacgttcacgttgatcgccgtcttcctgcccaccgccttcatgaaaggcctggccggcaagttcttcgtgcagttcggctggacggcgtccatcgccgtgttcttctcgctcgtcgtggcccggctgctcacgcccatgatggcggcctacctgctcaagaagccgacccggccccatgccgagcccttctggatgccggcgtatctaaaggctgcgcgctgggcattcacgcacaagggcgcgacgctggcgatcatggcggccttcggcatggccagctgcacgccactgcttacgggggcgatcaagggcgactttatgccgccggacgacctgagccagactcgcatcagcgtcgaacttccgccgggcagcaccttcgagcaaacgcgcgccatctccgaacaggtgcatgccgccgtggccgcgcatccgcatgtgacgatggtctacaccgccattggcggtggcagcgccggggacagtccggtgcgcaatgcggccgaggctcgcacggcgaacttcacgctgaacctgacaccacgcaagcagcgtccaaatctgagccagcagcacatcgagcgcgagctgcgcacccgtctgcaggatgtggccggtgcacgcatcaaggttgccgcgaacgaagcctacacgctggtgctctccggcgaggacacagcgctgctggcgaagcatgcggctacggtcgagcaggaacttcgcggcctggtggggatcggccaggtgaccagcagttcaagcctgcagcgacccgagttgatcgtgcgcccggacacggcgcgcgcggccgatctgggcgtgagcaccgacgccatcgcagagacggtgcgtgtggccaccctgggcgactacgaccagttcctgccgaagctgaacctgagccagcgccaggtgccgatcgtggtccggctgcccgacgaggcgacgcgggatatcgagctgctgcgtcagctcacggtgccgggcgctcgcggccctgtgccgctgcgtgacgtggcagaaatggagatcgccagtggccccgcgcagatcagtcgccttgatcgtctgcgcaacgtgaacttcgagatcgaactcaacggacaggccttgggcgatgtgcaacagcgcgccgccgcgctgcccagcctgtcacacctgccgcccggtctcttcaagaacgacatcggcgaggcggaaacctccaacgaactgggcaagagtttcctgctggcgatgggcacgggcgtgtcctgcatctacatcgtgctggtgctgctgttccatgcttgggtgcagccagtgacgattctcggggcgctgctgctgtcgatccccggtgcgatcctggcgctgttcgtgaccggcaccaacctgagcatgcccgccatgatcgggatgatcatgctgatgggcatcgccaccaagaactccatcttgctggtggagtacgccatcgtggcgcagcgcgatcacggcatgtcgcggctcgacgcgttgctggatgcctgccacaagcgcgcacgccccatcgtgatgacgaccctggcgatgggggccgggatgctgcccatcgccttgggcctgggcgccgatcctagctttcgcgcgccgatggctattgtcgtgatcggcggcctcatcacctccaccttcctgagcctgctggtgatcccggtgctctatgaagtcattgatgacctcgtcaagagatgcttgctgcaacgatggattgctcgatga

SEQ ID NO: 531136 - DNA, 1125 bp, Stenotrophomonas maltophilia
atgaagcgtcgccttgtctatctctttgccgcggtcgtcggcctttccgtcgcctgcgccgcgctactcgtgaccacgcgcagcgccgctcaatccacctcgtctcaggccgcgccggcggcactgacggtcaagcgcaccgtcgccaccgcacagcaatggccgcagacgctgaccgccgtcggcagcattgccgcctggcaggaagtcgtgatcggggccgaaatcggagggcagcgcctgtcgcggctgctggtcgatgtcggcgaccgggtgaagcaggggcagcttctggcacagctcagccccggcacgctcgaagccgatctgaacgccagccgggcggcgcttcaagaggccgaggtcagtgccgcagaggcgcgccgtgcagccgatcgcgcccgggcgctgcaaggcaccgaagtcttgtcggagcaggccatcgaccaagcactggcggctggcgacgccgcgcaagcgcgcctggccgcagcccgcgcgcgcgtgcaggccgactcgctacgactgacctatacccaggtgcgcgctccagatgacggcgtgatcagcgcccggcctgcagttgaaggtgcgctcgttcaagccggtgcagaaatcatgcgcctgcaacgccaaggccggcttgaatggcgcgccgaattgccaggaccggaacttgcgcgcgtggcaccaggccagaccgtgctcatcgcttcgggcggcacgcagaccgtcgaaggccgcgtgcgcaaaatctcgccgctggtcgatccgcagagccgtaccggcctcgtgtacgtggacctcaagcccgccgcccaagtgcgggccggcctgtttgccagaggcgaacttctgctggatcagcacacggtgctggcgctgcccgaaaccgctgtcctgctgcgcgacggtttcagctacgtcttccgcatcgagggcgacaaggtgcggcagcagaaagtcacgctgggcgcgaggcgtggtgactgggtggagatccgcgaagggctggccgccgacatggcggtcgtcgagtccggcgttggattccttgcggatggcgtgacggtgcgcgtcgccgccgccagtccgagtccgtccccccaaaccaccacgcgctga

SEQ ID NO: 531137 - DNA, 1452 bp, Stenotrophomonas maltophilia
atgacccttcgcctgtcctccgtggtcacgtgctgcgggctggtcctgctgttggtcgcctgcgctggtacaccatcgcgcgcaccggtggccgttgatgtgcccgaggtctggcgcgctcccttgccccatgacggatcgacagtggcgctcgccgattggtggaaggcgtttcccgatccaatgctcgtcaagttgatcgagcgcgcgcaggccgccaacccggacctgcaaatggccgccgctaggcatcggcaggcgcgcgccttggtcaagcaagcccgcgccgatctgctgccgcaactcggcgtgagtgccgcatcgagccgtggcaagaacctcaacaacgttggcggcgtgtccacccaatcggacgctcaattcaacgccagttgggagatcgacctctttggcggccagcgcgcagcagccgacgaacaggcggcgcgggccgtcgccgcgcaacacgattggcatgccgctcgcgtgacgctggcagccgacgttgcagcggcctacgtcaacttgcggctggcgcaggcccgtgaggaagtcgccgaactcgatgggctactggcggcccagcttgcggcctggggacgccaacaacaggcggccggtctcttgaatgccagcgacgtggccctattgcactccgatgcttcgctcgccgccgcccgccgcagcgccgagcgcgccgaggcgcaggtcgcgttgcaggaactggccctgttgcttgcggtacaggcggccccgctagcggccgaactgcaagcgcccgctttacccgctggctgggcgtcgccccgtcgcgcattgcccggcgtgcccgcctttgcagtccacgcgctgccggcgcagttgctggcgcagcggccggatgtggctgcggcccatcagcgctggctggctgcgctggcccatcaccgcagcgtggatgcccagcgctacccgcagctcagtctcggcgccttggtcggcgaagcccgcctgcgtgtgggcggtggaagttcggtgagttcgctctggtcgatcggaccgagcttgaccttgccgctgttcgacggtggggcacgccgggcgcaaggtcaggccgcgctggccgcagccgacgaagccgccgccgctctccaagcgaagtggcaaaccgccgtcgccgaggtcgaggagtcgctggaacgcatggtcgccacgcgcgaccgcggacgcgaagccgaatcagtggcgcgcgagtggcaaggcatcgcgcatcgcgccgccctgcaggcgcaggcgggcttgcacagcggcccgcagcgcgtcgtttcccaacgcaatgcactgaccgcgcacgacgacctgctcaccgcgcaggcggatcaggcacaggcctggttccgcctgtatcgcagtcttggcggcggctggagcgccgacacaagccccaccgaacaactggttgctcaaccatga

SEQ ID NO: 531138 - DNA, 978 bp, Stenotrophomonas maltophilia
atgaatatccctctgctgaccaagaacctggcgacaactccaatgggggccgccccggccctcgacatcacggcggacttggcacacaagcgcggctacacgctcaactcgtggttcgtgatcggccactttgaatccgagggccacacgctcaactacctcgtccacctgtttgcgctcagcatcggcgggatcaccgtgggcgtggacagcgcggccagcatcaccgacgagaccacaggctggtacggcgtgcagcacggctttcacccgatcttttgtgcgaaagctcgctcggatcggctgctggtcaagacaccgcacagttctctctcgggaacgctcgatgagctgcatgtcagtgcgcggatcaagggcgccagcatcaacgtgaccctgaaagccgtcggccacccgctttacaacaagggcacagggcggttcgacatgtttggcatggacgtcttccagtattcgatcccgacgctggagaccacgggccgcctgaccatcgactgccgcgagttcccggtatcgggcgtgagctggttcgaccggcagtggcagaaccagccgcttggcccgccgcggggccggtggacgtggatggacctcaacctcagcaacggctggcggatcagcctctgggatgcaaggggtccggacggcaagtcggttgcatgggtgaccatgatcgacgcgagcggcaagcacgtcgtcgccgacctggctccactcatcgacgacgcctgcgactactggctgagcccgcaatccggcgcccggttcccaacccgatggcaggtgttggtgcctgtgctcgacatgcagttggatgtgatcgcgaagccgcgtgagcaagaggtcaggggcctgcatgcgcgctacgagggcgcgagttcggtcagcggttccgtgcgcggcgagaaggtcagcggctactgctacgtcgaaatggtcggcgattggcaggcctga

SEQ ID NO: 531139 - DNA, 504 bp, Stenotrophomonas maltophilia
atgaaaacagtcaaacccttcaccctgcgcacctggtccacgccactgaccatcggctccttcatcctgatggccgtcaccggcgttctgatgttcttcgacgtggtgccgggatacctcgccttcgcgcacgagtggttctcgtggttcttccttgtcggtgcaggcggccacatcgcggtgaacttccgtccgcttgtgaggcatctccaatcgaactgggggaaagccaacgttgccatcttcgcgatcattcttgtcgtctcgacgttctctttcgggcgcatcacggccccgcagttgaagtggcccatctccaacgcgctcatcgaggctccgctgtccgcactcgctgacgtgacgcgcacagacccggcagagcttcttgcaaagctcaaaacgcacggcgtcaccgcaacacccgaccagaacatcaaggaactggcggatgcgcatgacatggatgagttccacatcctgggcctggtgatccttcgcgagtga

SEQ ID NO: 531140 - DNA, 948 bp, Stenotrophomonas maltophilia
ttgaaagcagccgtcgtcacctcgttcaaccaaccgccgcgctacggcgacttccccgatcccacgcctaatgggcctgaagaaatgcttgtcgaagtgctcgccgccggcctgcatcacctcacccgcgggagagcttccggcgcgcactactcaagcgccggcagtctgccgctcgttccgggtgccgacggtgtcgggcgcggcgccgacggcaagttgcgctacttcgcgcaaagccccgggcagatcggcacgatggccgacaagacggtgatcgaactcgaccacagcatcgagctgccgagcgacagcgacccggttaccgtcgccggtgcgatgaatcccgcaatggcgtcctggctcgcgctgcgttgccgagtgccatttcagcgtggacagaaggtgctcatcctcggcgccaccggaagctcgggaaacatggccgtgcagatcgctcggcatcttggcgcctcacaggtcatcgcggcgggccgcgacgagcagaggctcgcaaaactgccggcactcggcgccacagagattgtgacgctgaaggatgcccaactgggggtgggtgccgtcgcgtgtgaagtcgatgtcgtactcgatttcctctggggcgacagttcggtgcgtgtcatggaaaccgtgctgaggcagcgggcggatcgcagccgacccctcacctggattcacgtcggctcgatggctggtgaagtcgccgccattcccggcgctttcttgcgctccgccaatctccagatcgtgggcagcggacatggctcggtatccggtcgcgacatcctcatggagctgcccgcgttggtgaaagagatcgcgcgcggcacgttccgcatcgacgtgaaggccacaccgcttcgcgatgtggagcaggtgtggtccgaggcttcccataccggcgagcgcatcgtcttcacgccatga

SEQ ID NO: 531141 - DNA, 450 bp, Stenotrophomonas maltophilia
atgaagaagcagaaatccatgaaacatccccccccacccggcgaaggactggccgatgcgctcgtgccgaccgcctttgtcacgatggccgtgctcaacaagatcggcgccgagaacgacctgtccctcacgctgatccgcgtcctgggcatcctgctggatcggcgtccacgcatggctgaactagccgactacctcggactggagcggcagacgatgtctggactcatcgccagagcggagaaaaaggggttggtggcgcgcgcgcccaacgcggaagacggccgggcgacggacgtttttctgacgagcgagggggcaaagctcgtcaaacgcctgcatgcacagacacagcaggcattggtgccgctcaccgaacagctcagtgcgtcggatcagcggcagcttcaggaactgcttcagcgcatgctggagagccgaaagagttga

SEQ ID NO: 531142 - DNA, 960 bp, Stenotrophomonas maltophilia
atgacctcagccatactcggcagtgctgtcggcagctacgtgctggatgcgattgcatcgggtggaatcaagaccctgcaacaacttgcggcagagaacgcgattcagcctggcactcccttcatctacaacgggcatttttatggcaaaggcttcggctatgccaacaaaaagccggcgctgaccttgaccgagaggctcgacgagccaatggagggaaagaagctcgtcctcgaattctcgaagaacggccttgtgaacgacacggcctacacccgcatggcgggttcgactcgtctcttcgccttcgcctacatctccgatgtcaccgcagataccatccgcgcgattccctatgcaatcggggatctggtcagcggccagtcgccgatgccgttgccgttcgcttcaaccctggagttacagcccaatgacatcgagcaattcgcaggcatggatagaacctggatgccttccaagaccgagtttgcccgtcttgctgatgttcccgagcacaaggtcaaggagctgatctgtcatcttctcgaagagcacgatgttcccaaggattggggcggagaagaaagtgatttgttctctgaccgtctcttgatcggcggcgaacgcaagactggtgcctttctgcttaaagggccggccaaattccatccgatgacgccgcgtgatctgggcaagaatgccgatcaggtctatcgcctcttcaatatccccgcgcaggtctatatcgtccaacattgtcacaacgtcggcgctgcggtgcgcaagaccgtggaggcttacgccctacatcgctcattcacggccccttgccgcttcgtgatcatggacggcgtggccaccgcgcagctgttgcgagcacatggcctttgggacaccaagacgcctgcacgacgcagaagcagatcagccgggccgagcgctcgcagcaagacagactga

SEQ ID NO: 531143 - DNA, 2139 bp, Stenotrophomonas maltophilia
atgaacagagacgcagcgattggtaagcgcattgctgccctgcgcgatgaggcagggctcaagcagaacgaactggcaaagaaactcacctggagcgccgcagtgctctctcgcgtcgagaacggcgacagaccgttggcgccggaagagcttcaaaccgtgcttgatggcatcggcacggatgacgcgctgaagctgcgggagatactggagcgccggtggcagatgatcccggaacccacccttggcgatcccgatgccgacctgctgtgggaagcggaacagacggctcaacaggtgcatgcgcttgccgaacggcccgatgtgaaacagttctacgagcgccggctggttcgctatcaggaagaattgctcgccaaagcggcaagcgtggcggacaagcgctatcgggcagccttcataggaaccattgcggtgggtaagtccactgcgatttgccgtgcggaaggactcgaaattccaggcagcaagggaatgccgaaagccgtcctcgaaaccggcgcgggcggtataactatctgtgaagtgcatgtccggcgtggccctggatatgggcttatcgtggagccatgcaccgaagatgaagtgcggcgacacgtttccgatttcgcgaactttcttgtgaatcctccgcaagcgtcgcgctcagagaatgatgacggcgaaggcggcgcatcgccgggaatctcccgtgaggtcgagcgcgcattgcggaatatggccggccttcggcgtcgccgcagcgaaaagcgtccggatggcacggtcattcctgcggtcgatgaagcccgcgaactggctgcgcggttcaccgatgccaagtccttgtccgtagaaatcctgtctcgcatggagttgcacaagcgcgaccgccgcgacatatggcatgacgacaccacgggcaagtcgccactcgattggttgcaggaaatcttcgagcgggtcaacaacggccgcagcgaggaattcactttgccgcgtcggatcgaacttgtcgtaccgatcgcgatcctgggcgatgagtcggtttcggtcacgctgatcgacacgcaaggcatcgacgatatcgctgagcgcggcgatctcgaagttcattttgatgacacgcataccgtggtcgtgctgtgcaccgtgttcaatgaagcgcctgcaaccgccgtgcggcagttgctgacccgtgctcgggaaggaggcgttcggacactggatagtcatgcagccatccttgccttgccgcgtcccggtgaagcacttgccgtcaaggacaacggattccctgtgcagtcggccgaagaaggctatgaagtcaaaggcgaggaagtgcagttgaagctgcaacctatggggctcgaccgcttgcccgtcttgttcttcaatgccgccgaggatgcaccggagcagttgcggaacttcatccgcgggcgcatcactgccgtgcaggaatggcagcgcaacggattgcgcgaaatcatcgctggcgccaaatccatgcttgagaactacgaaaaagaccaggctcgggaggcgatggcggccgcagcccgtcgcctgacgatctggttggaccacaacgaagcaattccggcacaaaccaagcggcatgtccacgacagcctggtggcggctgttggggctgcacacccgcgcaccgtctatgccgccatcgtcagggacggcgattggtggaatctcaactatgcccaccagctcagtcatggtgcccggcgcatcgcggccggtattgccgaaccgaaattgcagaagttcaaagagatcgcggagaacctactgcaagacgatcagttcagcgatgcgcacgatctcatccatcaaacagtcagaacgatggaggccggcttcgatgcgcttgttcgaaaggcccaactggttggacagagcattcattcggatgaaatgactgctgacgccaacttctggaaggcgtgctacggcgaatggggaaggggttcgggctatcgtgaccgcatcaaccaccacaaccagaactggttcgaagataaaaacgagggtggggccgatgcccgcgtcatgcaactggtcacggacagttggcatgaagcggttgcgaccgttcgccatctactagcgcaagactga

SEQ ID NO: 531144 - DNA, 201 bp, Stenotrophomonas maltophilia
atgagccgccctgtagacgccgaaatcaaacgagtgactgtcacgctgccgcagcgacagctcgacgcgctgcaaacgatcgcttcacgcgaggatgtgagcgtggcatggctggtgcgcaaagccgtggacaaactgctgcgtgaagggcctgacatgcctgtggcgaatcccgcgcagccttccgggaggcgcaagtaa

SEQ ID NO: 531145 - DNA, 2670 bp, Stenotrophomonas maltophilia
atgaacgacacgaccagccagccgagctacaccgtcgcccgcttctggcgctgcgctcttcaggtcaatccttccggctaccaatcgaagtaccgcggcgccgcacacgggctcgacgaggccacttacaaccagcagttgctcgaccaatgcctggcacaggacatcaaggtcgttggcatcgcggatcacggcaacgtcgatgccgtcgatggcttgcgtcgttttctggagccgcacggcatcgtcgtgtttcctggcttcgagatcgcgtccagcgagaaaatccatatggtttgcctgtttcccgaaagcacaaccaaagaccagctgaaccgctacctgggccgtcttgatctgacggacgtccaggacacggtatggccctcgggcaagacctgtctcgacctggcgcaaaccatcttcgacctcggcggcttctggtatgcggcgcacatgacgggcggcaatggattgttgcgcctcaatcaggatggcggcgggctggtgcatatctggaagaccgaggcattggtgaaagccggccagattccggggcctctgaaggacttgccaccgaactacaaagacatcgtcctcaataagaaccccgcctaccagcgcgagcatcgcatcgcgctgctgaacgcgaaggacgtagccaagccggaggacatcgccgatccatgcgccagttgctggatcaagatgacgcggccaagcttcgagagcttcaccactgcgttcaaggatccggagtcacgcattcggcttggcgccctggctgaaacgtactactcccggctggaaaacctacgctttcatgggggctacctggatggcatcagcatcgagctgtcggcgcacctgaacgcagtgatcggcggacgcggcaccggcaaatcgaccttgatcgagtgcctgcgctacgtgctggatgcgccgccacgcgcggcatccgctcgccggcagcacgatgaaatcgtcaaagccaatctcggcgcaggcggtcgtatcgaactggaggtcgtctcccgagcattgcatggcaggcgctatctggtttcccgtcgttacggcgaaccgcctatcgtcaaggatgcgcaagggcaggtctccacgctgcacccgcgcgacctgctgccccgcatcgagatatacggccagaacgagatttttgaattggctcgcgatcccgcaagccagacggcgatcctgaatcggttcctgcccggcggcacctcgctgaccagcgagttggcggctatcgccaaacggctcgccgagaaccgcgaaaagctgctggctgcaacccggcagaaggatgaattgcagacccaagtcgggcgtttgcccaagctgaccgaacaggtgcaacagttcaaatcgctcggcttggaaagcaagctcgcgctcgtgccactgctcgaacgggaacgccaactttcaagacgggtcgatgaagagcttggtcgagtcgccgaaggattgtcggcgctggaggacagtctcccggacatggcattcctcagtgagaaggcgctggacgggctgccgcacgcgcctattctcgccgccatgcgtaaggcactggacacgtttggcaaggacttcacgacgcacctcactgctctgcggaggctgcttgccgcagcttccgcgacagccgaaggtcaacaagggcagttgaagacccagatcgacgcggaatcggagtccctagaaaaagtcttttccagcctgccagcgttcgccggaaaacccggccgcgacgtcggccgggcatatcaggaactgttgcgcgagatcgagtcgattcggcccagcgagacccgtgtggggaccgtagacaagctgctggccgagctggaagctcagcgcagaaatcttctggacgagttctatcgccttcgggatcagcgcagtgacgaacttcggacagccgtcaagaagctcaatcgcaaactcgacggaaagctgcggctgaatctgaaaatcggtgggcagcgcaaggatttgaaggagtttctgctacaggtgccggggctcggcgagaaaaagctcgcctggatcgaacaggcaggcgacgatctgaccgtgcccgcgctggttcaggccattcgcggcggcgaagacgccatcaaaactttgacttgggattggggcatgcagaactcggtcgtcgaaaccctcgcacggctggatcgcagcctagttctcgaacttgaagagatcgatcttcaggatcgcatcctgatcgaactgaatatcgcgcatcagggagatatattcaaaccgctggcgcagttgtcaactggccagcaatgcacggcgatcctgcacttgctgcttctggagaacgacgaccctctcatcatggatcaaccggaagacaacctggacaacgcattcatcgccgagcggatcgtcacgcaactgcgtagtgccaagacggagcgccagttcctgttcgccacgcacaacgcgaacattccggtattcggtgatgctgagtggattggcatcttctctgcctcggattcccatgccgagatgcctgcgcaagcccagggctccatcgacgtgccggagatccgcgagcgcgtcgccgagattcttgaaggaggccgggaggcattctcccagcgcaaggaaaaatatggcttttag

SEQ ID NO: 531146 - DNA, 1242 bp, Stenotrophomonas maltophilia
atgctgagaaccgaactgctggaaattatcgccaatggcgagaactcgggcgtggagttcaaacgcgacgatatccgcccagaacaacttgccaaagagatcgtcgcgctggcgaacctgcggggcgggatggtcttgctcggtgtagaggacgatggcgccatatccggcgttcaacgtgatgacctcgaaacatgggtcatggacaccgtcttcggccgctatgtccatcccctgctgctgccgttctacgaggtaattgccctcgacgatggcaagcgcgtcgccgtagtctcgatcgctacaggcacatccaagccctatgtgctccgacacaacgggcgcgaagacatctatgtgcgggtcggaagcacgtcgcgcctggccacccgggagcagcaagcccgcctgtttgaaagcggcggcatgctacacagcgaaatgctgcccgtctctggcgcggcctttgaagcactcgatcgagagcgcctacaggactatctgctgacgctggcaggcgaccgcgagttgcctgcaacggaggaagcatggctgcgccgcatgatcggcttggggttcatgacggagacaggcgttgctacgcctgcctgcacgattgcgggcctggtcctgttcggtcgcgcgccgcgtcgctttctgcgtcaggcgggcgtgcgttggatggcgttcactgggaacgataagacttataaggcgctcgacgacacgatcctggacggtcctctcgttggccgctttggttcacaaggcggctcccgggaattgatcgaacgggggctgatcgaagatctgacggataggatgcagcccttcgtcagcgtcgaagacgagacgctggcgcaaggtttgcgacggcagcggacatggcactatccgcccgaagcactgcgcgagtcgattatcaacgcgctggcgcatcgtgactggactcgcgcgctggaggtcgaagtcgtatcgtatgctgaccgactggaggtcctgagtcccggcgcgctccagaactccatgaccattgaaaaagtgttcgcggggcagcgatcccctcgcaacccgatcatcgtggaggtgttgcgtgactacggctacgtggatgcccgcggaatgggcgtgcgcaacaaaatcgttccgctgatgctcgaaggaaacggcgttcgtcccgactttgaagccaccgaggatcatgtcagggtcgtattgcctaggtccgctgcaaatccataa

SEQ ID NO: 531147 - DNA, 786 bp, Stenotrophomonas maltophilia
atgagaaagctattaaccggcgaatgccaccctgacaacatttttcaacttgttgatccaacgacatatgtcgaaggtgacttcgaggctgaagtcgttaaagcactgtcgtgtttgatgccggagtatcgttgcggcgtgttcgctggagcgttcgtcctagagggcgagcgtcgagttgcggatctggcgcttgttcacaagagcttgtcgcattggttcgtcgtcgaggtcgaactggcaggtcattcgctggaacaccacgttctgcctcaagttcgctgctttcgctatggtgacccggagcactcctgtgtcacgagcttggtacgggcattcgaagatctgacccgtgaacaagccgaggaccttttgaactacataccccgctatgttgccgttgtggggaatctgcacgacccgatctgggcaacaaagctaagcgctgttgatacgcagtatttgaccgtgtctatctatcaggaccgtaacggacgaacagcgcatgaggtggaaggtcgactattcgttagagcgcacagcgtaggatttgcgcggttctcggcaattgataactgcttacgcatcccccgtggctgcgggctcccggtggggaacattcagatcgtggaccagtacggcgtcgctggagtttggacggttcgcgatgaggctggaaatctgtggattcagaaagagaatggtcctgcgctgattccccacgggggcttggtgcagataatccgaaatttcgaaggtcgcatctcgatcttgctgtcgtcatag

SEQ ID NO: 531148 - DNA, 1158 bp, Stenotrophomonas maltophilia
atgcccaaattgacgccgcgaggctggcaagtcgaagcgctcgcaaattgggagcaagccgatcatcgcggcatcgtcagcgtcgtcaccggcggcggcaagacggtgtttgcgctgtcatgcatcgaacgcattcggccggtagcgacactcgttgtcgttccaaccgcggcgttgctcgagcaatggtgggaagaagcagcaagctacttcgatcttgatctggatgaggtcaatatcatcactgggagcctgcgcttccgtctcggagcgatcaacatcgcggtgctgaatacggccgccaagttgcctgaacgcctgcaggagcaacataagtgtttcctaattgttgatgaatgccacaaagctgcatctgagcagttccgttcggcacttcaagtcccgaccttcgcgtctttgggcctttcggcaacgcccgaacgacagtacgacgacggtctgaaggaagtgcttgtgccggcactcggcgaaattatctacagctatgactacgccgatgcactgcgtgacggcgtaatcgtgccattcgaactgaagaacatcgtcttcgagctagaagcagacagacaagccgagtacgacaagctcagcaaggccatagcgcgctctatcagccagcatgggaccgaagctgaggaaacgattgcgctgttcctgaagcgcgcccgcgtcttgaatctcagtctgaaccgtatccgcctggcgctaaaactggtggcggcaaaccgtggtaagcgcaccttgatctttcatgaagacatcgaagcctgcgacctgatccacggcgtgctagccgagaacggcgtcaaaagtggcgtctatcactccaaaatgccgctccgcgcgaaagctgcgatgttgggaaagtaccggcgtggcgaaatcgatgtgttggtgacgtgtcgtgcgctcgacgaaggattcaacgtgccggaaaccgaagtcggcatcattgctgccagtacggcgacgcggcgccagcggatccaacgtctgggccgggtcgtgcggcccgcgaagggaaagaacggcgcctcaatctatacgctcgtcgcgaccggcccggaaatccagcgactcaaagaggaagaagagcgccttgatggtgtggcaactgtggcgtggagccgggcatga

SEQ ID NO: 531149 - DNA, 1605 bp, Stenotrophomonas maltophilia
atgacgcagaacatcgatgaggccgagctgagcgtcggcccaaaggcgatcgacgcatatagtcgtctgagttacacgatgtggttcgcactagccgagtttgtagacaactcgacccagtcgcgtctgaactatggaacactcgtcgatgatctgctgaagtccgaaagccagccgttgaccgtgtccatcgttcacaatcgacagactaaggaaattacgatcgaggacaactcgatcgggatgaccaaggcagacctgattgctgcactgaaaatcgcgaacccaactgctgacagtaagggtagatcgaagtacggcatgggcatgaaaacggccgcatgctggatcggcgcgaaatggtccgtgacgacctgcgaatggggcagcggcgaagaatggaccgcgacggtcgatgtcgacgcgattgcgaaccacggtgccaaggttccgctgaccatgaaatcagtgagtacggattcgcactacacgcgcataacgatcacggacctacgccgcgtgattcagaagcgctccgaagagacaatcaagacctaccttggttcgatgtacatgttcgacctccggccagacgacaagggacaggtcgcactgaagttgacctacaacggcgaggaagtggcgccgcctcaggacagcgactgggataccgatccgtctggcacgatcatgcgccgcgatctaccggaactcgacatcgatggcaagaaggtcaagggctggatcggcgtgctacgcaagggcggccgaaaatttggtggcttctctctcttccagaatggtcgtcagattcagggtttcccgaatgcttggaagccgagggccatttatggcggtgtcgatgacgaaggggccaacaacttagtcgcacagcggcttaccggtgtccttcaactcgatggttttgttgtgtcccataccaaggatgcgatccttttcgagggtgacgaggaagacaggctggagcagtttctcgtcaacgagaccaaagcctatgcggagtactccaagagccggcgaggcaccggacggcaaaaatggtcgaaggaacaagtacgcgagtttgcgaagagcatgcaaagtgagttcacgagcaatgagttcaaggacgcgctgaacaacgctgccctgcctccgccagaaacaaccgcagccaacaaccagcagatcttgaagacgcttaccgccgaagaggaactggtcacgttcgacattcttccggatttgaaagtggttatgtcgctgaaggagaccagcgagtgggaaccgcacgtcacgtttgtacctggtgcggatcccagcactctccacgtcatcatcaatgggttgcatccgtactaccagacgctggaggcgaaggactcaatgcacgaatgcgtgcagcagtacatcttcgacgcggtagccgagttcaaaactagcaagttgctctctcgcgtcaaccctgacagcgtgcgccgcctgaagaatgatttattgcgagcacgggcggagcaactcgacaacgcggatgccgaggtgcgcgcgcaggcggaagctgatctattcgggaagaataccgattccgctgcaggccagggataa

SEQ ID NO: 531150 - DNA, 993 bp, Stenotrophomonas maltophilia
atgcagacaactacgctaagtactacaggagaagacgcaagtgcgcggctgataaatccgttcatgggacggccgccatctaacgttgcctatgccaccgcatggggtcgcatgctccacggtaagtctgacgagattcttgatgacggatcgctggcacgttttgaaggtaaggtgaacctgatcttcacgtctccgccgttcccactgaaccgcaagaagcgctatggcaacgagacgggcgagagttatatccgctggctctgtacgttcggcccgctcttcaagaaaatgctcactccggatggatctatcgtgatcgagatggggaattcttgggagccaggttcaccagtgatgtccacactggcactgcgcgcgcttcttgaattccaatctaagaacggtctccacctctgccaagagttcatctggcagaacccggcaaagttgccatcaccggcacagtgggtcaatgtcgagcgtattcgggtaaaagatagtttcacgaaactgtggtggctgtcaccaaacgagaaacctaaggcgagcaatcagcgtgtgcttcaggaatacagcaaggccatgaaggatttgctgaaaaaaggctcgtataacgccggaaaacgcccttcggaacatgacatcggagagacctcgttcctgaagaacaatggtggcgcaattccgtcgaacgtcctgacatatgcaaacacattggcttccgatgcatatcagacgtattgccgggataaccaattccagctgcacccggcacggatgccaagcgacttggcgaagttcttcatcaaattcctgacggagccaggtgacattgtcttagacccgttcggcggcagtaacactacgggttgcgctgcggaggatcttgagcggttttggatcagcattgaggcatctgaggaatacattaaagggtcccgcggtcggtttggcgatggcataaccctcgactcgttttcagtatcctaa

SEQ ID NO: 531151 - DNA, 357 bp, Stenotrophomonas maltophilia
atgcttcgaggcggccattgctcggacaaaggcaaagttatgcgaaagaccaagtcgcacctttcggaagcggcgcaagagacggtcagagagttgggcagagctggagcgacggatcaggtcacgctccgcgagttcgatcagctgagcgtgcccccagtctctccactaaaaccggatgagatcaagcgtattagagaggattcgcacgtcagccaagccgtttttgcgcgcttgctcaacaccagcctatccactgtgcagaagtgggagatcggccagaaaaggcccgcagggacagctttgaagcttttgcatctcgtacaaaagcgtgggctggagattatcgccgcatag

SEQ ID NO: 531152 - DNA, 216 bp, Stenotrophomonas maltophilia
atgcgtggatgcctgggctgcacggctggacagattcctggcgccatccgcgtcatccgcaaccagggtgatcgcatcattgtcgatttcacagtcactgccggggcaacagtctgtgaatggaagagcccgaaccgccacgtctgcccgccggagggtcactacacctggatgctgcgctggacgccggggaagctggcccgcatcaagaagtaa

SEQ ID NO: 531153 - DNA, 324 bp, Stenotrophomonas maltophilia
atgccattcatgcgtgaccatgttgccgccgaaccggcccgcgccgatgttgatgcgcaggccggttggctgctgctggagttcggcgcgccgtggtgtggccactgccaggctgcgcaaccggcgctgcaggcagtcgtggatgcgcacgacctgccgcactggaagatcgaggatggcaagggcaagccgctgggtcgctcgttccaggtgaagctgtggccaaccgtggtcctgctgcgtgacggccaggaagtggcgcgggtggtgcggccggtggaacgcgcagatctggcaaccttggagagcgcgctacccgattga

SEQ ID NO: 531154 - DNA, 2319 bp, Stenotrophomonas maltophilia
atgaagatcgcagttcgtcattcccttgcactggccatcgccgccggcatcgccctcgcgcacacggcgcaggccggcagtcttggacctggccagggcgccgaggtcaacccgggcgacacgcccgaaacatgggtcctgaacggcgcagggttgaatgccaagccaggcgcccgtcttctggggatcaatgcaaccaacagatccgacatcatcgcaattggtacatccattgaggggcgggtcaacctgaccaacagctcaattacgctgatccagggcaccctacacaacaccgctggccccgccctgagcctgaccacctccggtggcggtgccggctggtcgatcgcattcatcgagcgcagcacagtgtccggtgccggcttcggcggcagtgccacacagggtgctgccctgacgctggacgcaagccggcttgagggtacgttcaactccagcggcacctttgaccgcggcattggattcctgctggccgacccagcccacctgcttgcccggaatggaagcaccctcattggtgacgacgctggcattacggcatcgtatcaactggccgcgcccggtgatcgaggcaatgtggaaatagacgcgtcccgcgtcgaaggtcgaaacggcgcgggtatacacgtcgtgcgccttggcagccggccttctgtcgtcgcgacgttcaatttccgcaacggcagcgagttgatcggcggcagcggaaccgcactcctggttgaggatgcgggcgcagtgatcgacctgaatctggatgcctcgcgcgcgaccggcggcattgtcaacgcagccggtggcacggttgacgtcgcactgtccaacggcgcgagcatcaccggcgtcatgaccagcgtcaccagcgccacgctggactcggccacctggaacatgaccggaaactccacggtcggtgctctcagcctcggcaatggcaccgtctccctgggcgacggctccgccttccacacgctcaacgtggctggcaacttcagcggcgcggatggcacgatcgtgttcaacaccctgctggctggcgatgatgcggccaccgacaggctcgtcatcggcggcgacaccagcggcacggccaacgtgcgcgtcaacaacgtagggggtgccggtgcgcagacccaccaaggcatccagttgatccaggtcggcggtgcctccaatggccagttcaacctggccggccgcgcggtgggcggtcagtacgagtacttcctgcacaagggcactggcaccgacggcaactggtacctgcgctcgcagctgccgaccgtgccggacccgtgtgttgtcgatccccgcctaccgcaatgccgaccgatcgatcccgtggagcccgtggatccgattgaaccggaaccggtgctgcgcccggaaccgggtgcctacctggccaatctgcaggccgcgcagaacatgttccgcctcggctatcacgaccggcatgccggccagaacagcggccgcgcctgggcgcgcgtggatggttcgcgcaatggcttcgatgcggtcagcaagcaactggatatccgaggcaacagccaggcgctgactgtcggtgccgatctatggcgtcacgattcgggtagcagcgcgggtgtaatgctgtccagcggtaatgccaccagcacctccaccaatgaactgaccggctactacgcccgcggcaaggtgaagggcgaagcactgggcctctacggcaccttgcgcggcggcaatggatccgatccgtatgcaggtttctacgtggatggctcggtgcagcgtgcgcagttccgcaaccgcgtggagggcatcggcctggcagccgagcgctacgacagccgcgcctggcagggtgcggtggaaaccggctacgcgttccgtgtaggcggcgcccgcaatggcggcctctatctggagccgcagctgcaggtgggctacacacgctgggacagcaaccgccacaccgaagccaacggcacggtggtgggtgcggagaacgccaacggcctgttcggccgtgcgggcctacgcctgtccggcgtgacccgctggggcaacgggtccaccgaggtgcagccgtacctggccgcccactggctgcatacccgtgccgaatcgcagatccgcatggatgacgaggtggtggatgcccgcattccgcgcagccgtggcgagttcagtgccggtgcgtcgctgaagttcagcaacggcatcggcgcctggggtgggctgtcgctgcaacacgccagtggctatcaccagaccagtgcgcaggtgggcatgagctaccactggtaa

SEQ ID NO: 531155 - DNA, 873 bp, Stenotrophomonas maltophilia
atgcatgctttcctgatgcgagccctcgccgaccagctgctgcaggaaatcggaccgcaaccgcccgcgatggtggccagcgacgatggtgcggtggtgttgctgcgtcatcgcttcgggccaagcgaaggctgcatgggccatccccaccagctgcgcctgggcatggccatcggtggcggcgggcgtctgcagcaacgcagccatagcggcctgctgcagggcgtctggcagcctggccagttcaatgtggtcctgcccggtgacatcggtacctatgccagccccgcagtggacgtgctcggcctggccatcgacaccggcctcctgcagcaggaggcgcaccggctgcatgacctgcaaccgctggcggtgcgcctgcagcgcgacccggtggtcacctcggtgctgcaggcgttgcggtgcagcgcgcaggccgatgcctgccttcccggatttctcgagcacggcgcacgcgtgctgctgcaccgcctgcgacagcttgccgggctcgggcacgcgacgccgccgagggccactgcgctgtccgtgcggcaactccagtacctgcaggagtacatcgacgcgcagtacggccagccgctggcggttgcgcagctggcggcagcgctgcggatggacccatcgacgttcagccgtgcgctgcgtgccaccaccgggctgccaccctatgcgttcctgacccggcgccgcatgcagtgggcgtgcacgcagctagcgcagggacgcagcgtcaccgacgtcgcactggcctgcggctacgccaaccccagcaagttcagcgcggccttccggcgtgtagccggctgctcaccgtccgcgtgggccgcgcagcaccgcagcccgcggtag

SEQ ID NO: 531156 - DNA, 438 bp, Stenotrophomonas maltophilia
gtggacggcggctgtattgcgccggtctggcggggagcgtcggcaacgctgttcgtgcagccgcaggtgcagctcatctacacccggttccaggccgggcagcatgtggaacgacatggcacgacggtcggcaatgccgaggcgggtggtctgggcgggcgcatcggcgcgcgcgtattcggccactcaacggcactgggcaaccgcgtgcagccctatctgggcgtgaactggttgcgcggtgcagccaccaacgcgctgaatttcaatggccagaccctggccgccggcaattcgcgcgaccgctatgaagtgcagggcggcgccgagctggagctgggtggacgcgtcggcgcctggggcggaatgagcctgcagcgcggcggccagaactaccccaatgtcatcgcgcaggccggcatcagggtggcctggtaa

SEQ ID NO: 531157 - DNA, 408 bp, Stenotrophomonas maltophilia
atgaagagaacacgttgcactggcctggctgtggcgttgatggcaagcctgtccccagggctggcctgggctgcagacgtccatctgacgcctgcaagcaaggacggcagtggcgcctcccgtgcggccgcaccggcgcgcctggatgccgcggacacaacgttcccggcgctggatgaaatgacctcgcgcccgctggcgccggcacccgacgagcatgacgcgaccctccagccgcgcggcctcaccctcatccaactgcacgacaaagggtgggcgcacacggtgctcagactgccggtgcaggcacccgccgacgcacggccttcgctcagcggcaccgagcgcaacgacatcgagcttcgagacggcagtgacgcggcgggtcgtcggcagtgccgcgagtga

SEQ ID NO: 531158 - DNA, 942 bp, Stenotrophomonas maltophilia
atgaagaattcgcgtcgcaataacctgctcgccgccctgctggtgtgcctggccccggccgccgcttcggccgctgaaggctacctgaccccgtccaccaacaacggcagtggcaacatgccttcgggttacagcacgctgtacttcgagctgtctgacaccgactgggtgccgaagcttgcgctgccgaagcagcccaagcagggggatatggtcatcctcagctcgctgtcatcgaagtatgcaacgctgagctccgcccgcactgcatttgcggcgcagtcgtatatcccggtggagaacctgagcaacatcgtgctgcgctggagcgacagtcaccagcgctgggatgtcaataacggcgagtcctcccgtgtggtgtatggccagcgcaaggacacgctcgaggtgccgatgtccgatcatctggtgacccaggtgggcctgtacgacaccaccaagtgggccaatcaggtgaagctgccggcatgggcaccgcagggtgcggtgctggtcgtggccaacagcaccagcaacgatgtccaggtggggggcgatgccgttgccaacggcgcaacgtcgacctgcgagtcccgccagaactgcagcttcgtgttcggtgctgatggcaagtgggacgtgcgcgaaggcaatgtccgcgtcaagccggctgcccagttgcaggcgcccgttgctcgctggaaccacgtgttgctgggcaacccggccgtggacgtcgacatgcagccgacgatgcgcctgccggctgaaggcaacgagggcgacgtcttccagatcgccaacgtgtatggcgccaagttcaccgaagtactgccggacaacaccaacatggcgggaggtacgtacgtgccgaagggcattcctctggtgctgcgttacgacgctgcccagcgccgctggatgcagcagccgatccgctga

SEQ ID NO: 531159 - DNA, 1023 bp, Stenotrophomonas maltophilia
atgagtattgatacctggctgaaactagccgtgcttgtttgcggctctggacttgcgggcagcgcttccgcagcctgtgtaatctggggttcacccacccgtgagtttgccgtttcggcgccaatcacgatcgtaggcaatgccgcagaaccaggtgaggcattgacgtcgtggaggaagaccgatgaacaagaggtggccgcctgtggtgcttcaagccagggcgagtacttccagtatgaaggcctgggcacagaaatagggactttcaaagaaggggacaagaccttttcgatatacgacgtatccattccgggcgtaggtatgatcgtgggagtcaacaccctgagggacgactataacgtgcgcgactatcaccccatacgagccggtagcagcactactcagggtatcccgagtgcagctggccggcagacctctctctatcaggatattgccgtcaggttcatcaagaccggcaatacgacgccggatgactatgttgcgagcaagctgcagttgactgagctcacattgaggaggaatagcaacgggggggttctggatcggcagacccacgaggtcgcctcggtttcggtaacggtcgagcaccggcctctctgccatgtccagccgaagaccgtgctgatgggcatggctgcgattcccgccttcgaggaggtcaactcgaaggggcccgatgtggactattccgtcgaaatgctgtgcgaagcgagcgctggccgtgtcggatactatcttgaagaagttaccccgagcattgatcgtagccttggcatcattggaacgacgggtgaggcggtaggattcggcatccagctgctggatgccgcaggcgatccgatcagcattggacgcgcctacccctttggcagcagcagtgccgacgggttgcgcagcgaaaatttcaaggcccgatatattcgtaccgagcctgatgccagcaagctggaggctggtaggatcgaggcgcgcgtcaggtatcgtgtggactacccttga

SEQ ID NO: 531160 - DNA, 774 bp, Stenotrophomonas maltophilia
atgaacacaatgattccgggctcccccaagccgccgtccattctggcagtacgcaggatctgtgcccttgctgcgtttgtcgtgtgcgcgatagcctccatggggccagcgcaggcccagatcgccattcccggcacgcggattgtctaccccgctgcgcaacgggaagtggtggtccccatcaaaaacatgagcagcgcacctgttctcgtccaggcctggatctctgacggagcgccggatcaactgccggaggcctcaaaggcccccttcgtgcttgcaccgccggtcgtgcgactggaatcggggaaagataattaccttcgtatccgcagtatcccgacgatagccccgcgtgacagtgtggagcacctctactggctgaacatccttggagttccatcaaagcaatcagatgcttcgcagaatgtgctggaactggctgtacgaagcagatataaggtgctctatcggccagaggggctcgccccgcccggccccgatcaggacaaggctttgacattccgccttgtgggcgagggagatgtgcgaaggctacaagtatcgaaccgctctccatatgtgatcaatctgggtagcctggtggtgctcaacggggcgcgggaggaggagctggacaacccgttcgttccgcccatggcagacattgaagttgctctgcccccgggcatggccgccaccgcagaggttcgcttcgactggatagacgacgagggaaggttgcatcgaagttcccgctccattgcgcgctga

SEQ ID NO: 531161 - DNA, 780 bp, Stenotrophomonas maltophilia
atgaatctctatgtcgaagcgacggcagtaggcacttacatagaggacggtaaatccacctacggcatcttcgctactggagttccaggtcttggcctggtcgcggcgatacgctccacctacgtatcgggcctggaattcctcccccttacggagggcaacaacgggaagatcgatttccggaactcctggccctatcccgaaatgcgggtgcgttacatcaagacgggggacatcccgccgggagattacgtgagccagggcgtgatgcttggcgacattcgtgtcaatgactggtccaccgtatggttcttgtcgaggatgtcgagtcaaggcgcccctgtaaacgtgaccaaccggcccatgtgtttcccgcaggcaacgcacgtcaacatggggtcggtgccgatggcacgattctcaggacagttcagtggcagcgagccaagggatttcgatgtgtcggtccattgcgaagcggatgtgggcgatatcctgttctatctggaatccacgggtgacagtgctgtaattgacgcggcaaggggcgtcgtggcggtatctggtggtgccaggggcgtgggcattcagatgctgcatggtgagggtgccaatcaacccattccccttgaaaagacatttccgttcggcagcacgctggcagcggggcgcctcagtaaggcgttcaaggcgcgttacgtgcagacgtccaaagacgcgaaggacatcctggccgggcctgccaacgcgacgatccggctcgtgctggaatacccctag

SEQ ID NO: 531162 - DNA, 2622 bp, Stenotrophomonas maltophilia
atgatctccctggccctgctgtcaccgcttcctgcggctgccgcgggcgccccctcgaccgagtgcgacgccacgaccgagcagtgcagtgaatccccccggaaaagccgcgcctggctgtggggcggtcttgccgcgctgggcctcggcgctgctgccggtggtggcggtggcggtggcggtggcggcggtggcagcagtgttggtggtggtagcggtagcggcggcggtggcggcggcggctcgacgccgggcgccgaaggcggcagctttggcgcgggcggcatcctcgccagtgccggagcacgcaccgagtggaaccagccggtggtcacccgcgtcaccggtgacgcccgcaatgagggtgagctcaggctggtcaatggttcgctgcacgtcacccgcgacggcgagctgcgcaacaacggcagcctgaacatcggacaggccgcaacgctgcgcctggacggcgatggcgacctggaaaacttcggcgcgctgcatgtgcagggcgcgctcagcctggaaggcgaaggcagcctggaaaaccacagcaacgccagttttaccgccgcatccgtctcgctcggccatgaggccgaggtcgacaatcacgctcgcatgaccctggagggcggccaatgggcgctcaatggcgattcgaatttcgacaacaaccgcggcggtacgctggccatcaccggtaccgccttccagctgcgcgggcgtgcccagatcgagaacagcggcaccctcaccgccgccggcagcttcgcgcagggcgtgctgttcgacgccgtcaccagccagtatggcaacgatcgtgatgccatcaccgtgctcgacaaccgtgggcatatcagcatgcagggcgacgccggcgtgctgcgcatggtggccgacaccttcgccagcaacgccgtcaaccgcagcggtgcaaccgtgcagagcagcgcagtgcgcagcaatctgctgcacgctgagggtgcgcaggccaccctgctcaaccagggcacgctgactgtcaccggcgacggcgcagtggccatgtccggtgcccgcggcgccacgctcatcaacgatggcatcatcaacctgggcacggcgaccgacgctgcgggccgaggcctggtggcgatgaagtccgatggcagcgccaccctgaacaatcgccgcaacggcaccatcaacatccacgcggccgattcgtacgccttccaggccggctcgggcagcgggcggctggtcaacaatggcaaggtcaacgtctacggcgcgggcagcggcatgtatgccgacgcgaccaccgccgccgcaggcgccatgggcggtgccgacctcggctggcaggcaccgcgctccatctccaactacacggtgggtaccaatgaagacggctcggccggccagttgaacctgcatggcggcggtacgctggaagatgtggctgtggataccggtttcacccgcggtaccgatgcctccagcatcaccctgcacgatgtgatcatcggggccgacggtggcgccgcgaacgtgcgcagtgccactgtcgtctggaaggccgacgcccagcagcaggccgacggcagcatcgatgtgacgatgcagcgcaaggactaccgcagcctggcaggccaggaccaggcggcaatcgccgccgcgctggaagagagctatcgcaacgaagcactgttccacagcctggaggttgccgaccaggcgacgttccagaatgcactgcaccagctgtcgggtgccgatctggccgcgcgcagcatgcgcggtgccagcaacggcgatgcgctgtgggcgcaactggcggcattgcccgcacagcgctcgagcgtggtcgcctttgggggtggcacgaccaatgcctttggcatccagggcacaggctccgctgcgcaggttgccgttgccctcaagggcagccactcgctgcaactgatcagtggtgcgttgaaggctgaactcggcagcggccaggaccgcggtcattcgcgcttcgccggcgtgggcctggccagccactggggcagcgtccacctgcgccaccagttcggtttcgaacggcacgacctgcagggccagcgcagcctggcatggggccagacccgcgaagtggccggcagccagcggcggatgcagcgcatgctgttggccagcacgatcagccatgacgcccgcgtgggcaacctgcattggcagccgcgcctgaaggccagtgcgttccagctgcgcgaggcggccttcagcgaaaacggcgccggcggcttcggcctgcaggtggccgctggccagacccgcggcctgcgcatggaagtgggcagccagttccactacgcgctggcctcgaacctgagcctgcgcgctgacgcctcggtcacccgttcgattgccgtacgcggcgacgcccgcgaagcgtcgctgctcggcgcgtcgtcgaacgcgttcctgctgccgggtgttcgcgccgatgggctggaccatcagctggcgctgggcgtggactatcgccgtgatcgcctgtcgatgggcggccaggtgctgcagcagcgcctgtgggggcagaacgatgcccgcgccgagctgcagctgggttaccgcttccgctga

SEQ ID NO: 531163 - DNA, 906 bp, Stenotrophomonas maltophilia
ttgaaccgattgcgaacattcttcagtgcgtaccccatccacttcgcgatggccgccaagctttacgtgctctgcctgtatctgcccgttgcccgccgcctggtcgagttcgggcaccgcctggggccgcccgaggcctcaggagaaatcggctacgcgctggcggagctcggcttcaggctgagtctcttcgccggagcggcggtactggtgtcgatgctgctgttcgggcgtcggggtgcgctgcagatccggcacccgctgatcgcttcgatcgccttttttgggttgctgatcatgctggatcgcgcgatgcgcattccactggcgcaggcgccgtttgccgtccacagcgccgccgccatcagtctgggcctgcttgcgcatgcactgttcctcacgctgctggcattggtgccagcgctgctgatgcagcgacgcgcacgtgccgagggcaggcaccatcacctcatcagtgccagcatggccggcgccctgacgctgatggctggcagctccgtggtccccattttggtgttgcagctgcctgtgggattctcgccaggtgagttcatcatgcccgttgccggcggcgccgcgcagctgcagtttgcgagcctgatcctgctggtggcctgcgcgctggccacgtttgccggcctatgggccagcgcgccgtcgccggaacccgcatcgacggcgcgcacgatggtggtgtcgctgatcctgcttgccacgacgctgctgatcatcctggccagcatggcgtacctgctgcgaacgctgtccgctggggcgccgacgatagggcgcgggcttgtcgttgccaccgtcgtcggcgccgcattgcagttcgtgtttgcgagagtgctggcgtcacgatggctgcgcgtgcaggcatcgtga

SEQ ID NO: 531164 - DNA, 507 bp, Stenotrophomonas maltophilia
atgagcgcgattgtcatggcctgtgtctacgcgctgtggctggccgccggctcgctggacttccattttcaccggcgaaccgacctgccgcacacttccgcgatgcgcgaaagcctcctgcatggggtacagcttctgctgatcggcagcggggtgcttgcgtggctggcgctggaaaacacgttgtccctcgtcacgttcctgacactgctggtcatcgcacacgcggtcgccggctacttcgacaccgtcagcgcggacggccgcaggcgcattagtccagcggaacagcatgtgcacagcgtgctcgatgctgcaccatgggtgctgctgggctggatcggctggcaggccccgtcgcggtggtcgctcaacgtgaaggctgcagcaccggaaatctggtgcctgatactgctgccggcgctgggcctggtggtgctgccatggttgtgggagctgctgcagtgtttccgtgcacgagaacagcggcggcaggtgggcgcgtga

SEQ ID NO: 531165 - DNA, 333 bp, Stenotrophomonas maltophilia
atgcatcgccctgatcctgcttcgccacgtgtgctccgtgttgagagcatgtcactggactgcggtggtgccgccgtggttgcagagctggaccgcacacctgaacgggcgtggatgaagtcgttgaagcgagcccttcaggctgacaacgttctggatggcgcgcaggccaagtttgatggccgcttcgtgtacgtcgtgggcatggaagagagcgggcatcgcgtccagcatcgcgtggtgcaggcgctggtgtcggcggaaccggggcgtgacccgaccaggctcaagggtttcccgggtgcggcgctctccggttcggtgaccgcctga

SEQ ID NO: 531166 - DNA, 468 bp, Stenotrophomonas maltophilia
atgccccttcgtgcgattgcctatgtgagtgaagcctcccgcaacctgaccgcagagcggctgcagcagcttgtggcggaggcagtgctgttcaatgaatctgtcgatgtcaccggcacgctgttgttcgatggctcgcgcttcctgcagtatctggagggcccggagtccggggtcaatgcggcatacgcgcgcattctggcggccagcagccacagcgggatggtcgaactcaaccggggcaggctgggacggcgacagtttccgcactggcggatgaactgcgtgagggtggatgagctggcccttggaaaaatcgccatttccgactggacgggtttcgtgcgcggcgcgtcgatgctcgcccctgggaccagcgcgctcgatcggctgcagtgggtggcgcagtcgccttcggaaggcggtggcggcaggttgctggaaccggacggcccgacggcgcgatga

SEQ ID NO: 531167 - DNA, 768 bp, Stenotrophomonas maltophilia
atgaacgcagcgccttccccgaatgcgccaggcctgatacgcatcggctgcgccggctggtcgttgtcgcgggctgggcaggcagcgttcggcgcaggcgccagcgtcctgcagcgctatgccacccgcttgcccatggtggagatcaactcttccttctaccgtccccatcaggccggaacgtatgcgcggtgggccgcgagcgtgccaggcggtttccgcttcgcagtgaagctgccacgcacgatcagtcatgaacgccggctgcgcaacgcgatgcagccgctggagcagttcctcggcggcgtgatggcgctgggtgacaagctgggtccgctgttgcttcagctaccgcccagcctggaatacgacccagcgacagtggcggagttcctgcagggcctgcgtgtacgcaccacgcgtgatgtcgcctgtgagccacgccatcccagttggttcaccccggaagtggacgccctgctgagtgaccatggtgtcgcccgggttgcggcggaccctgcacgggtgccagcggcggcgattcccggcggataccgcacgtggagctactggcgctggcacgggcaaccgcagatctatcggagcgcttacagtgagcaggtgcttgagggcctggcacagcagctgcagcgcgaatccgatgcgcaacgtcccatctggttcgtgctggacaataccgcgctgggacacgcctccggcaacgccctgcacctgcaggccctgttgcgtgagcctgcgcatgcctga

SEQ ID NO: 531168 - DNA, 213 bp, Stenotrophomonas maltophilia
atgaacggtgatggtgaccggattcaggctgatccgcatggcaacaacgtggccttcaactgcttcgattgcgagcacccgatagtggcggtcgcactggagaaccagagaggcagtgatgaagagcatccagcggtctgccgcggctgtggtgcagagtactttttggatccacggcagggttcgagcaaaatgtatatccacatgctctga

SEQ ID NO: 531169 - DNA, 180 bp, Stenotrophomonas maltophilia
atgggtaagggtgaccgcaagaccgccaagggcaagcgctacaacgccagctacggcaacgcccgttcgcacaccgtgagcaaggtcgccgtaggcgccgccgccccggttgccaagaagaccgtggccaaggctccggcgaagaaggctgtggcgaagaagaccgtcgccaaggcctga

SEQ ID NO: 531170 - DNA, 1026 bp, Stenotrophomonas maltophilia
atgacgtccaggatattcatcggcctcagcggcccaacgttctacgattatcagaatccagcgaaccagacaaggaatgatggcgtaggcgctccgaatccgatccttgaaaattcgttggcgctaacagtgttctatgacgaaatctggttcctttgcgaaagcctctgcccgcaatccctgcgcggccatccaagcatccgctatctggaccgggaaatcgacaggcagcccactcatgtccaggacaacgtaaggagcgcactgaaactccccccggactacggggacgacggcatgcgcgaggtgatccgtcggaactttgaagaatattggccgaaagcagaacatgccggagcatactggtgggattctgaaggccgaagaatcgacaatcacacgcgctcgcttgacattcttggcgtccattgcattgccaactccaactcacccgccacccttgcaactgatatcgcagttcacaaggcgcttgagaaatcactccctaccacgctctcattgaactccttctcgcaggctctttttgccaaacgattcccaacacagttccatccaacccgggacaaaaacaccagggacaggaccggaagctttgtaatcaatgcaatggtcgacaactgcgtgtcatttcagggacctgacccggtcatttttgatcgcattgccacaagtgattacaccaagcaattccgcggttacatcgcgaacaagaacattgaggatgcggcgagaagctaccttgatgtgaccgccgaaattcgcgatgccacgacaagggcaatcaggggtcaggccgaccaagcccgtgtggttcgagggctggcctcagtttttctcgatgtggtcattgatgctctcgggatcggaacgtacttgaaagcctcgaaatggctctatggattggcctcccctccccctatctcagcagcggccttccttctcgacctccaggagcagaagcccaccggcccaaactccgattccaatgagcagcgatccaagtaa

SEQ ID NO: 531171 - DNA, 642 bp, Stenotrophomonas maltophilia
atgaagcagacgctcaaatcaggtccagacgtctccctcaggcgcgatccaaaccaatccaaacggagcatctgtaagaaaccaaagtccgtcctcatcgagatcttcctgatctcttgtgctaggccacgcacggcgcagaacacccaattgcgcatcgatatcgccatcggcaaagacgccgtccgaggcaagtttcagcttcccttcctccatcagcatcctaagcatagaaaagaactcttccgtctgccgctcaaacgccccctcaaactccatattcatatttctccacagaacccccatggagcatccataagagtaatgaagaacattcctgatcgtgtcagaaatcatttgaactcgacgcccacaattctatacatccagcgcgcaatttactccaatggtatcggcattgatacccagctctgccaccgacgtccgtttacctccgatggcggcattgctctcggtcaacgtggcaagagggtagagccgctgtcgccagttcaatcaagaagaaatcgatataagagaaccttcacgccacgccactcccgacatagaaaacaatctatcaatctcctcaaaaaatcccgacgcgaacacgggcccttctgcagaaatcaaacatcttga

SEQ ID NO: 531172 - DNA, 393 bp, Stenotrophomonas maltophilia
atgaccctccacctgcagatcgaaggcgcggccattggcgacattcccagcctctatgccgagatcaaccgcgtattcatgaccggcgaggactggcaactggggcccagcctggatgcgctggacgacctcctctacggcggctacggcgccctggccgggcatgcaacggccaccgtggtctggcgcgacatcgaacacagccgtgcgtcgctcggcgtggatgccaccctggcatggctggacgcgaagctggagcaacccggcaccttcaacgccgatgcgatcagccgtcagcgtgccgcactggcgcgcggcaatggccagacctatttcgagatcgtgatggagatcttcgccgggcatccccggatcaggctggtgccggcctga

SEQ ID NO: 531173 - DNA, 447 bp, Stenotrophomonas maltophilia
atgataaccaaaccattcgttggcgtactgttggtgctgtgtgcgtttgcagcatcggcctcggctgccgagaccaagtgcgtcaccgtcgagcagggctgggtacggttgttgcccaacccgaagatggcaatgactgccggttatgcagtgatccgcaatggctgcgccactgcggtggcgatcaccggtgcacgcagtgcgagcttcggcgatgtgtcgctgcatgagaccacgatcgtcgatggggtcagcaggatgcgtgaggtccggcgcctgccattggcacccggcgccagggccgtactcaagcccggtggcctgcacctgatgctgatggacggctaccgcaccctggaagaggggcagccggtgtggctgcagctgcagctggaggatggcaccgaagtcagcgcggtgttgaacgcgcgcagggcggcgccgtaa

SEQ ID NO: 531174 - DNA, 735 bp, Stenotrophomonas maltophilia
atggctgagtcactggccacactgcaacggcgttgggccgaccatgtgcgcgaccctgcaatggccgcacccgatggcgtcgaggcgcgccggttggcggtgtaccgccgcctgtgcatcgacagcctggacaccctgctggctggcaccctgccacgcctgcaacaccagttgggcatgccgcgctggcgcgacacggtcgagcactactacgcccgccacacctgccacaccccgttgttcccacagatcgctggcgaattcgcggcctggctggcagtgcaggacacactggcactgccggcctgggcagcggaactggcgcactacgagagcacgcagcagtcgctgcacattgaagcccgtggcgccgggcaatcgctgcagtgcacgcccctggacagtgatgtgctggcgatttcgccgcaggtgcgggtacttggctaccagtggccggtacatgaggacgaggtgctggtgccggtgctggatgcagctcccacgctgctactgatgcgccgcatgcccgatttcagactgcaggtcgaggaactggccccgctggcctatgcgctgctatcggtcttcggtgacgacggcgcgcctttggatgaggcactacaggtactgtccaaaacacatgacgtggcaaaggatgcactgcgcacggcatgcgccccccttctggaagagctgtgcgcggcaggcgcgctggttgtgccgaacgactgttga

SEQ ID NO: 531175 - DNA, 1143 bp, Stenotrophomonas maltophilia
gtgagttggtctacgaataatctcggtgaccttgttgaaataaagggcggaggaacaccaagtaagtcagtacctgagtactggggaggggcgattccttgggcgtccgtcaaggatttcaagggtgggacattggaaacaacggaagactgcataactgaactggccgtcagttcttcttctacatgtcttatccccgcggggagcctcatcgttccaactaggatggcccttggtaaggtcgctataaactcagtggaaatggcgataaatcaggatctgaaggctctgcgggtcagggatgagtctaggttgttggttcgttatttgtatcgatttttagaatataaatctggatttttgcaggagcagggaaagggagctactgtcaaaggaataacgctagatgtgctcaagggattggaagtcccgctcccgcccctgtccgaacaaacgcgaatcgccgccattctcgacaaggccgatgccatccgacgcaagcgtcagcaagccatcaaacttgccgacgacttcctgcgcgcggtgtttctggacatgttcggagacccggtgaccaattcgaagagttggccaatgctgcgcgtagaggaactgtgtgaaattgtcagagggagctcccctcgtccccaaggtgatccgcgcttctatggcggtcccgtgcctcggcttatggttgcggatctgactcgtgacgggaaattggtaaccccaaagattgactccttaacagaacagggtgcaaagaagagtcggccgattgaagccggaactgtggtcatggctgtaagtgggaacgtcggattaacctctgtgctcgccattgatgcatgtattcatgacggttttgttgccttcaaggggcttgatacatccaaaataaggcaggaatttctttgtgagatcatgatgtttttaaagtcaactcacgaatccagaaaggctggggccatttttcagaacttgactacttcccaaataaaagaaatgcaaattccagtccctcctttggcgttgcaagataaatttatatctatcaatggtgcgataaatagaatttatgatagctgtgatttttcgatatttgaatctatcagcacaagagttttcaacggcaagttgtag

SEQ ID NO: 531176 - DNA, 1839 bp, Stenotrophomonas maltophilia
atggaagccagtcaatggactactgacgtcatcgtcatcactgccgtgcttgcattgatttgtgtgttgctgggctatttggtggcgacattgcgtcaggggcggcagctcagtctgctgcaagcccaactcgagcaggctcagcaggcgctagcagcggcagtcgcgggcagtgccgcgctgggtcagcagctcaaagccgcagaagcccgagccaatgatttgcaggttgcagattccgcgttgaaggcgcagatgcaggcagccgtcgacaatgtgagtcggttgacgcaagagcagctggacggcaaagacgtgcaggctgaattgcggcaggatctggaggatgcccacgggcagtatcttgaagcagtcaaaggcttggagaccgcccaggccgaaggtagggcgttgcaggagaaagtcaacgacctggttgatcgtctggctaccgcccaagcatccaatatctccttgcaacgtgagcgcgacacgctcaaggaccagctcgccaatcaggatgcccttgccaaggtggcagcaattggcgaacgggaagcccgcgagcaacttcagggcctcaaggcgcagcaagtggttgctgccgagcgctatgaaacgctccaggctcgctttgctacgcagagcagcgaatacaccaaactcaagacggagctggacgagcgtgaggccagtcatgcacgtgagttggccaatttcgaacaacagaaagccagcttgagcgaacagttcagattgctctccaacgaaatactggaagctaaggcccaagccttgcaggaaagcagcaagctcagtctgagtgccgtgatgacgccgttccagcagtccatcgaaaccttcaagctagaggtccgggagatccatcaccgcgaaaccacccagcagggtgagctgcgcaaagagctggagcagctgaaggcgcttaaccaacagatcactgccgaggcccatgagctatccactgcgctgcgcggtcaaaagaagctgcagggcaactggggcgagctggtgcttgaaaacgtactcgaccgctctggccttcagctgggcaaggactaccagcgcgaggtcagcattactaccgaagaggggcgccggcgcccggatgccgtggtttacctgccccagggcaggcatctgatcatcgacgccaaggtctcgctcaacgcctatgcccgctacgtgaacgcggaagacgatctggagcgcaagcaggccctgaaagagcatgtccaggccgtcgccagccgcatcaaggagctggctgaccgtgactattacaagctgccggggctcaactcgccggacatggtgttcatgttcatccccattgagtctgcgttcgttgaagcgctcaaggcggatgaaaccctgtttcagcaggccattgaaaacaatgtgctggtggctacgccgactaccctgctgaccagcctcaacatcgttcgccagctctggcgctatgaggatcagaacaagcacaccgccgcgctggccaaccgagcagagggcgttttcaaaaagctcaactccttcctggccagtttcgagagaatcaagaaggggctggaaagcgccaccgaagcctataccagggcggaaggccaactggtcagcggcaaaggcaacctcgtcaagcaggtgggcgaattcaagaaccttgcacccgccattaaggcgcagctgcctgcctatttcgccgacaaagccgcgctggaaatcgattttatcccatctgagcaaagcatcgaagcgcttaaccgcgccgctgacaatgaaggcttgctcgacgaaaacgacactgaaactgagtaa

SEQ ID NO: 531177 - DNA, 195 bp, Stenotrophomonas maltophilia
atgaacgccccaacggcccctcattcccgctttgcgctgatcttcctggtcgcagccatcgccgccgcgctggtgtccatgcacctgctgcgcgcggcctggcatctggcgcagcgggcgcgacagcagggccgttcggcatggacgttcggagtgccggcggcgctgggcaccgtcgcttcgatcgtggcctag

SEQ ID NO: 531178 - DNA, 534 bp, Stenotrophomonas maltophilia
atgtgcaccttcatcaccgtgttcctgcccacctcgtttgcgcaggttgaagccgccgcgatcatggagcgcagcggccggcgcctgttcgcccaggcatcgcccagcctgcaggccgccgtcggccccggttggcagccctggttgagcgcgggccactgcgattgcggtacggccctggcatcggcgcaggctgggccgaagtggaagggcgatgccgaacgctggcggaagaagggctggagtgaagcgaagatcgcccgcgcgcaggccgagcagtcggcgcggcacgagcaggttcagcaggcgtgccgcgacgaagcgctggtcgatgccagccagtggctgcagcgcatcgatgcgctgctgggggcaggtgcggcgcgcatcgggcttctggtgcgcgattacgacggcgcggtgggggcccggcagccgaagccgccggaacgtcactggtcgcgagcgcgcttggcggcgggggatctgctggcactccagccgggcaccctgcattgggtggaacccaggtga

SEQ ID NO: 531179 - DNA, 1005 bp, Stenotrophomonas maltophilia
atgctgcacgcgtccgtagcttcactgctgtttccgccccatgcgcgccgcacagtgcgggggctgctgctcgtcgtcctgccgatgatgctgctgccagccaacgcagccgagcgcacccagccttccgcgcgcatcgtggtacagacagacgacgtcacacgtttcttcagcgtgctcgatgccagtggaggaaaaccgagtgccgaagatctgcagcacggctatctggacaccggcacggatgcattgcgcagtttcaccgatagccgcatcggctcgatggaacgtttggccaggaccatccaggacaagccggcgttgttcgccaaggcgcgcacctgcgcgacggcgctgccggagatccgctcgcgggttgccaacgcacttgatcggttgggcacgctgctcccctccgcacgatttcctccgatcaccgtactggtagggcggggcaacagtggcggcgtcaccaccgaggatggtgtggtgatcggattggaagcactgtgcaacgctgactggatgcaggccgatgtgagcgatcgattcgtccacctgatcgcccatgagtacgtgcacgtgcaacagcccggtgcgagcgtcgatgtggcgcagcccaccctgctctatcagacgttgcttgaaggcggcgccgagtacgtgggcgaactgatctcagggcagccggccaacacgcatctgcttcgttggacgcagggccgagaatgtgcgctggagcgtgcgttcgtgcaggacagtgcaggcaccgatcattcgcagtggctgtacaacggccccggtgatgaagcgcgacgcggagatctcggttactggatcgggtaccgcatcgcccgcgactatgtttcgcgcgcgccagaccggaccaaagccatcgccacgctgctggatgtacgccccgacaccgccgcgaccgtgctggaggcgagcggatggcagcctgcctgcattggtggaaaaggtgcggacaggcatctgctgtga

SEQ ID NO: 531180 - DNA, 843 bp, Stenotrophomonas maltophilia
atgcaagtggaactgaccccttacgaacagcagcaatggaaagcaatcgtcgaatggaagaatgaagagccttcggtcatttcccagaccgccggaaaagcacttgcaccggtttcatggttgatcggaaaagtggttcctgaagccgccatgcggggcatcctcgacctgtcttcttcagcggctgaatggcttaccgacaccggcgacctcacccgtgatgccggcgtctccagcttgaatgaactgaagacgctgggccttcagcggtcggatgaactggccgacgaagtccacaactgggcgattggcatggccggcgcggagggtgctgctaccggcgctgcaggaatcttcggcatcgcggcggacattcccatggtgcttgtgctggcacttcgtacgatccacaagattggtgcctgctacgggttcgaggcaaagtcgaaagaagacaaggacttcatgctcgcaattctctctgcgtccagtgcaaatgaaatggcggagaaaacggccgcattgactacgcttcgcatggtccaggtcagcatcgccaaaacgacatggaaaaagcttgcggagaaggctgcaacagaccgattcagcaaagaagccggcgttatcgcggtcaaaacccttgcaaagcagctggggatcaacatgaccaagcgcaaggcactgcaagccatccctgccattggtgcggtggtgggtggatcggtcaatgcctggtatctgaaggagattggctggtcggccaggcacgccttccaggagcgctggctccttgagaacgggcgcgcgcttgaggacgccgaactggcagtcgtcggaggctga

SEQ ID NO: 531181 - DNA, 642 bp, Stenotrophomonas maltophilia
atgtgggcaggcaggtcacaatgctcacccatgctgcggcagatgaaagaagcgatgacgatgcggctttcggaattgaaggacgaactggcgcgtttcggcgccgaaaacgacgggcgtgaaaccgagcggggccgccgcatgctcaacatcacgccggataccggtgaattcctgtcggtgctggtgcgtttcgggcaggcgcggcgcgtgctggagatcggcacctccaatggctactccacgctgtggctggccgaagcggccgccgccatcgatggccacgtgaccacgctggaatctgctgacgacaaggtggcgatggcgcgggcaacgttcgcgcgcagcggactagccgcgcacatcacgctggtgcagcgcgatgccgggctctggttggcgcaggccgctgatgccagcatcgatctgctgttcctcgattcggaccgcgaacagtacgccggctggtggccgcagctgcgccgcgtgctgcgtccggggggcctgctggtggtggacaacgccctctcgcatgccgagcagatggcgccgctgcgcacgctgctggatgccgatcaggacttcggcaccagcctggtgccggtgggcaacggcgagctgctggccgtgcgcaacgcctga

SEQ ID NO: 531182 - DNA, 774 bp, Stenotrophomonas maltophilia
atgttccttttcggtgtctgcaccgttttgctttcaggctgcactactactgcggttcccaaaggggttgcctcagctggatacaccgaagttgtttctgttcctctgggccctctccgctacttccacactgcttccctgcttcccgggcgaaacgccgtaggcactacgcacgtccaccgctgtgcaaacactgagcggagcatcagcctgcagatcgcggatgggcttgtgatcgttgctgaagatgtctgttcacggatcgatgcggcggcggacctggccgagtcatggataccggcggcatccaacagctatcggatcctgctcgtgccggaaggcactgcgggggcaatacggacaagatcgcttggccgctttgcgacaggcaggacgcttgcacttgcatcgcacgtctacggcgatcaacgacaagccttcgcggatctcgttgacctggttgcgcacgagagccttcacgcattggggcacgctaccaggcatccgcgagcgcgcgacgaaagaagcgcctactacgcagggctgtgtgcccagctcaagatcaacgggctcatcaaggaagagagcttgcccggagccccgcttgcttcaggtgatcgggcagtacgcatctcgtcccagcaggcctatcgtgtgcggcttgagacctatccgttgctggtggacggcaccatccggcttggaacgccatccggcgagtcgatgctgcaacggtgccagcagattggaaacgagttgattcgtctgcagtag

SEQ ID NO: 531183 - DNA, 300 bp, Stenotrophomonas maltophilia
gtgattcatcttgaagaggcacgccgtcgcgtagaggctgcacttgtcgacgacgaagaaccggttgtcattacgaacgagcatgaggtggtcgaaggctggctgttctgcttccagtcgttgcgctacctgcaatccggcgagatctcagacgcgctggccggcaatgggccgatcttcttcgacaggcagacgggcgagcagcacgcgctgggcacggcatatgcgcctgaagaagccctgcgtcagcatctggcactgcgcgccctgccgtctgatgccgcggcggcggatttctga

SEQ ID NO: 531184 - DNA, 390 bp, Stenotrophomonas maltophilia
gtgagcggtaccggccagcccgccgatgtggcgctggctgccgaactggaggcgctggagcgtgcactgcatgcgccaaacgtgcgggccggccgtgagcaactggcggcattgctggatgaggatttcagcgagatcggcagttccggccagtgctacgaccgtgcggccgcgttgcaggagatcccgttggagcgtgcgcaggtgcagatcgagtccgatcagtacgcggtgcggctgttggccgagggcctggcccaggtgcgctaccgcagccgccatcacctcgatgggcggccgcaacgctgggtgctgcgcagttcgctgtggcgccggcacggggacggatggcgcatggtgttccaccaaggcacgcccgaggcagggtag

SEQ ID NO: 531185 - DNA, 276 bp, Stenotrophomonas maltophilia
atggccacttacatggttggttatgacctgaacaagcagggcaagaactacgatgggttgatcgccaagatcaaggaaataagcaacggcttctggcatcaccttgattcgacttggctcatcggccatgccggcaacgcaatcacgatccgcgaggctcttgagccgtacttggatgctgatgacgaactcctggttgcgctgttgaccaaaggtgactgggcttcgttcggtatcaaggaatctggcgcgacctggcttcacaaccacctttga

SEQ ID NO: 531186 - DNA, 1056 bp, Stenotrophomonas maltophilia
atgggttttctgagtgacgaggagattgcatctcttcggattgcaaagatgaactatcagatcgttggcgatgaggagttcgctcctcggcgaccgatggcaaatgtcgagttcgagcacttcttcttggctcgcattgcggacatggacgcatcatcgctgtttaggttctcagagcactccgctgcccgtgatctcgttcaacgcattgcctcggaacgtgttcagtttgcccagggtggcgtgcagctggcgcgagattttcatggccgtcatgtggggcaaagttcgtctggggcattcttcttctttgagctgcatgtggcagacgaatcggtccgcctgtactcaatgctcaagtacgactatcgcgaggttcttgcaccgtccagatcgaatggctccaggcagctgaggaagatcgttgaggctttcgttcaggataagcgcgccctgcagaagtcatgcttgataagagtaagggacgggattgcagaggatgagatttcggcacgtgatcgaaatgggaagtcgcccgatatcactgacttcttctccgcctttctcagcgtagagagatcacgagacgacaaggagcttaatcagcaggtctatttggccctcacagatgttctaaagagtcaccaagaacttctaccggaggggggcatatcgcaggcccttgcggtggctagagagcggcttcgcactgcgtcagtgatcagtgattcaacggcgcttgacgcgctgatgctggcagcggggcgtccgagtgagccggaatttgctgagtcgctggagaaggctctgcagcgttccatgaagaggcgcaaagtctcaggccttgagtttgcgccagacgagaatgtcctgaagaaatcggttaggaagaagctctccaccaaggaaggggtcaacctggattaccctcagtatctggagggatcacgtgtaacaatggaggaccttccgacaggtggacgcaagatcactatcacgaccgaccgcctggaggtcgacaaagttgtctccgagaccgctcgcgcgcttcgttaa

SEQ ID NO: 531187 - DNA, 1308 bp, Stenotrophomonas maltophilia
ttgtctccgagaccgctcgcgcgcttcgttaacaacctgctcgctgcccaagcggcatccgtcactgaaaccggtgacggtccgctagtactgcatggagtcagcttgcaggccgctgccgacctgcgggaatcagcggaggacattggttggtcgtgcactttggtcgattgctcggacatggaggtcactctcggtgacttgagtgattactgcgagccttttgatgtacgaatagagaagattggttcgcctgacgagcttctctttatctcggcgcctggattccgagaatggttggaggggcgcccttgcggtaaagctcgttatgcaggagccacagttggctttgagaccgagtcctttctgctcttggcggcggaggatgaatcgcgcgaattcacgccaggcttagagcgtaggagtccgagggcggtcgtcaaatccatgggtgaaacgcctttgctcgctgcggacattcggccgtacattcttgtgggctcgaatcatccatggtcgcagccggcgttcggtatttggctcgaggttgcgctgccgcggctaatggtcgcattggctacggaggtgaactacgtcagttcagagatagattttgccggtccacccaaagtcacgcttgaagggatcgacgtgtatgagccggcaaaactaggcgcggatgcctttcttgcgttgcagtctgccgccaagtgggtctacgaagttgaccgagaggtcgagacccggaagaagctcttcgggatcgagttcgcaagatccatcaagagccgcgcaagggcgtatggcgcttttggtgagggatgcagcgatgcactcgaaggggcaaggatcgcacatcagtttggacttgctgaagtaagcagagacgcattgaagtctatggcggatctcagaaagtccgtagcagatgagacaacgaagatcgcggatgcgacgcgtcagctctcactgagcattgcgggtgcaatgttctacggtctgggtttgattgctgcacgcctagggtctgctaccaacctatatctgcttgatgccatggcggttgttggcttgggatacgtggcggcaatcatatggatcactcataagaatctgaagcagcaagaggacttgcgcaaaagatggaggggtaagttctacgagtttcttcgtacggaggactacaggaccatggtcacagagcctctagagaagtccgagggctcactgcgattcgcaatgatgtgcgctggggctttgtcgttcttgttgttcctcgtggtggttgtacacaatcacgttgcttga

SEQ ID NO: 531188 - DNA, 396 bp, Stenotrophomonas maltophilia
atgctgctggtgctgctcgccccgttggtgagccgctggctggcacaaggccacgtggtcgctgccgcaccggtggcagccatgggccacgcgacgcacgcagagcatgcgcagcacgcgatggagggccaccgcggccatcacgcgatggcgatgcggcacgctgaaccagcgccgaagccggctgccgatccacacgccgaccatgggatgggcgtggactgcgattactgcctgatcgccgcgcggttgatcaccctgctggtggccgcattgctgctgctggcgccgatggaaccggtctgccgcgcgttgcgcggtgcagtgcgggcgttgccgcaacggatcagcggcacattgggagcgcgcggaccgccggccttcatggccgcctga

SEQ ID NO: 531189 - DNA, 2532 bp, Stenotrophomonas maltophilia
atgccttcttcccgttccgccgctgcccgccgcccgggcagcatcgcccacaagctgatgctgggcaccgccgtgatcgcgctgctgtgcttcggcctgaccgcgttcctgatctaccgacaggccagcgccagcctgatcagcgcatcgcgccagaccatgaccagcgaggccaccgccgaagcacgccgggttgcggccgatcttggtacggccttcgccagcaacgatgccatggtcgaaagcgtattggcccagcgcgcccgtggtgatgtcaccgatcgcgccagcctggccgccgtgctgggtgagcagctgcgcgcccatccggaatggctgggcaagagcaccatgtgggaggccgatgccttcgatggcagggatgccgagttcgtcaacaccgaagcgcacgatgccaccggccgctacatgagctactgggcctggcatgacggcaagccacagcagtcggtgatgaccgactacaccgagactgccagcggttccggtgactggtacatggcgcccagccgcgacaagctgccgaaagtcagcgaaccgtacgcctatgacatcgccgggcagcaggtgctgatgagtacgttgagcacgccgatcgtcgagaacggcaggttcctgggcgtgttcaccgtggacttctcgctggcggcactgcagaagcacctggccacgctgaagccgatgggggccggccgggtggaactgctgtcgccgaagggcgtggtgctggcctcggccaatgccaccgagatcggcaagccgcgcaacgatgcactgacccgcagcatgctggccgacatcgccgccgatcgtccgttcgaggccttcagccccgatgcggccggcaacgtgcgcgtgtacgtgccgttgcgcgtgggcaacgccccgcagcgctttgcgctgggcgtggtgatgccgcatgcggtgatcgtggccgaagcgcgccagctgttgtggctgaccctgctggtcggcgtgatcgcggcgctgaccctcagcgccggtgtctatgtactgctgcgccgcctggcgatccgcccgctcgccgaagcggtgcgagtggccggcgacgtcgccgccggcaagctggacagtacgctgccggcgcgcagcaacgacgaagtagggcgcctgctggatgcaatgcagggcatgcgtggccagctgcaagcggtgatggccgcgcaggccgaaatggcgcgccgccacgatgccggtgaactcagctaccgcatggatgccgcggcgttcccgggcgagtacggccgcatggtggccgacagcaaccagctggtggcctccagcaacgcggtcacccagcgcctggttgaagtgatgcagcgttatgccgtgggcgacctcagcgtggacatggaagcactgccgggcgagaaggcggagttcaccgctgcgatggcgaccaccaagcacaacctggctgcgatcaacgagcagatccagcagctggccgccgctgccgccgccggtgacttcgccgtgcgcggtgatgcactgcgcttcgaccatgatttccgccgcatggtggagaccctgaacaagatgatgcaggtcagcgaccacaacctggctgcgctgtcgacgctgctgcgcgcgatcgccgccggtgacctcactgcccgcatgcagggcgacttccacggcgtgttcgcggtgatgcgcgacgatgccaacagcaccgtgcagcagctgacccggatcgtcggccagatccagcagtcggcagccagcatccgcctggccgctggcgagatcgctgcgggcaacagtgacctgtcgcggcgcaccgaacagcaggccgccaacctggaagaaacggccgcgtcgatggaggaactgacatccaccgtgcgccagaatgccgaccatgcgctgcaggccaacgcgctggccggttccgcagcgggcgtggccagcgaaggcggcgaggtggtcggccaggtggtgcacaccatggaacagatcgaggcgtcgtcgcagcgtatcgccgagatcatctcggtgatcgatggtattgccttccagaccaacatcctggcgctgaacgcggcagtggaagcggcacgcgccggtgagcagggccgtggtttcgccgtggtcgccagtgaagtgcgcgcgctggcacagcggtcggccggtgcggccaaggagatcaaggcactgatcgacgcctcggtggcgcaggtcggtgccggtgcacagctggtgcacggcgcgggccgcaccatgcaggaaatcgtcggtcaggttggccgggtcaacgagatcatggccgagatctcagcggcctcgcgcgagcagtcggccggcatcgagcaggtcaaccagaccgtggtgcagatggacgaaaccacccagcagaacgccgcactggtggaggaagccagcgccgccgcccgcgcgatggaggagcaggccgagcagctggcggtggcggtgtcgcgcttccgcctgcaggccgagccggaggccaccgcccgccgcgcggcgtga

SEQ ID NO: 531190 - DNA, 321 bp, Stenotrophomonas maltophilia
atgcttcgtttagtgattgctgtagccgtgctgctgttgctcgtcactcctacccgagcccagcctgggccagtgtggttccaggtcaacatgagctgcacctacacacccgttcaagcgcgatgcgtgatcgtcaacagcagcagcctgcccatgtattgtgacctgcgcgcagatgccaagctgatcacgggccatttcctgtatgcgtacatgaaagactgggttcaaccgcaggattggcgccacgtgttcgtgtactcgaatccgccgaatccgccgatacaggccgtggtgggtggcgggatgtgccggcactag

SEQ ID NO: 531191 - DNA, 1137 bp, Stenotrophomonas maltophilia
ttgaacgattcactgctaaattgcgtgtactgcttgccaggagatgtctcgacgtttcccgtgggcaaggggtctgaagaacatgttctgatcgcagcgcttggaggcaagaaggttacgagaaatctctgctgccaaggctgtaataatcgacttggtacggagctggatgcggagttcgcagaggtcttcgcgccaattgcgaacatgtttaacgccaagcgtgcgcggaaaggcgatgcgccaactttggctaccgaagagaagctagatgggcatccgctgcagatccttccgggattaaagttctctctgcgtggatcgaaggttcaagagacggagcttgccgacggtaatataggcctgacagttagcgctaatactcgagaagatgtcgagaagctaatggcaaattacctcaaaaaatttccggataagaaattttcaatagagggtactcgcttcgttagcaagtctacggccgcgcctctgtattcggcgaggctgaaggtgggcgaaattgaaaagcgatgtgcagcgaagatgatgctggcgctgctagcaacctcagtcgcgccggaaaggcttcgttccgatagtcttcgggacatcgtctgctacatcaatggatcattggagataggaggaaatttccaaccttggcttaatatgtcgctccccgagcgcaagccggagtacgagttcgggcatgctctgatggtagtggccgatagagaacgctcactcttgattggtgtgctgcagatctatgggacgatagcgataaccgggatcatgtctgaatgttgggatggtccagatatcggaattgtctattgggtagatccggttgcaggggcttctgaaacgatcaaatttgccccgcatgagattagccgatcctacccgcgtcgacgctctccatcggatcacgaacatagagagtctctgatgagaatgatgcaagagattcagcgcagacatcgagatgcccgaacggaggagtttatcgatggtctagtggcgcttaaggagtcgagcttgccagatgaccagaagaagaaggcagcggatcaactgattgagagttatgtgatggaagtgctgcgcatagatcacgaacgcgagtttccctga

SEQ ID NO: 531192 - DNA, 303 bp, Stenotrophomonas maltophilia
atgcgaaagtttatgctcgtgttcttcttatgctgctctttccctgcattcgctgacaagggggttgtggtcaaagaggatgtctgtggttcgggcaacgccattattgaaactgctgacggttggtacatcgccgcagagcactactccggggtctacctttatgagggcgacgtcgtatacgggaagctaaagacttatggctccgaggagctgacccgctcagatgggcaatccgggcgcttctacatcgagaattgggtgtcggacattgaggaggcgctcgaggaactctgcagctag

SEQ ID NO: 531193 - DNA, 408 bp, Stenotrophomonas maltophilia
atgccggtggacgaggcgtcgaagctttcgcacgtcgacgaaatcatgcttagacaagttctgcctctctggattcaggaaggccgcccatcttcggtggccttcagtcccaatagcaatgatgaagggagcttgtctgtagatcgtcggacgatcattgaccctaagctggctttcgaagcctacctccagagaggcttgaaatcagggggggtctggggagtttcggttggtgagtgtcaaaaagagggactcgactgctacagcgacccgctggacgacaatgcagcgcatgcattagttaatttcggcagtgcctcgaggaatgagagcaggcggattggaagccggttgcgtgacaaggctcatagtcggggttgtttgcatcccgccccggaatctgcatag

SEQ ID NO: 531194 - DNA, 1182 bp, Stenotrophomonas maltophilia
atgtcggattacccagaacaagacgcgaatggctcgcaagctgggtcggaagagttcattcgtatgcggctggcaggcggacgatttgacactcatctagtcccgttcgatgtgctatcagacctcgccgcgtatcgtgagctagtcgtcgatctggcgcgcgtgttgtttaagcgatcccaccccaataggagaaaggtccccagcggcttcacggactcgttccagttgggaatcgagtccttaacgcctgggaatagcgtcacactagcgagtcgaacctttagcaatgaagcatacgcgccgttggaggaccagccatcgtttcccttccccgcgcacacggagttcgtcgctgcgcgggagatgatttttgaagtaatcgcgtgtgcgaacagcggtctgccactacctgagggctttccgagagatctagcgtcgaagtttaataggtttgggcggaactttaggcagagtgagtttttagagctgtccgaaggtggccggacccccgttcgatatgggggtaagacccgaaaggctatcgtcctggaggtgggcaactcctacgaaggtcacgtagatggcgactttagatttgatggcgggcgctgcacggagggcttgattcacctaattgcagatgacgctagaaccatagacatggtggtgtcgaaccgtgatgagtggagctttctgaactcgaaggtcgggcagactgcgcgaattaccgggctgggcctgtttgatcgtcaagatcgtctgctgaaaattacggagtatgaagaaattccgttcggcccttcagagcccatcgcgtccactgcagccagactgcgtgagatagaaggcaccccggccggttggtatagcgacggtaatccggcgccggcatcaagtgcggttgcctctatgagaaccctacttgaggccatggagagtgcagggattcctaggccgtatatctacccgcttccggagggcggggttgtagcggagtggtcttggggagggtgggaaatatcggctactgtggagcctggctctgacgctgcagaattcctcgctgtgaatattgatggcccaggcgaggttgaagacttcatctatttcaatgcagaagacttggcagcgacagcgcttcgggtgtggtcccaagtaaacatggaggagtcgcgataa

SEQ ID NO: 531195 - DNA, 477 bp, Stenotrophomonas maltophilia
atgagctacccattgcgtgccttcaagaccgtcttggcatcccaagcggccccaggctcactgttccggtgtaagggaaggtggtcgatcaaggtggacgccgagcacattgctgaccaagaagttggtcagatgctcatgctggacggtccggatgccggcgccctggcactcgctcccaaggaggaggccctggtcgtggctgacggcttcgactgggctatctttgtggatgacattgcaggcgccgatatcgtcgagcacctgccggcagttcgcatcagccgtgacggcgcattgttgtatggccatttgtggggccaccgggacgagttgcaggccgtaacgtccttgggccagccagtgaaagacgatggcgaccgcttctacatccaagatttcagcatatggctggttgacgaagccaagcaccaggtaggtagccagcccttgctgcgggtatcacgccccgcatag

SEQ ID NO: 531196 - DNA, 1413 bp, Stenotrophomonas maltophilia
atgacgcgcagcaagttcgaattagtcactagcgtgccagtaaaggacttgctgctagatgtgcgcaatgcccgaattcgctcgggagcggatcaggcggactgcattagccgcatcgcgagcggccaggaggagcagctggtcgcactggcatccgacatcgccgagcatggactctcgacggcccccatccttgcaaagcgccaggatgatggccgctacgtcgtatgggacggaaatcgacgcgtgacagcgctgaagctcctagataacccctcgctcgcccccagttcggctcttcggaggcgtattgaggctatcaatgctcgctttccggccgcagccactcagatcgatctgctccagtcccaagatgaaggggcgctggtcagggaggtcgtttcgcgtcatggtggcggcctgaagggcgctggccagttggactggagcgcgctgatgcgaacctttttcatgacctcgcatggcttgcccgagcaaaaccgccgcgctgccgcactgtttctctgggccgatgattatggcgtaagtctacccgatgattttccaatcaccaccatcatgcgttttctgaccaaggaaaacctgctgcggctcggcttcgaggaaacgagcgatggtatggagccacgcattccgttggaaaaggccatcgaggttgcccaacgcctagcagatgacttccgcccgggcggccccaagcaagtgaacgacgtcttcaacagcaagctggccgatgcctacatcgcccaggtgcgggtgtcgcttggtttggaccaggtgccggaaagtacgccacagcccccaccggttgcacccaagcctcccaaggcaggcccaggcaagcccaccagcccagccccagcgacaccaacagcgcccgacacggagcctggcgactccgcagatgcacccacaacggccccacctcgcccacgcgccccgcccaagccgacttgggatcgagacaagctctttcgaggtggctctcccggattctccgtgccgaagagcgaagtcaaggttacgaacatcctggctgaactgcggaagctgaaaacccgtgacactccgcttgctgtgtctgcgctctttcgcatgctcgtcgagctcagcaccacctactactacgagaacgcggcgggaatttcggatcgcggcgataacaaccataagcgcattgcttacgctgctaagcatatgttccaagcagggctgattaccgaagcggtgaaggagcaagttctacgccggacaactgaagccgacgggatgctgcaatacaactcgctcaaccagtacatgcacacgtggtcagcccacccggacttccagcaacttcatgtgctttgggatgagctagagctgtatctaaaagcctgctggagcgtctaa

SEQ ID NO: 531197 - DNA, 849 bp, Stenotrophomonas maltophilia
atggcttttgttacgcctctgcggtacccaggcggtaaggggagactgggcccgtggctcgctgatttgctgcgcgccaacagaattagtggcggtacgtacatcgaaccgtatgcgggcggggctggagcggccatccacctgttgtccacggggattgtggatcgcatcgtgatcaatgatgctgactttgctgtttacgcattttggaaagctgtcctggacgaaacggatgcattcataactcgcgtggagcgctgcaaggtctccatcggtagatgggagcatcaccgggaagttctacggaatccgcagaagcatgagctgtttgaagtgggcttctccgctttttttctgaatagaaccaaccgttctggaatactgagtgctggtgtaatcggcggcagagagcaaaagggtgactacacgctggatgcccgcttcaacaggaaggatctggcttcccgtatcaagagtatcggtggttatcgcaatgcgattagcctttacaaccttgacgcgatggatctggcagagggaatctctgccgaactacccaaaaagagtctcatctacttcgacccaccgtactacaacaaaggcgcgcagctttatcgaaatttctatgagcatcgggaccacgcggccatagccgaccgcgtgaaaaagataaggacgccttggcttgttacatacgacaactgcaaggaaatcagtgagctctacactgatgcggacagtctgacgttctcgctcaagtacagtacccatctgagtaggcctgacgccacggagctgatgttctacggaaatctcgcgctcagcgtgccgccgtatttgaagcgttag

SEQ ID NO: 531198 - DNA, 747 bp, Stenotrophomonas maltophilia
atgagtgacatccagagcatcaacaccaccaccgaactggctaatcaaccctgcgaaggggccgaagcagtgccagtatcggagagcaggcagcggctgaacgagctagccgagcagttggccagcgcagtgcagcgcaagcgcgccctggtggctaaggtcgatacgatgcagcgcgccaagctggcagcaaagggcgatgccgccgctgctcgccagcaatggagcatcaagctgcgcgatgccgatggcaaccttacccgcgatattcagaagttgcgcgccaacgagcgttcggcactctcgctggctgaagaatatgaggcgatggagggcgagattgcggccgagctgccgcgtgtagagctggagttggccgagattgcgaaagactgcctgagcacaaagaacgctattgcaagtgaagctgccagtcatgcctatgggcagttgctgaagcaagcgagtgacagcttggcagtagcatttgccttgttctctctggcggagaatgccggtgtgaactatcagcagtcggcgagtgccgacgaattggccagcaagttcttcggtcgcctcagtaatgcggtgcgccagcgccttgacgatgccgcagttgccgatcaggtggtccagcagttggccttgccgccgatggatatgaacgaggtgaacatgcagctggcagggagcctggcagccaggaccaggctgcaggcgcaaatcagggcggtcggcgcgccataa

SEQ ID NO: 531199 - DNA, 288 bp, Stenotrophomonas maltophilia
atggacgcagccgcgaggctgcgtccttttttattgggcgatgacatggatccggggtgcggcgcgatgttctggcagctccacgcccagcgtggatggatcacagcgttgcccgcgtgcagtaccgccgcgtatggcgtggctttgccccgcgcggctgaaaacgcgacaatgcaggggtttccccgtcgcgcgcccaccctgacggcgacgggggaaagcgtggggcccagccccgcgcgcgacacggttgcacgtggcccggcgctggcgccggccttcccctga

SEQ ID NO: 531200 - DNA, 447 bp, Stenotrophomonas maltophilia
atgatgagcgctaccaatcggaagaccgccagcttcggagtgccgtgggagtcggcctacgggtacgtacaggccgtccgcgtcaacaacacgatcttcgtgtccggccagctctcgcacacgccgcagggggagctggtcgcgccggcggagttgggggctgaaggcaggcccgccaacttcgacaccatggaagcccagatgaggcgcacttacgagaacgcccaggtgctgctggcagaactgggcgggtcgcttgtggacgtggtcgaggaaacgctgttcgttatcgacgtgcccgcggccttcgcggcaagtggcaaggtccggccggccgtgtatggccagccagtgccgcatgtggccagcaacctcattggggtttcggcgctggccttccccgagcagctgattgagattgccttccgagcggaagtccaaggttaa

SEQ ID NO: 531201 - DNA, 408 bp, Stenotrophomonas maltophilia
gtggcgctggacgaaaacgaagaactggccccgatgctgcagcgtttggcggcggccgatggggcacgcgcgcaggtcctggtgttcccgcaggatttccatgcgctgtgccggcggccggaatgggcaacgcttgcggccgaagtggtggccgagagtgcacgcaaccctgccttggccgaggccttcgccgcccaccgcaggcaattgcagcacgtgctggtcaatttccgcctggccatggccgtgccggccgagagcacgggttggctggcgggcttcttccaccttccggaaggccaggcatcggcgacctccgtcacgctggcggggtgggcgtggtgctggccacgggggcagcgtggctgtggtcctggcggttcgcgcgggggcagctggaagcggtga

SEQ ID NO: 531202 - DNA, 1209 bp, Stenotrophomonas maltophilia
atgttcgaagatgaccgtgttgataccgctggccagctgtccgtagacgcccgggaagtcttccggaatgcgatggctgatgtccggaccagcgtgcatctgcgccatcagctgggtctgctcggagaagcggcgcagcatcgcggtcatttcggtggtggcggcgagcatgcggcccgcctcgtccttgccggtgctctgggtggtgacgctgaggtcgccgcgtgcgacggcctggatggcgttcacggccttgccgagcggcccgaccacggcgcgcgagatgaccaccgccagggtagcggcgaccacaaccagcaatacgatggcggcaatgatcgccagcatgctgttgcggtgggtggcattggcgttgtcgatcttgccctgcatcagcgagctgctgtacgcacccagtgccttgaggtcttcaaaggccttgcggcgcagcggacgcgactggtcgtcggagatctggcgtgcgacgacgccatcaccggcggtggccgcttcgcgcagcttggcattggctgcaaagtagccatcgatgtcggcctgcacggcacggtagagctcccgctccttggcaccggccggcagtttggcgtacgcggccagctgctcgcgcacgacggcggcagtgtcgtccattcgcttgttgtagtcggccaccttctcgggttggtccagcatgctcagctgggccagctcataggtgcggaactcacccagctgcgagcggacttcgccgaggtactgcacggacggaatatcgttggacgccatggcactgagctgcgcgttggcctcgctcaggcgcagcagggcgaatgcgcccagcacgacggtcatcagggtggtgagagtaaaccccacggccagcttgcgggcgatgggcagatcgtggaaccacttcatgcagggtgctccaggtgggcagggcgccggcgtcgttgcgtcggctgggggtggttgcagagcgaacgggggtgcccggtggggttcggtgacggccgtcaaagcgaaatagcggcgcggttcggatggactttatggacgcagttcacattcggatgcgtagggagtgcagcgcgaaagtgctgcaatggcgggctgtccgcttcggtggcgtggttgcgaacgaaaccagcgcggcgacggagatcacggaatgggttcgggcgcggattggggtcagatcccttttga

SEQ ID NO: 531203 - DNA, 1269 bp, Stenotrophomonas maltophilia
atgagcgacccgatcccagccatcctcgacgtgcatgacaccccgcgcacgcgcaacgacagccaaggcatgctgctgtcgctggccagcgagcatccgcatcagctgggtgagttgatgctgcaggccttggtgcgacgctcaccgggctcggccttcctcgacatggcgctggacctgctgccggatgaggcggtgcccgcagtcgcggccgatgcatggcgccgctatcgcgagggcgagcgcggtgaactgctggccagcgtgatggcgttcgccagctaccaggcgccgcaggtgctgcaggaagattgggaggcgttgctggcggtggcccacgaagatcaggtgcagttggcctcgcaggtctggcagggcctgcccgccgcgaccgccgcacactgggcacagatgctggccgaggccggggatgatcgggagatggcgcgcgcgagggcgctgctgcttgctgctcagcccgaaacctacaccgtagcccggggctacctcgtcgactggggccagctggatgccgagatctgggcgcactgggctggcgtggccaacggtccgctgccgcgccgcctgcacggtgagaggccactgcacatccgcttcggccgtgagcagcaccgcgcgcagttggccgatgagccaagctggcgcaagcgcatctggcgcctgcatccgacctggaatggaggcgaggtgcatcacacgggccgcatgggtgggctgctggacgcactgtgcggtggttgtcacgcgccgctgcagcgcctgctgcagacccatgctgccgtactgcagcccggcgcggagggtgaggttacgctggggctctgcctggattgctgcggctgggaagagccgccggtgcgcttctatcgccacgatgccgacggcctacccaattgccatcccagccagtatcgcgcggtgccgaatacgcccaccgacagtggcgacctgatgcaggccgaggtgggccttgtggccctggaaagcgtgcgctggcagcaacaggactggggccagtccaaccatcggcagaacctgtcgcgcgtgggtggtgcgccgagctgggtgcagagcgcctggtacccggcgtgcatcgattgcggcgaggagatgccgttcgtgatgcagctggattcaacgctgccgaccacggctgagggcacgctgctgtggggcagcggcggcatgctctatacgttctggtgcgcaacgtgccgggtgagtgggcacttctggcagtgcacctga

SEQ ID NO: 531204 - DNA, 441 bp, Stenotrophomonas maltophilia
atgttcacctttggtcgcgagcatgaaatcaaatgcgcgattagcagacaccacaaggatgatgagctccagatggtgcttgccatcgtcaacgccattcacgatttcaaggacggcatcgttccgatcgagagcgcagtgaatgcgattcgcaagggtcttgtggacggcgcctcggggacctgggagacatctggcagctggctttgcaagctgaatgatgcgtatccaactacagagggcgtttggtttgaactggcatcgcactccactgccaaggtgagattccgagtggcttgccacatgctttggatctcagaggagctcgccgcgaggttgtatccgatactcgcaaaagataggagccgccgcgtcagggagcaggcgcaaggaaactgggactatctgcagtgcccggaaaagtacggtggggattcatag

SEQ ID NO: 531205 - DNA, 648 bp, Stenotrophomonas maltophilia
atgggccagtcctgcgcaagggaggacccgatgagaatttgctggaattggttgtcctttcctgtgtatctcagaaaagttgcatggcactggagtgctcccagtgggatcgtgctgggagatatgcactgctccgaagaaagtatgaatcgcgcacactacatttctctgctcatcagccttctggtgctgcccagctgtgctcctgagtttggaagtcctgcgaaaacgcgatacatctgcaacagccgcttggagggagcaagcgatcgctgcgcagataaggctttggcagccctgcagcgcattgttgctggccgtgaaaagcgattcgagcgtagggatgactgctctgccatctccagccgaagcgagagcgcgggaatttcgttcttttcccaggcgctgcgtccactggagtatccgccagagaagcgctctggcggtgtcgcgcgcttgcggatgcacgtggatgcgtcgggcctgcttcagtccgttgaggttgttcagtcaagcggtgatcctgcacaggatgctgctgccatcgagcatgcatggggatggtgctacgtccctgcgcagctcgctggaaaagtcgttggcggcacggttgaagagactttcccctttgacatcgaagtgccgtag

SEQ ID NO: 531206 - DNA, 2328 bp, Stenotrophomonas maltophilia
gtgaggcaccacccgccgctgcgccgtcgcttcctgcccacggggttgctggtgctccttctcctgcccgctgcgtcggccgaagatatccggtcgccacgctggctaccgggtagcagcgtgcgggtcgccacggcgccttccctgcggccgctgcccgcagcattggccgatgcctcatcaccgccaacgctggcccatggctacgccagcctggtggcccggcatgcccaactcagcttcctggaacggccctatccgaccaccgccgcgtcgatcctcgcggtgtgccatcacgaggccgatctggtcatggtctttggcggggcgagacaccagtcgctcccctgccccgaccttgccgcgtcccgccgctttcgcggcggcgccaccctgctggccgggcgcacgggcgaatggctgccacgggagatgcgcgaactcgacggacgggtcgtcgccgtggttgaaggcgggccctacgccggttggctgcgcgcacatcatccacagatccggctgcagcaactgcccaaccggtatgcggcattgaaggcggtcgaatccggcctggcggacgcggcgattggcctggagcccacactgcgccccctggttcgacgccatttcaatggcagcctgcgcctgcagtcgttcgacagcagcttctccacggacctctacctgctcgtccgccacgaagaccggcagctgctggagcgcatccagcaggcattgcgggagatcacgctggaggagcatgcgggcctgcttcgactctgggctggacagaccttgcctgcggccgcggggaatgcactggactggatgcaggcgtcgcccccgcgcgggtggctgctgctggccccgctgctgatcgccctgccgctgctgtggcgcgcaaccggccacctgcggacacgcggtgaccgaagcggcgcacatgccatcggggtgatcagtcacgagatgcgcaactcggcgcaggccgtgctggcctcgatcgaactgcttggacaatcgacactaccgaagggcgagcgcgatctgctcgccgctgccagcacggccagccacgccctgcgcagcctgttgaatcgtgcactggacttttcacggctcgccagcggcgcgttcaagccgcatccgcaaccctgcgatgcagcacagctgtgccggcaggcactggaggcgatccggccagaggcccggcggaaaggcctgcagctgcatttcgatgccgggaacgcatccccgtccttcatcctggtggacgccgatgcgctacgccagattgccagcaatctactggccaacgcggtgaagttcagcgatatcggcggcgtcgagctgcgcctgcagctgatgccggcggcgcggccgcgggaactgctgctggaggtgatcgacagcggcatcggcattgcaccggcgcaggtggccaccctgttccagcctttccagcaaggcagcagcgggcaccagcgtggcggcagtggcctggggctttcgatcgcgcgcgagttggcccgcgccatggggggcgacctcaccgtgcacagcgtgctgggccgcggcagccgcttcatcctgcgcctgccggtgtctcctgcaagtgccagcgcggatgccgaagacctgtgcgctggcgccacgccactggccggcctgcacctgctgctggtggaggaccacgagctcaatcgccacgtcatcgccgaacagctgcggcgctggggtgccgaggtgtgcgccgtggaagatgcggccagtgccctggccgaacagcggcgccagccccgtcccgccgcattgatcgacattggactgcgtggcatcgatggtcacgcgctggcgcgcgaactgcgtgggcgcgcggggcagtccatccgcctgatcgcattgtctgcccgcaccgggcggcgtcatcgcgcacgctgccgccgctcgggcttcgacgcggtactcgccaagccgctgcgcgccgcccaactgctgcctgcgctcggcactgcgcggccggatggcctggacacttccgtgcaaacgattgaaatggacgcggcctacatcgccgacatccgcgatgagctcggcaacctggagcgggttgtcgatcgtgcagacgcatcggcactaagccatcacgcacaccgattgcagggcacgctgcagatgctgggccaatgcgggcacgcggccatcgcggcggagctggccgatctggcgcatgacgccgcgccggactgggccgatgcacgacgcctgctggacgtgctgctggccggacagggctcccgcgcagcgggaacccggtcagagccctga

SEQ ID NO: 531207 - DNA, 1218 bp, Stenotrophomonas maltophilia
gtgctgagacagttgactgacacccaagttccgagctctctgcgcggacctttgatcgttgatagtcgctacaacttgccgcgctattgggctaccgtctgggcgtcaatgtccggatctggagcagctgtgtcgacgcagatcaagcggcttagatacgtggagagcctctattgccacgcggatcggctatttggagcgtgctccttggacgacgcgattgctgacctcgacgaggttcggctcgctgaaatactggaatcttggttcatatccatccggaatcgagctgaaccgacatcagctgatgaagcgcggtggaggaccggattggtgtttgtgacgacggtcgtgacttggctttctaagacaagcctacccaacgaaagacttcgacgcatcgacgggcagcttcatcgactgaccacgctctacggccagctacatgttcggaaaggaaggcagacaagccgaattcgatccctccccgctgccgtgatcgaagccctgtacgagatgcttgaccctgagtcccggatcaaccctttctcaaggcagcgtgggcgatggctagccttcctggcattcatgctgatgcttcatcaagggcttcgccgcagcgagttgatgctcttatcggctgatgtgatcaatagtgcgttcgacgaacgtcaacagcggactcggcactggttgaatgtctcactcagccagtacgcagatgatgaacttgactcacgctactctcgcccaagcatcaagtcttccaacgcaattcgccaattgccagtgagcgcggcgactgctggagtcgtccagtcttacgttgaaaactaccgggggaagcctgagcaccctttccttttaaacacacagcaaaacactcctttgtccacggagtctctaacaaagatcttcgcaaagatctctgccaaccttcccccgagaactatcaaggagctggtcgacagaaacgggcgttcgactgtaacgccgcacgacctgcgacatacctgtgctgtggtgagactcaaccagctactgagacaaggtgactccatggaggaggcgctacaaaaattaagatccttcttcggctggtccagagagtcccaaatgcccatacggtacgccggagcggtattcgaggatcgcctgtcgactgtatggaatgattcgttggatgaaaggttggcggtgttgagggcgataccttag

SEQ ID NO: 531208 - DNA, 1509 bp, Stenotrophomonas maltophilia
atgaacaggacgagtacgcgttcggcagctgatcgtaatgcttcctcgatagtggaccacctccctgtgttgccgccgatggtccgctattacgatgacttcgatgagaagcagcgatcaattcgagatttccaagaggtctctagcttcgtggtctacgttgatgggcgagccatcaacgttggactcgatcacctatcggctcctcatgcgctcctgataaagcacgtcttcgtgaatcttctggcacaagggcgtgctccaacaacagcggtgaagtatgtgctcggaagcaaggcaataggagatgcagggctatcggagatttcaacgctagtgcccgtccaggctggtgtcttctggtcagtcttcttttctcgagagcttcctgccgatgcatacgcctgtgcaaagtcaatcttgcaactgctgtgcaaacatcgacttggtgggtggtccgagtcctatcttgaggtgatatctgccctaccccttcctttcaaggacaagtacgctgtcgtcaaatcgggtcgcgcatttgtctctgtcaacgaagaagcttcgatagttcgattcttggacgaggcagcagcggagtctggcagcgggcggctcgcgctgaaggaagcccaggaagcggcaatgttgctctgtgcgtatcagtttggaatgcgccccgttcagatcgcgtatctctcacttcgcgatttaaagatccgggataaccctggggagagcttcacctccgtctacatcacttttagaatggttaagcaacgggcgtccagctctaccaagcctctagtgaggcgtgtaaagagcgaatggacttcgctatttgtccaaatcgaaagccagctgcgaacggacggcgcgggcgggcctgatagattgttcggcatccattccgcccatgaggcaacccgccaaatcagcgccctgctccgtacccggctcaagttggaggcaacagcagtcaacctccgccacacggctgcgcagcgcctggttgatgccggagcgagtcatgatgagctggcggagttcctcggtcactcggacagcacgaccgcgctggtctactacgacacgtctgcaaatcaagctgaacgggtgaattccgctctcgggatatcagagatatatcagcgagttgcccgaattgcccatgacagatttatcagtgcagaagagttggcgcacctaaaggactcgcagcagatcggcggcgcacctcatggagtagcaatcgccggcattggggggtgcacctccggtcagcctgcatgtccttacaatccaattttgtcatgctatggctgccccaaattcatgccgatccagagccttccgatgcacttgaaggtactaggtgacctgcgtgaggttgcgagattctttcatgagtcttctcggggggatgccgtgtcaccggcctacttgcagctcgagcgaacaatcgcggaagttcaggcggtcgtagtcgaaattgagggggaaccctcatga

SEQ ID NO: 531209 - DNA, 2337 bp, Stenotrophomonas maltophilia
atgaagttccacttcgaagcatttgtacagcatggaatgcagttggcaactacgcacggattgggatgggatatcccgctcgatgattcggggaccgcattgaagggtcatgagtgggatctgacaagtcttgcaggaggtgtagcgcctacgcatcgcctgcgccacctatcttctgatccctctgctctgagtgccctaaatcgcgtgcgcgcgtccaacgggcttcaagcaatgcatcctgtgaccttttctccgccgtggcaggacctcatcaaagccgcggtaatgcagcaactgttcgttcgaaggaactcgtcaggccacgtcgccaacaatgttgttaggcccctgcgagtggtcgcaacctgcctggccgccatagacccgtggcaagctacagtcgatgacatgaccttggcgatcactatcggaaaggaagttcaggcatcaggaaagcttggcgacttgatcgccggactgacccacgatctcctcgacaccaaccacttgacggactcgggacccctgtaccctgcccttgcttcatcacgtctccagacccggtctcctcggcgctccaatttcctgaaatcgaagcctgagatcaagcacagccttgaggaacgcaagaaggctgagcgtcttccggagcgacgagcgttctgggagctagttagaattgtgatgactgagcagccagtcacattcatggatgagcttagatttgcagccattcgaacaatgatgctgaccggatttagaattggcgaggcagttctactccccgcggattggcgtacggagagacactactacgactcgaggcatcgccctgcaggggagctgggcgggtactcgcattctttgatgatccggcattttgcagagaagcaacagacaaagaacgcaagaagcgcactgctcaccgaggcaagtcactacgtgtcgaagatgttcgaagaaattgtttcggatacgctcgcgcgggcggctgcaatcaccgatcctcttcgaaatacacttcgccggcaagtaagtacaggccgccttcttccagacttccagttggatgacctcgttcccgccacaaagatatacacctatctcacgggaaatcctttctggcttgatctgaatgaggtgcagaagagtggtctcattgagcggtgtcgacgtcaatacacgttcgagagtttctctgaaatccagtatctgcaggagcagatgagcgcgaactcccaaggagaggtgagcgtagccgccaagatgtacttccgtcgcatggcaggagcggacagtggagaccgcggtgctctgtcgcttaggagtgaaaatggggaggctatctccctaagtagcgcttggcgcgatctccgatctgcgttcgtgaggattcatgaggttgagagtcaccttcgtactgcggccgcttcaaagctgccagacacagcagcatttgaccttgaggaccgcaaattttctccttgggagttcctcttcctgcatccaaagcggtcgctgagtgaagagcgaaacggggggatctgcgatgtgacccgctatttctccataggaaggccagacgaacgtttggtcaacatgagcctgggcgagcagaaatctcgagatacgctgtttgaacgctacagtcactttgcggcggacaaggagctcgttctgacctcgcactctctccgtcaccttcagaatactgagctcttcaggcttggcgttgcggacacaatcatctcaaagcggttcaaccgtcgtagcgtagctcagagctatgagtacgatcaccgcagcttggctgaggagcttgatcagatagagcttccagatgaggtagaaacagcactgggcgagaaggcgtccatcgtggccagaatgattcagttgggccgcgccagcgggcccattgtgagcgcattcaagcgaatccagagcactgagggcgacgctgctgcgttcgatttcctgaaggcggaagccgatggatttcatgccacaccctatggtcactgcttaaatagcttcacggtagatccatgccccaagcaccttgagtgcttctctggctgcaggcatctgtccgccaccaacctacctgagaatcgacgccacctgcagaccctagagctcaagcttgtcgcgactgttgaggctgcagagtcacggtgctctagcagcccgggccgaaccaatcagattcatcacgcgaaggttaggctggctggagtgcggacgctgctagccacatcccctggcgagaagccatttccagaaggcagggacctttcacttcctacacccaagggagttttggatgattaa

SEQ ID NO: 531210 - DNA, 369 bp, Stenotrophomonas maltophilia
atggcgctgcttctaatcgatccggattacgacctcctcctggacttaggtgccccggctggtgtgcttgagtctttacatgagcaatggttgcggctggctcatgaccccgagcgcgaagaatttgctgctagggtcgctgcacgactcttgccggtcctgtcggactcactcgactgggacctgaagcctcccacctccgctcaaatcagctatgcggtatccatcgctaggaagttgaacctcgagatacctgcgaaggttcttcagcgccgcagcgatatgggtatgttcttggacgaaaatgcagatctgatcctgggcacaaagcgcacgcgccgtggccttcgatcatcgaagcgggcttaa

SEQ ID NO: 531211 - DNA, 624 bp, Stenotrophomonas maltophilia
atgctcactctaattagacacgctcaaagtgccgcaaatgccggttcggcaacgtttcaccctgcaaccattccactcactacggtggggcattcgcaagcagaacaattctcaaggtcgacggtcgcctcgccggtaggagcaatctggagctcgcccttcttgagggctgtacaaacggcaaaacccactgcagagcggtgccgtgtgcgtatccaggaggcaccgatccacgaattcacctatctttgcccggcgcgttgcgcaggaacgaccgctactgagaggatgagctgggtctgcgaatactgggagcggggggaccccaactacatagatgggccaggcgctgagtccttcgcgatgttcattgggcgtgcgcgggacgccctgtccatattcagcaagtattcgctcccaattcaagccgtcgccttcagtcacgggcagttcctgcagatgatctactggctaaatggctacagggatgaaccggcttccgaagcgggaatgcgagaatttcgcgctctggaccgaatgtctccaattcaccactgcgaaggattgcagctgtgccctgcctcaccaggaacaatagttcgatggccaagttcggcagggtga

SEQ ID NO: 531212 - DNA, 864 bp, Stenotrophomonas maltophilia
atggacgagctgtgggttaggcagaaggcgcgcgggtttgtcgccaaagtggcgttaccgccggtctttggtgatctgacgccctatctggaggctatcaacgccaagctccgacaagaagagcttgaacaaggtgaatctgggtacaccatcacgaagcccaatggccgtcacatcgtgacggtcaacagcactgaaacgctggaacgccagcgctttacgatctgccacgagattgcgcacatccttctggagctaccctccagtcacgaagaagtgccttcttggtcctatgccaagcggcaccccaatgaggttgcctgcgacaccttcgcgtcagagctgttgatgccttacaagctgtggctggacaaggtgccgccggacgacccctccatggaggtcatcgagaatctggcagtcacatttggcacttctttccctgcagctgcgtcacggtacgcaagcctcagtcacagaccatgcgcctttgtcacgatggagcgcggtgccgttcgatacgcctctcgctcgacatcgctacgcaacgtcaacgcgcaaatcccagctcgatcgattattccggcggggtcggtggccaagcgcttgcgtgaagcagttgtcagcgccgccgccgccggcgaagtagctcaggacatctggttcgacaactgggagaagggcggcgttttgtgggaaatcagccgtcacttctcaagccgcgatactacggtatcgctactttggtttgacgaagacgaactaccagatagggagctcgaccgattcggcacatcgattgatgaggaagacgggctggaagagctcaccggccacctctcttggaacaagcagaagcgctaa

SEQ ID NO: 531213 - DNA, 393 bp, Stenotrophomonas maltophilia
atgccgcagaccggcttaggcgttgccctaaagacgcttagagagcgaaatgggatgtcgttgagggaaattggccagcgctcctcgaccgaccatgcgtacatccatcggttggaaacgggcgaaaagaccagcccatccaacgatctggtagccaaactgttggccgtactgaggccaagtgagcgcgatgcaggtatcgtctactggctaatggaccaccctgaggcggatgtggagctggtggactatgccctgcaagatggagatgtcagcctggaagtcttctccgccgctgcgggcatgaaacatcgaggatcggtcaggccggacccggttactttgatatccagagtgaggcgggcattcgaggacgatgatgaggacggctaa

SEQ ID NO: 531214 - DNA, 225 bp, Stenotrophomonas maltophilia
atgacacgcaagaaccaacatgtcgtaccccatccggatggctgggccgtccgcggtgctggcaaccagcgggcaacctcggtccaccagacccagcaggaagccatcgatgccggtcgcgggatcgcccgcaaccagcaaagtgagctggtgatccatcgtccgaacggtcagatccgtgacaaagacagtcacggccatgaccccaacccgccgaagggctga

SEQ ID NO: 531215 - DNA, 987 bp, Stenotrophomonas maltophilia
atggctgacatcccgacctaccacgtgctcgcactttcaggaggcggctatcgtggcctgtacacggccacggtacttgctgagctggaagcggttctggggcgacccattgctgcgcattttgacctgatctgcggaacgtcggcaggcgggatgttggccttgggcttggctaacgagattcctgccttagagctcaaaggccttttcgaggatcagggcaatcgcatcttcggtcgacgtagtctggcgcgccggctgtttgggttctggctggcagccaagcacgattcggcaggccttcagggggtgctaaatgagcgctttggttccacgaccatcggcgatctgaagcatcgtgtgctgattccggcggtgaactacaccaccgggcgagggcagttcttcaagacgccccaccatcccacctttgagcttgaccaccgcatgcaggtgaccgacgtggccatggcgacggccgcagcacctgtctacttcccgctatccaggaacgatcgcggagtctttgcagatggcggcttggtaggcaacgccccgggactgtttgggctgcatgaagtgaggacctttctggcaccgggtgggcaggccgagatccgggttctctccatcggaaccatgaccatcggtgccaccctgcgtggcggtgcaactctggatcgagggttcggaatgtggcgcggcgggctgttcgacctggtcatttctgcccaggaatcctcggtggactacatgttgcggcaatcacttggagacaagtacctgcagattgacgatcaggctacgccggaccagtgccgcgacattaaggcattggatcgcgtgtccgtcggtgccaccaacaccctaaaggatcggggtaagcatgcagcccaacgcgcactgggcaatcctctgttcaagcccttccgtgaccacatagccgcctcgcccgtgttctaccacggccctctcaagaacgcatag

SEQ ID NO: 531216 - DNA, 1143 bp, Stenotrophomonas maltophilia
atgctcaacctcagcccgctgttgttcaccacggtcgccgatgaggcgtgcctgcattccaacctggatttgagcgacgccgagcgtgcgctgattgcgcacgcccgggcggaggttcgagactgcttgcgtacgggcattcctcgcgttctggctgaacgtggctacaccgatacggtgccgcagccgcgattcttcacgcaaggctcctgggcgtacaagacgctcaacgcgccggcccgaaagcctcagcaggccgacgttgatgacgggtgctacttgccgatgagctttgtatctcaaggaacgcgaccgagcgtggcttccaccattttcttcgaggctgccgagcaagcacttgctccgttgatcgaacgaaagaagtgggagcttgtgaacaacaaggacacctgcatccggatcgtgatctgtggctttgcccacatcgacatcccgctctacgccatcccggacagcgagttcaccgcattgaccaaggcgtccatggagaaatatggatttgactccattgccgaggcagccatcttcgccgaacgcgacgcctggaccgccctgccccgcgacaaggtgcttctggcccaccgcaaatgcaactggatggcctcggacccccgccccgtcaaagagtggttcctgcaggaggttgacgagaaaggcgagcagttccgccgggtcattcgttatctaaaggcatttcgggactggcgctgggagagcggcggcccctcctccatccttctaatggcggctgcagcacccattttcgagaagcgcgagcggcgcgatgaccttgcgctgctggatgtcgtagccaggctgccgccgcgcctgcgggcgggtgtggtaaacccagtcgagaacagcgagtcgttgaccgaccgtctaggcaagcgcggggtggaagatgccgcacaagccttcgaggcccttgaggtcacgcttcgcggctgcgtaaatgcgtccagcccttctcaggcctgcgtgtggatgcgcaacgagttcggcgatcgattccccgccgatgaggaacgcatcaaggtggtctcggttgtcgcaacaatcggtgccacttcgcctcagcccggacccagtgagctcgtcggccggagcaaggcagggtga

SEQ ID NO: 531217 - DNA, 1623 bp, Stenotrophomonas maltophilia
gtgagccgtgccacgcccagccaggtaattgaggcgtttgggcgcgaagggttcgacttcgcaggcatggccgacaacggttggttccgggtttctgggcgtctgttctcggacgtcactccggaaggtgtgccatgcgaaatagtcctggatcccaacttctttgaactcccgcgcttccggctgctcgagattccctcccatcttcctgccgcagtcccccacctcaacgccaatggcgggctttgctacatcgccaatggcacggtgacgttggacatctttgacccgatcggccaatcgctggcttgcctgcggcaggcgcagcatgtgtttgatcggatcatgcggggggagatggtagaagacctgaccgaggagttctacgcgtattggaatggtgcgtattgcctttccgacctcgacggaagtgctcagggacgccaggagtgcttcatcgtggagggtaacgaacgcccgatctggttcgttacaaacaaccttgcgcgaaccaagaagaaggctgaactactaggattcaccccaaccgaaaggaccaccccgacctacagaataaagaccactgcgcaaccacgccctgtcccaggcgtgtggccgcccaccaccgtcagctcgctgttgacatggcaaagccaactggacagtcgctgcaggcgaagcatccatcgtcgtatccagcaaggtgagcgcgatcgcctcaacgcgcttcttattctgatcgactcaccaaagatgacgtatgcctttggagtcatctatgagcgagatgaggaggctccgaaggtgaagtttgcagatcggcgagatcggacgctgggattggcaatacttccattttccgtattcaggattgatgagcgctacattgccgagcgcaatatcccaggtcgttccacgcttgctgggaaggcaatcgctttgattggctgtgggacaatagggggcttcctggccgaaatgctggtcaaggcgggcgcaggaactcagggtggcacgctgaaactgatcgatttcgacactctagtaccacagaatctggggcgtcaccgattggggtttccctccctgcttcagaaaaaatccgtggccatggctgatgaacttcgccgcttggcacctggcgtatcgattgaagcggtcacccaggatgcccgggaagtcgacctgcccgatcaacaccttctcattgatgcgaccggcgaggagtccttgggccattggctggcgaactactacccacggccgactcaggtgctttccgtctggattgaggggccaggaattgccgtgcgcacgttgcttagaacagcccagggcggctgctatcggtgtctttgggaattcactcggcgtggagagatgcgctcgaccaccgagcctttgcccagcattctggcagggcacgggtgcgagggattgtatgtgcctttcggcgcctcggtttccattcaagcagctagcttgggggtagatgcggcgctcgattgggccaatgacatcgtctcccccgctctgcgcacgcaagtgcttaaccgtgacttcgcacaagctacgccggacggtgatctgccaattgaacgcggatgcccagcatgccactga

SEQ ID NO: 531218 - DNA, 648 bp, Stenotrophomonas maltophilia
atgaacgaaatgccgcaaccgtcattggattccgagcttgcacgtgttgaaacgaaggtcattctgttaggtagagctgtagagcagcagttggtggacaccggttggatgatccgccaccccgggcgatcctttgggcagtcgattgagcagcagcggctcgaactgcaccgggccgccgaagagtgcgaggaggcggcgatcggcgttgtagctgatcatgctgccgagaccttggatctgaggcatatgcttgcggtgatccgaatagcctctgagcttaaacaggcaggaagtctgtcctgctcagtagcggagcatcttcaggatatgactgtggctaggccagaagatctgactgggtcacttctggagatgatcgagctggctcagattcaactccgagatgcctgtgtcgcgttcgagaagcgagatgctgacctggcgaaacgtgctcttgaacatgaggatgccatctccggccttcattcaattctgttcaaggaaattcttcagggaatttccgatcaagacaaagtctcggtagagctcgtccacctcctctatgtcatcaagagtcttgagaagatcggagaccatgcgacagaaatagcgtccagtgtcattgcgctctcgaacgacgattag

SEQ ID NO: 531219 - DNA, 165 bp, Stenotrophomonas maltophilia
atgggcaacaagggcctgcccgaatccgtttcgttgatgctgcgtctttacagccagcgaccgcagcagggccagattgccatgaggctcgatcgccaccacaccacagagtgtgtgatcttcaaaaatgccatggaagatggctccactttggccttcaactag

SEQ ID NO: 531220 - DNA, 318 bp, Stenotrophomonas maltophilia
gtgagtacttatgcaatcgttcggcaagcaatccacgataagcaccagataaccgctgtctacgatgggcactatcgggagatgtgtcctcatgccatcggcgagaagaatggcagggagcaagcgctgttctatcagttcgggggagagaccagcaaaggcccaatcaaggatccgaccgctgagaataactggcgatgccttgaactaagcaagcttagcaatgtgacggcggtgcctggggtgtggtacagcgcggacaatcactccactgcatcgacgtgtattgatgatatccacgctgaggtggacttctag

SEQ ID NO: 531221 - DNA, 336 bp, Stenotrophomonas maltophilia
atgagacacggcttctgcctgcgcgctgttctcgtcggcgtgccgctgctgttggcgatgctgcccgcatgtgcccgcactgcggtgggccatgtcccggacccggtgcaggccttcgtgctggaaacggtaaaggaagtggtgcacatggcgatcctggccgggcagaccgcgctgctgcccgacccgcaggcgtgcagcacggaccgcgcgcgctgcggcgacgccatcatgggcgtccgcacgcgcgatgacgaggcgagcctgcaggccaccctgcgtacgttccgggacgccgggctggacctgaccacgctgggtggaccggcgtcctga

SEQ ID NO: 531222 - DNA, 786 bp, Stenotrophomonas maltophilia
atgccgcgcaaccgtgaccgaatgacccgggcgatgaagcccctgatgaccctgtgctgggtggccctgctggccgcctgcgcccctccggccggcgatggtggggccaccgctccggcagcggccaccggacaggccagcgccgacaaggcagccgacgccccggcagcggccacgggcagcaacacggcctgcaccgagggggcatcgccggtgcagaccctgatctgcaacgaccccgccctgctgcagcaggaaggcgagctggccaaggccgaagccactgcacgcgaaacccttgatgccgccggcaaggacaagctgcaggccgagcagcagcgctggatccagcacacgcgcgacctgtgcggtgacgcgcactgcctgcaacaggtatttgccgaccgcctgaaagtgttgtcggccacgcgcgacggcctggtcgaccaggacgcctgcgaagtgcccaacggccagcagcagtgcgtggacctgctggtgctgcgcgaccccaacagccagctggcgaacttcaacacgctgctgcgggagaacggccaggaaggccgcctgctgggctgcaccgcggccaccaacatgggcggcggccccaacgccctgctggccgcccactgcacccaggaaaccaccgccggcaagcgcaccgtgcagctgtgcagcaaccagatggtcggccagttcgcgctcgaaccggcagcggccgcttatggcgcccaggccacccgccagctgctcggcttcacccagcagcactgcgccggttga

SEQ ID NO: 531223 - DNA, 504 bp, Stenotrophomonas maltophilia
atgcgctggccgtggcctgcagcgcagataccccggctcgaagatgcacaggccgacgtgctgctgcaggacctgctctcgcgcgacgcaacgcgcatcactgacgccgcgcgcaccgtcgcgcgcctgttcgatgccgcatcgttggacgcgttggccgtgcatgtggatctgatcgagcgcagctgccagggcatcgccctcggcggcatgctgatcagcaaccaggcccacctgaaggcggccctgcgtcggttgcgctactggcaggcgcgcgagggttgcctgtgcgcgctcaaccccggctacccgttctttgatccccgtcgtctggttgaacagggccagatgcagctgcgctcggtggaagaagccgaaggcggttggggcgactgccatacggtctcgtgcgtacagtgcggccggcactggcaggccatcgaccgcgagtaccactacccgtggtgggagtggacagcgctcacgtcgtcgcctggcagctag

SEQ ID NO: 531224 - DNA, 633 bp, Stenotrophomonas maltophilia
atgatgatggaacgcgtgatgcgatggagtgcactggcagtgatgctgcttgccggtggcgggtgctcgccgggatacgatgccggcgccgcatgcgggagcctggccgagccggcgccggtccgggatgccggtgtcgagcagttgcaggcttcgcaggacgacggacgctgcaccttccgcgcacaggggcgcgatgcggcagcgttgcagcgccagcaacgcatgctggatgccctcgccatcatcgcgtgtggccagcctgcgcaggtacagccggtggcgggcacagcagggttcgaactgcagatgccgccgcgttgcccgctctcggcccgcagctcgctgttcgtccaggacgacccacgctggacgcttgatcgtccttcgatgccggattacccggcggcggcgcgtgccgacaggcaggagggcatcgctcacctgcgcctgctgttggacgacgaggggcgcgtcaaggcggccatcgtggccacgtccagcggccacccgttgcttgatgaagcggcgggcaaggccgcgctgggatggcgatcgaagcgggagtggtgggcgttcagcaccacgcgcatgagcctggtgcggacgacggtggcgttcgccgccaactag

SEQ ID NO: 531225 - DNA, 2409 bp, Stenotrophomonas maltophilia
atgaagctcagctccgtcgtttcctcgcctcgaccgccgacgccgcaccggctgttccgcagcctgctgctggccttggcttcactccccgccggcgctgtactggcaggcgatctggatgaccaggccgccgaggtgggtgcagctgaccccatcgaggcctggaggctcatcaatggctcgcagttgacggtcaacggcgggcagacccagcacattcgcgcgggggatacgtccgtggtgaacctgcagaacgcgcgggtcgtccgcaccggtttggaacgcgaggccatccatctgtacggtgaagccacgcttgtggccaactcaagccggatcgacggtagcgtctttattgacagtggcaacacctcggtaacgctgaaggacagcatcgtggtggttgacgctgcccagctggtgcccggtgcaacttcgagcatcggcattgatgcctcgatcctgtcggcctgggactcgcagttcactccctcggtcgtgctggatggcacatatgttcgcgttgatgacctccactcaccgccccgtcccttcaccaccgggatcggcgcccgccttgtggtgggccagatggatatcctcaatggttcacaggtggtggcggccaatgtgggtgcattgctgatgggtgagcgtgttgactccggcgcgctgcggctcgacataaatgactccaccctgcagtccggccgcggtgccgccatccaggtcatcccacggttcgcgagcacctacaacatcaccgtagcgaatggctcacacctgattgcaggtgacggcaacctgctgcgcgtaggccgcgatggcgccgtttccggctcgttcaccgacgtgaacttcaccgtggatgatgcgcgcttgtcgggtgatgtccgccttgattccttgttcgccaccatgggttcgctgaatgtcgccctgcgcaacaaggcacagatcgacggccgtttcatcaatgtcacccgtgccgaaatcgacggcgacagcaactggctgatgaccggtgacagcaacgtcggccggctcagccttggcagtaccggcaccgtggcactgggcaatggcagcacgttcaataccctcactgccgacagcttcaccggcaatggcggcaccctgctgttcaacaccatgctcggcgatgacagctcattgaccgacaagctggtgatcaacggcgacgccaacggccaggcgaacgtgcgcgtgctcaatgccagtggcgccggtgcgaagaccgacaagggcatcgagctgatccgcgtgggcggtgcgtccaatgcgcagttcgacctgcagggccgcgcggtgggcgggcaatacgagtacttcctgttcaaggatgccagcgacggcggttggtacctgcgctcggcgctggccggcgcgccggacccgtgcgtggtcgatcccacgctgccggagtgcaggccgatcgatccggtggaccccgtcaatccgatcgacccaggcccggtgctgcgcccggaagccggcgcctacctggccaaccagttcgcgatggaccagctgctgcgccacggctggcgcgaccgccaaggcagcatctccgccgtggatggcgtgcgtggttgggcccgtgtggatgccacgcagagcaaactgtcggccgtggaagaccagctggacctgcgcgtggatcgctcgcgcctgcagctgggtgcagatatcggcgtgttcgacaacggccagggccgcgtgggtgtgatgggtacgctggccaagtccgatgccacctcgcgttcgcagctgaccggctacagcgcacgcggcaaggtcaacggcggcgcgctgggcgtgtacggcaactggagcagcgatgcgctgtatgtggatgccagcgtgcagcgcggccagttccgcaaccgcgtgcagggcgaaggcctggccgaagaacgctacgactcggacatctggcagtcgtcgctggaagccggctaccgcattggtatcggccagatcggcagcaccgcgctgagcctgcagccggagctgcagctggtctatatcgatgccaacaccgaccgccaccaggaaaccaacggcacggtggtgcgcagcctgggcggcagcggcctgtccggccgcatgggcctgcgcctgcagggcgaaggccgcagtgcagccggcgcggcggtcagcccgtacgtggtggccaactggtaccgcgatggtgccagcaacggcatggcgttcgatgatgaggccctgaaggccagcgtgccgcgcaaccgctatgagttgaatgccggtgcgcgtgtggatttccgttccgggctgagtgcctggggtggttttggtgtgatgcgcggtgaccatgggtatcgcgaagcgactgcgaacctcagcgtcgcgtacacgtggtga

SEQ ID NO: 531226 - DNA, 1401 bp, Stenotrophomonas maltophilia
atgccccggatcaaagccttgcatggacccgccctggtgatttccccgcacagaccctgccctctcccgccccacccgccgggctccctgcctgcgaggctgccgctggccatcatcggcgccggccaggccgggttgtccctcagtgtgctcctgcaggaggccggcgtcgagcatcgcgtgctggaggccgaaagcgtgggtgccagctggcaacggcgttggcactcgttccagaccaacaccgccaacgcaacgatggccctgcacggccacgcctacgcaggcgcagacccggaaggcttcatgggcgccgcggaggtgatccgccggttgcgcgagtatgccgacgagcgctcgctgccgatcagcgaaggttgtgaagtacagcgggtcacgcgtgagcatgatggctatgtaatcgacagcagccaggggcggatccacgcccgcgcggtggtggtcgctaccggtgaataccgccgcgcccggatgccacgggccccgttcgcgcccgggccgggcctggcggtgctgcactcgggggactaccgcagtgccgatcagttgcccgatggcggcgtgctggtcattggcggtgggcagtccggtgcgcagatcgcccaggacctgcgcgacagcgggcgcagggtctactggtctctggcccagcgtcattcgcatacccgccggctgcgcggcaaggactcgatgacgtggtgggacatggccgggcgcatccaccagcacgtgggcgaaacggccggcgtactggccggcgagccggatgcgctgcgcaaggcgcggaccgccgaatttccgttgatttccggcaagggacgcaacgggcggggcagctcgatcagcctgatggcaatgcatcgggaaggcatcacgctgttgggccggctgcagggccttgaggggatcatcgcccgcttcgccgacgttcgcccgcagctgcaggccgcaatcgaggccacgcgggccgagtacgactacctcgattcgctggccagtgcgtactacgccacgcggcccgagccgcgcacggacgatgcccgctacattccagaagaggtctatctgcactgggaaccggacgccgccccaggtgaactggacctgcaggcggaaggcatccgctcggtggtgctggccaccggcttcgccgccgaatggccctggctcgacgtggaaggtgtgctggatacgtacggctatccgctcggcgagttcggtgtttccccgcagccagggctgttcttcatcggcatgcacaacctgcagcggatgagttcgtcgttcctgtgcaacggcggccgcgatgcgcgcgacctgctgccggccatcctgcggcatcttggccggggcggcggtaccgctcccggccaggggtga

SEQ ID NO: 531227 - DNA, 612 bp, Stenotrophomonas maltophilia
atgatcttcaaggatggccaggggacgttgctgatcggcggtgcggggctcgctttgttgttgatattcggcgcacgcaccgtacgccgcgtcagtgcacgcgaccccagcgggcagcactggctgctgcgcacgctggcactgctgtctccggcgtgcgtcattgccagcctggcggtcgccgtgatcgggccccacctgctgcaacagcggcacggaatgagcaccacggcgggccttgtgacgagcgcgctgctgctgatgctggctggcgcgctcaccgcgccggtggcctggcgcgtggtggtccagcagcgccttcggcgctcggcggacacgctgccattcttccatgcgtcaactgcttctctttgcctgttgtatgtgctctgcgcgacctacttgccgctggcaaaggccgccgagcccgcgctgatgccttggttcgaacagccgggcctgctgcagctggtggcccgcgggctgctcacggtcctccacgcctcgatgaaggcagtagtgctcaccctgccggtgatggcgatacgcgccctgctgacccgcggtagccgccgccgcgagagtgagaccccgcgcccatcgccgttatga

SEQ ID NO: 531228 - DNA, 303 bp, Stenotrophomonas maltophilia
atgccgatgcttgccctgatcctgctgctctccagcctgttcggcgacgccagcggacccaccgacgatgccctgcgcagccagatcctgcgcgccgaggccccgcagcacacgcatgacgtgctgcccctgcagctctatcacctgcgccaggaccgcgtacttcgattgggctgccagcggctgccagacgaccacaggggccgcccccaggccgcgctggtgcgggcaggtgtggcgcagctgtgggaacgcgtcgatggccactggcggatccaacgttcggtcagcatcacccgctga

SEQ ID NO: 531229 - DNA, 330 bp, Stenotrophomonas maltophilia
gtggtctccgtagtcgcgctgggtaccggcgcgcgccaggccatcctgtccaacatttcctcgctgggcaccaacaccatcgagatctaccccggatccggctttggcgacctgcattcggcacgggtggaaacgctcacccccggcgacagcgtggccctggccggacagccgtttgtggacagcgctacgcccggtgtggccaccacgggcaccgcgctgcgcggcaaccgctcggccagcgtgcaggtgcaaggcgtcagcgagcagtacttccgcgtgcatggcctgaagctgggcaaagtgacttcttcggccctgccgccatag

SEQ ID NO: 531230 - DNA, 177 bp, Stenotrophomonas maltophilia
atgctggggcagagccacgtttccagcatcaccgtgcgcgtctccgacgctatcagcatggaggcggccgagcacgccatcggacgattgctggcacgccgccacggcagcaccgatttctacatgagcaacaacgggcagatccgccagtccatcgaacagaccagcggatcctga

SEQ ID NO: 531231 - DNA, 198 bp, Stenotrophomonas maltophilia
atgaagattggattcaagctgtctgttgctattgcggctgctgcattgaccctgggaatcggcagcgccgccgcggagtcccggtgtaccccgtgctacaccgcataccaagcctgcctcgccacaggcaagagtgatgatttctgctacccgccgtttgcccgctgcctgcggaacagcggctgcaccgtcccgtaa

SEQ ID NO: 531232 - DNA, 1089 bp, Stenotrophomonas maltophilia
atgttccctcgcattgccacccttctcttcctggccatgtgcagcaacagcgcgctggccaccgacacggcctatcgaccggccttccacccagaccggttgaagggccccccagccgggcgcccgaacgaagtgctggtactgggcaccacccatttgtccggccttcccacgtccttccagccggcctcgcttgagccattgctgcagcgactggtcgcctggaaacccgagctgatcgctaccgaagacctgtccggcctccagtgcgatttcatgcgccgttatccggcccgctatgcggagagcgtggccacctactgcttcgacaccaccgctgcgcaggttgcgacgggactggacgtgcctgcggcgaacacccaggccgagcgcctgctcgcaacctggccgaacaacccgacgcccgcacaacgtcgtcggctcgccgcgctgttcctggcagcaggcgaacgcggctcagcgcaggtgcagtggctgcgcctgcctgcgtccgagcgcaaggacggtgatggattggctccggcgctggtcgagatcctcgacaagggcctggttcgccgcaatgaaacccatctgatcgccgccgaagtcgccgcccgcctcgggcatgagcgcctgtgggccgtggacgaccacacggccgattcccccacacccgccgaggatgaagcggcggcgagcgcggccatcaccggtgcctggaacaacgcccatacccaggcacgcaaggacgcggataaacgcttgttggccgatctggacaagcccgggggtgtcatggcgctgtacagggcgtacaacagtcccacggtagcgatgaccgcttaccagagcgatttcggcgcgacgctcgtcgagccctcgccaaaagccttcggcaggatgtatgtgggctactgggaaacgcgcaacctgcgcatggtcgccaacatccgcgatgtgctgggcctgcatccgggccgccgcatgctggccatcgtcggcgtctcgcacaagggctactacgaggcttacctcaaccagatgcacgatgtgcgtctggtgaattcggacaatgtattgcgttga

SEQ ID NO: 531233 - DNA, 399 bp, Stenotrophomonas maltophilia
gtgcagctgcagggccggatgccgcgcacggaaggcttccagtgcgggaatcaggcgcagctgcgcgtactccggggtggtggtgaggcgcaacacaccctgcagttggtgctggtcgcggcgtgcggcatcgatcgccgcctgtgcggcatccagcgcctgcacgcagtgctgcaggaactgctcgccagcgtcggtcagggccaggtggcgggtactgcgcagcagcagggtcacacccagctcctgctccagccgcttcaggttgaagctgaccaccgcacggctcaggccgaggcgatcggccgcggcggtcaggctgccggcctcgaccacggcacggaagatatcgaagcgatcgaggctgaccatggtggtccattgtcaaaaaagatttga

SEQ ID NO: 531234 - DNA, 333 bp, Stenotrophomonas maltophilia
atgcagcgcctgtttgtgatgttccccgaccgcggtccgggcatcggcctgctgtggctgcggctgtgcctggccgccgcgctgtgcacgcccggcacggatgcggcgtgggcgtcgatgctgtgcctgctggcggcggccatgctcgtgctgggcgcgttgacaccattggcggcgttgatggcggtcgcgggcatgttcgcgcagcaggcaccgtggccgctgatggcgttgccaccggcgttgctgatgctggggccaggcgcctactcagtggatgcgcgcctgttcgggcgccgcctgctcggccgccggcctcccccattcgggtag

SEQ ID NO: 531235 - DNA, 387 bp, Stenotrophomonas maltophilia
atgcccgccacgcgatggtccctgatgctgtgcctgctgttgccgatggccgcgccggcacagaccctcgtctacaaatgcgtggatggaccgcatccggtctaccagcagacgccctgccagggacgtgccgcatggcgctgggacgtcccggcgaagcagtcattgtcccgaggcgcagtggcgccagcgctcgcgccaccgaagccttcgcgccgcccgcggcgtgccggccgggcgcagggggcgttgatcacgatcagcgcggatgcggcggcctgcgagcgtgcgcgccggcaacgcgagcgggagttgctcaagcgtcggcggctggatttcgtgcagcgccggcagctggatgacgcggtccatggcgcctgccagtga

SEQ ID NO: 531236 - DNA, 402 bp, Stenotrophomonas maltophilia
atgctccttcgcggcaagcccctgttgatcgccctgctgttgcatctgctggtggcgctgctgtactcggcgctgattccgctgggaatgaactggtatcgcgaccatgtcggcttcacctccggtcgcggcatcagcctgggcatcgcccagttccatcttttctggatgttcctaggcgcccagccgatgatcgcggtgttgcgaccgctctgcgccaagctgctggtgctggccattcccttggccttcgcgacctggacgctgatgcacaaccacccgctgcgcctgctctacttcaccgccgggcccagcctgctggcactggccgccatcgtggcaagcctgcgctactcgtcgcgcgggacctcccgcccgaccacggacaccgttgatgcctag

SEQ ID NO: 531237 - DNA, 264 bp, Stenotrophomonas maltophilia
atgctttgcctgggagagatcgtcgtcgttgcgttgctgctccggccctggtctctctttcgcttgtggttgcggctgacgatcatgctggtaccgctgctcgcctggacattgctatggagcgtgtccgccatccatcaacccccggtgcgcggcctgcactcccagtggctgcaggcgctcagcgcaggcatgttgctgacccttgccatcatcgtccccgtccagtactggccgcgcctacgccgctggcccaacggctga

SEQ ID NO: 531238 - DNA, 348 bp, Stenotrophomonas maltophilia
gtgaatcgtacccatgccgggctactgactgcctcgattacgtcactgatcgccggtgcgctcgttgtcgcgctgaccaccccactggcctcgaacgtcctgctgctcctgatggagcgcagcaacttcattcctgccgaatcctcgatcctcaccttcgagccgtatgccatcaatgaaggctcgtcgaattactggctgtacgggaaggaccggacctaccactaccatttcacctacgaagacgatgttccctacgtctacatcccgcgggacagccgctgccccggcttcgaccagcatgacgcccggacctggtgcagccccctgcccggcaagccgcgctag

SEQ ID NO: 531239 - DNA, 411 bp, Stenotrophomonas maltophilia; identical to SEQ ID NO: 241742

SEQ ID NO: 531240 - DNA, 696 bp, Stenotrophomonas maltophilia; identical to SEQ ID NO: 241741

SEQ ID NO: 531241 - DNA, 543 bp, Stenotrophomonas maltophilia; identical to SEQ ID NO: 241740

SEQ ID NO: 531242 - DNA, 393 bp, Stenotrophomonas maltophilia
atgatctggcaggagccgcgcctgcataccaacgctgcgatggtcctggtggacgtcatcgtctggaacacgatgatcctgcagttcgcgcatgatcggacgcctggaccttcggcgtccttttactcgccgagtgcgatggcgcagcgggccgagcgtctttctgccggcttccagcgccgtttcgcgggcagagaccttcgcgagctggaagccatgctcacggagggacaggaccgggtgctcgactgcgtggcgcaccattcgaacgcctcgcttttcgatcccgcgttgagcccgatgaagaccctcgggcgcaagatccagttcttcacctccaccgcctacgacgacgcgctgtcgaggctgcgccagtggaagcaggtgctgtag

SEQ ID NO: 531243 - DNA, 228 bp, Stenotrophomonas maltophilia; identical to SEQ ID NO: 162946

SEQ ID NO: 531244 - DNA, 255 bp, Stenotrophomonas maltophilia
gtgatccaacgcatcctcatcgccgccgcactcagcctgggcctggccaccaccgcccacggcgctgatttcaactgctacgccaaggtcggccccgccagtgccgcgcagaacagcagcaccctgatgggcagcgtcagcgctgccggcctgcaggccgccgaggccgagtacttccgacgcacctcgaccaccaagccggtcagctccggcaagtgggtgatccacgagctgtactgcgtgccgcgctcctga

SEQ ID NO: 531245 - DNA, 714 bp, Stenotrophomonas maltophilia
atggtcgacgtgatgaatgcactgctgccgccggtcgtgatgctgccaggcctggatggcaccggcctgctgtcggcacgtttcgtagaggcgatgcaggcgcacggcgtgcaggtgcggatattgtcgatgcccgtgcaggggccacaggactacaccacgttggcgtcgatcctgcgcccgcagcttcaggcatctcctttcgtgctgctggccgaatcgttcgccggaccactggccatcgaactggcggcggccgggcagcctggattgcttggattggtactgagtgcgaccttcgcacggcggccggtgccactgcctgcggcgagcgcccggatactggctccggcgtggccgttgccgccactcacgttgatggcccggttgctgctggggcgatggcggacgcgcgcgaaccagcgtgagctgggcctggcaatcgcgcaggtaccggctgcaaccctgcgccagcgtgctgcgacaacgctgcaggtggatgttcgtgcactgctgccggaactggtggtgccgacgctatgcctgcatgccctgcaggaccgcctgctgtggccacccagcgtggccgagctgcaggtgttgctgcccggcgcccggcatgtttcgctggaggggccgcatctgctgcttcaggcacgcgctgacgcagccgcagccgaagtcgccgcgtggatgagaacgctgtcgtcctga

SEQ ID NO: 531246 - DNA, 288 bp, Stenotrophomonas maltophilia
atgcgcaagccacgctggctcagctggaccggcattgccatgtgcgtactctatctcgcactgacggtctggtgggtccacgacgcccaggcctacagcgatcccaagagcgcctacatcttcatgcaactgccggtgatgctgcagaccgttgcgctcgacgccatcggcatgggcgcatggctttccggaaagagctggacaaccatctaccttctggtgattccccccaccctggctgtgctgtatgtactgggggccatgctcggcagcgttctggagcaatga

SEQ ID NO: 531247 - DNA, 663 bp, Stenotrophomonas maltophilia
gtgaagggcgagacggtagtgcgggtcaccttgtgggtgttgtggagcctgtggggcatcgcctgcctggcgctcttgctgggtgcagccgccaatgccctggcttcgcgcacgcagacggtgccgctggcgatgagtcctggtgcaaccgcccagatcaccgtctatcgcctcatcgatgatcgtctgcggttgcgcctgcggtatgccgcagacggtacggaggctgaccccgatgtactgctgcgcatcgaaactccgaccgctcatggagccttccgcgcaggggcgcgttcgggcgtggccgggcagggcatcaaccgcccgctggcatcggttgagtccagcggcctcacggcgtcctactttggatacggccgcggcgatgcattgccacgtggccgctcttggctgcgggtcaccgtgctggaggtggacccggcattggcggggcacgcggcagacatcgagctgcagccaccgctggatctgctgaagctggccgacctggattacgtctggctgtggccgttcttcttctggaagatggcggcactgtttttgctgattccaggggctgcgttggctgtcttcacttgggcgttgcggcgctggcagcgccaggcatcagtgctgccgacttcagcaggggataggggttga

SEQ ID NO: 531248 - DNA, 168 bp, Stenotrophomonas maltophilia
atgactgcgccggtgcccgcgctgctggaactggaacaggcgcggtcactggccgcggtcggcagcgtgctgcgcgacgctgcatcgccactgggctacgaccgcctgctggtgttcgccaccgcaatctggctggagcgcgacgcggcgatggcccgcacggattga

SEQ ID NO: 531249 - DNA, 327 bp, Stenotrophomonas maltophilia
ttggccgacccgacccgttgcgcgatcgtggccgcgctggggcaggggccgtgcacggtgtcgatgctggcagagcccttccagatggccttgccctcgctgatgaaacacctggccgtgctggagcgcagcggcgtggtgcgcagctacaagcaagggcgcgtgcgcacctgcgaactggtgccggcgcggctgcgccagggcgagcagtggctggccgaacagcgcgcgacgtgggaagcgcgcaccgaccgcatggtcgaattcgtcgaaacgcatcaccaacaggagcaggcccatggccgtagacgcaggcaacaaccctga

SEQ ID NO: 531250 - DNA, 498 bp, Stenotrophomonas maltophilia
atggtgccctccgccactgacgccgcccgccttgcccaggcgtcggtcctcgccgtgctggccgccggcatgctgccggcgcagctgttcggcggcctgctgttcgcattggacctcgggcgtacgccggtaccggccctgatcggtggcgggctgatgttcgtactggcggtctgcaatgccattgccgtgctgttgccgatggcgctgatcctgcagtctcagcagcgcctgcgccgggtcggtttcgtccgtgtggggttcggcctgggcgggctggccatggcggcctgcacctggccgggtgacgacggcggcccgctgctgcagcgcctgcgctacgtcgacactttcgacgtgatcagctacggcctgtcagtgctggccgcaggcggttttggtgcggtggccggctgggcgttccatgcggtgttccgcctgtcgttggcaggtacggctggcccagcgccgccggtgctgccgggcgcacgcgcctga

SEQ ID NO: 531251 - DNA, 816 bp, Stenotrophomonas maltophilia
atgaggggccgtccgcacctgatgccgagcgtttcgttgatgctgctgctggcctgcagcgcctgcgcgcccgccggagagcgcgccacgccggcagcaccgactgccaagccggcgccgaaaacggaggccctgcccacgcaggcagtgcccaccgaacgcggattgcctgcgttgccgggagcctcgggcagcgcccaccccggcggccattaccgcgcattgccggaagcggccaagcgggtgctgacgcaactgaagtgcaacgtggaaggcgctggcgacgtgcaggtgttctccattcccgggcagggcggccagcaggatgtcatggtcaccgatcgcggtgggccgcacttccggtactggctccgctcctttgccggcagcgccggcgccaccggctatctggtgcagttgcaggactgcccggcaaccaccgcgggcatgcgcgcctacgtcgcgcagggaaccgcaccgctgcaggatgtcactgcatcactgctggcccaggccggactgcccgacgcggcgacgatggcggcctaccacggcaagggcgcaggtgatctgttcgccttcatcggagttctggacaaggtgccggtgctgcgttgggtggccgaggccgatcccgagcagccgctggcaggggatgcgcgcaccttcgaccatggcaatgccgtccatggcggcttcctgcactggaaccgggatcacttcgaggtggcaaagacagtgcccgccgccctgtggccgtgcgatgacagtccgttgctgccatgcaagggcgacccgttcgtgactgggcgttga

SEQ ID NO: 531252 - DNA, 195 bp, Stenotrophomonas maltophilia
atgcgcggccagatacccctgccggaggaaatcaacctcgccacccgcctgcgtcatccctgcagctgttcacgtccgaccatcgcccccatcctgctccgccacgtcaagtacgccagcaacggcgtgatcgagttcggccggcagtggcaggaaacaacgcctgggctgctgctggaacccccggccacttga

SEQ ID NO: 531253 - DNA, 1707 bp, Stenotrophomonas maltophilia
atgaaagaaatgttgatggactccgggcgccgccccgtagttgcgccattgcagagtgccgcgccgcgccgcgtggccgcagcgctgatcgtgctggtaatactgatggtgacgggaaaggcgctcagcacctacctggggctgccatacgcctggatcgtgctgcccttcgctgtcggagtcctgctcgtgcagcaggccggtatccggaactgggcactgcctgcggtgcttgctgtggccttggtggcactcgcagcctggacgggcaatcaattccaggatgccacctgggatgggaatatgtatcacaagccagccactgtggcattgcacgagggctggaacccttggagcgcaccggagttcatcgattgggcgcggacccgggacgaaccgtactacgctggcagcatctgggaaggcaacgacaacaacaaatgggtcagtcactaccccaacctgtcctggctgtttggcgcggctttgatggacacaggcttcgggtgggagtcgggcaaggccttgggcatggtactggccatcgcgttgttcctgtatgcgatctccgtactgacgccagtgctgggccagcgtcggcgggcggttgtgggagcgatactgctggcgatcgcacctacgctgatggcacaggcggcgaccaactacgttgatggcgcgacctatgccgcggttgctctatgcgtgctggcttgcctggatgagcagcggggacccaccggcaacgtcatcgcatggggcagcctgatcgttcttgctggactgaaattcaccggagctctttatggggcgctgttggctctccccttcctgtttctgcgcaggcccaactggaaagaagtcctcggatgggcgctgctgggcgcgttcgttctgtctcatccctacctgaaccatctcgtctcgggcctgcccatcgcctatccggtcacgggcaacaacaaggtgatggagaatcaggccgagcccagcatgctcgagggaaatcgtgcggtaacgctggcgcgatcgctgttcgcccatacctccaacacttttgtgcacccaggcctgaagctgccgggtgaggtaggccctggcgaggtcgaggccgccggcattcctgacacccgttatgctggttttggaccactgttctccctggcattctgcatcgccgcactggccatcctggttgccacgatcaagccgcgcgagcgcactgatcagcccactcgtcttctcttggcgctgatcggatacctgatgctgctgaccttggtgcacgccgcaccttggtgggctcgttacgtaccgttcctttacattgcggtggtacttgcactgcttggcagttggaggtcgccatccttgccggcacgttgcctgtccattgccgggatgctggtgctggtggccaatatcgggcttgtcagccagggcgtgcatcgctatacgcaccaggctgctgtggaatctgccgccgacgtggacgcggtagtgaaccagcactggcgcgctgacagtacgctgattgttcaggcacctcagttcgttggtttttcggcggtctatcacttcagcgaagtaatgaagatcggccgcgtccagtatcagtatgtgcccttgggttcggataactgtggcagcgatgccgatcggggttactggattcgcctggtgcgggtctgccagcacactccatga

SEQ ID NO: 531254 - DNA, 1287 bp, Stenotrophomonas maltophilia
atgcagttagtaaatatagcaattcaaaattacaaatcgctgcgccaagtgaattttgcgccgggcgatttctctgtgcttatcgggagaaatagttcagggaagtcaaatttcgcagatgcctttgaatttctttcgctggcatatgccgatggcttagagcatgcagttgcgagaaaagggggctacgaaaacatagctcatagaaaggaaaggcggtcccgatcggcgatatcctttagtatagagttggctgacgaattcaagctggcacagtattcaagtcaatttggaatctcacctggcgacagggatatgtcatgggtgtttcggcatagctttgaatttagggcgacgggagagggtatacgcagtgactttcgaataatatctgagcatcttgaggtcatagggtctggtgagtttcaggatggcagtagataccaatgggttagaattgagcgaaatgaaagcggtaagatagccgtcaagggtgacctcgattctgcggttgctcaggctatgctgattgattcaaaattctggtcatcggatcttggtggggaatttaatattccgccttctgagcttctatttgtaatgccgttctttaggtcgcgggtaatagggcgatttacatcctggatgcgaaatattggcatattccagatatcccccgaaatttctaggcattccggtgtgcctaccccaaatccgcatttgtccgcgaggggggagaatctcccggccgttgtcgattggcttcagagaaagaagcctagggaatggaagttggtaatgcaggcgatgaggaacatcgttccagagatatcggaaattagcgttagctatctccatactagaactctggggctcttcttctccgaaaaaggaatcggtcgggcctggaccgccgaggaagtttcagacggaaccatacgggcgctttctatgcttgtagcttgctttgatccgcgaaatacagcaattgttgtggaagagccggaaaattccctccatccatggatcattaaagaaattattgaccacttgaaagccctgtctcgcgacaagcttgtgatggtgacgtcgcactccccgactgtccttaatatgatttcccccggggacgtctgggtgatatttaagtatgcgggagagactaatatacggccacttgttgaatttgatgaggctctcatggatgactggagtgagggaaaataccgacttttcgactatctagagtccgggtatgtttcagaagcggtgccatcgcctctatga

SEQ ID NO: 531255 - DNA, 1515 bp, Stenotrophomonas maltophilia
atgtctgttgatcgcatcgccaacgcgcgtctccgtgaccgcgtggtctccgcagaggccgcagccgcgctgatccagcccggtgaaaccgtggccatgagcggctttaccggctccgggtatcccaaggccgtccccgtggaactggcccgccgcatcgaagcggtgcacgcccagggccagcccttccagatcaagctgatgaccggcgcctccaccgcgccggagctggatggcgcgctggccaaggccgatggcatcgccatgcgcatgcccttccagagcgacccggatgcgcgcaaccgcatcaacgagggcaagctggattacatcgacatccacctcagccacgtggcccagcacgtgtggttcggcttctacggcgagatcgataccgccgtgatcgaggtctcggccatccgcgaggatggctcgctggtgccctccacctcgatcggcaacaacaagacctggctggacctggccaggaaggtgatcgtcgaggtcaacgaatggcagccggccggcgtcgacggcatgcatgacatctactacggcaccgcgctgccgccgcaccgcaagccgattccgctggtgaacgccaacgaccgcatcggcgacaccgcgctgcgctgcgacccggacaagatcgtggcggtggtgcgcaccaacggcccggaccgcaacagcccgttcagcccgatcgatgcgaccagcgaacagatcgcctcgcacctgatcgagttcctcaagcacgaagtgaagaagggccgcctgccgccgaacctgctgccgctgcagtcgggcgtgggcaacattcccaacgccgtactggccggcctggccaagagcggtttccgcgacctggccgcgttcaccgaggtgatccaggacggcatgctcgacctgctgcgtgacggcgtgctgagctacgcctcgtgcaccggcttcgcgctgagcccgcaggccaacgagaccttcaaggaacacatcgatttctaccgcgaacgcatcatcatgcgcacgcaggaaatctccaaccatccggaactggtgcgccgcctcggctgcatcggcatgaacggcatgatcgaggtggacatctacggcaacgtcaattcgacgcacgtgatgggcacgcggatcatgaacggcattggcggttcgggtgactttgcccgcaacggtttcctgtcggcgttcctgagcccgtccactgcgaagaacggcaccatctcggcgatcgtgccgatggccagccatgtcgaccacaccgagcacgacgtgtcggtgatcgtgaccgagcagggcctggccgacctgcgtagcctgaccccgcgcaagcgcgcgcaggtgctgatcgacaactgcgcgcacccggatttccgcccgcagctgcaggactacttcgaccgcgccagccacgaaagctacggcaagcacaccccgcacctgctgccggaagcgctgtcgtggcaccagcgctggctggataccggcacgatgaaggcctga

SEQ ID NO: 531256 - DNA, 1068 bp, Stenotrophomonas maltophilia
atgccgctgcctgagcgcgctgcgcgggggctggtggtgggcaagttctgcccgctgcacctcggccatgaacgactgatcgacttcgctgccgcgcgctgcgtgcatctgctggtgatcggctggtcgcagccgggctttgccggctacagcgccgagcgccgtgagcgctggctgcgtgcgcgtttcccgcaggcgacggtggcggtgcttgacgacgcgcgactggcggcattgtgcatgcagcatggcttgccagtgcgagccctgccgcaggacagtgatgacgaacaggtgcagcgggacttcaccgcgtggctgtgcctgaacctgttcggagggccagtgcagacggtgtacaccggcgaggactacggcgatggttttgccgcagcgatggccgcgcacttccatgcaccggtgcagcaccagcggctggagcgcagccgcgatgtcggccagcccagcggcacccggcttcgcgccgatccgcatgcgcttcgccacggcctgtcgccgcaggtgtacgcggactacgtgcagcgcgtggccttcatcggtggcgaatccaccggcaagaccacgctggcgcgggtgctggccgagcggatgggcacgacgtgggtcgcggaattcgggcgcacgctgtgggaaatgcagggcggtgacctgcgcgaaccggacctgctgcgtatcgccgaagagcagccccggcgtgaggatgcggcggcgctgacggcgcatcgctggttgttctgcgataccacgccgctggtgacgctgggctacagcggctggatgtttggtacggcaccggaggcactgcggcaggctgcactgcggccgtacgacttgttgttcctgtgtgcgccggatatcccgttcgaccaggacggcacgcggctgggggaggcattccgggcgcagcagcatgcgtggtacgtgcacgagttgcaggcgcggggagtcgagtacgtgctgctggagggcgacctggaagcgcgcatcgcgagggtgcggcacgagctggccaagcttacggacagccggttcagtgtggcggcatga

SEQ ID NO: 531257 - DNA, 1569 bp, Stenotrophomonas maltophilia
atggacactcttcgcctgctggacctggacatcgatcgcccggcgcagcgggtcagccgggcaggtgaagatctgcccgttgccggcctgagctggacgctgttcgacgtgctgctggcacacggcaccgatgtggtggatttcgacacgctggccgcgcaggtctgggcaccggcggtggtgggcgaagatgcggtcagtcaacgggtcaaacttctgcgccaggcgctgggcgatgacggccgtcggccgcgctacatccgttcagtacgtgggcgcggctatcagctgtgcgtgcagccggtgcagatcaccgcactgcctgcccggtcctggtggggccgcggggcggggtggggcctggcggtcgttgcagtgctgggcatcgccgcaatgctggcgtggtggtcacggccggcagcgcccggcgcggcgcagacgctgctgcagcgtgccgattactacgctggcatcggccaggccagcaacaacgagcgggccatcagcctctaccggcaggcactgcaggccgatccggagtccgcgctggcgcggcgtggcctgtcacgtgcgttggcggcgcagggctgcctgttcaacggcacgccggaacagatgaaagaggcgctggcgctggccggcgaggagcgcaggcgagcgccgcgcgatgccgctgcgcaggccctgtggggctatgcgcaggattgcctcggcaacatgcggcaggccatggccggttacgcgcgtgccctggcgctggaacctggcgacgaacgcagccgtgcatcgctggcctacctgcggcaggagcgcggcgagctggccttggcgctgcgcgagaacctgtcactgaaagcgcccgagcgcgtgcgcttccgtgacgtgcaggtagcgcgcgagctggaactgctgggcttcacccgggcggcggcgcaacgccacgcgcgcaacttccagctctacccggacaacctcttctccaatatcgcctggccacgcagcctgtatctggccggcgcgccgcatcaggccaggcaggcactggacgaagcgctggcgcgcggcacgccgcatccgcagctgctgcggttgaagggggagttggcgctgctggctggtgatcctgcgacggcagctgaggcgttcgaacgtggtcgccagttgcggccccagcaatcactgggccagacgctggccgccctgtacggcgcgcagccggtgcaggccgggtggatcaggcagcggctgcagcggctcaacaccagcgaaagcggtagcgatggctggtccgacacagctgtggagcgggcactgctgttgcaggccagcggacgcgaagacgaggccgtcacggcattgcagcaggccgtcgacgacggcttccgcgacgtggcgtggctgcgcgccacgccactgttcgtgcccctgcatggcgccccgggctggccggcgctgctggagcgcatcgatgccgacatcgcccggcagcgtgcgcaggtgctggccgccgcgtggcgcccggatgatctcgccaccctcagcgcagcgccggcagcaggaactcggtga

SEQ ID NO: 531258 - DNA, 258 bp, Stenotrophomonas maltophilia
atggtcattaccgttaagtgcaatgccgcgcagtggtccctgttggacccggctgagggcgtcgctgaagcattcaacacaggcgccgcagcgttcgatgccgcggttggccgggccagcgcccaccaccgccggaccggccagggcaccacagtgcgcgtggaagcgctcggcaacagcgtggatgccgtgcatttcgaggcgttggcgatggcctccgggccggttatcgggctgcatcctgcgccggtggcgtaa

SEQ ID NO: 531259 - DNA, 477 bp, Stenotrophomonas maltophilia
atgaaaatatcaaaggctggctgcgcatcgaaccacgcacaccaccagcgcggattctctctgatcgaactcatggtggtcctggccatcatcatggttctctcgctgatcgcagtgcctcaatacaagaagttctctacccggtccaagctggcggcggccctggccgaactggccggcgggaaggctggagcggaggcgtggctggccgaacaggggaatttctatgactcagacaaccgcaagttgggactacctgagagcagtgagcgctgtgaaaccatcgcaacacgcactcgtgcagatggcgacctggaaatcaattgcctgctgcgattcgatgctggctacaacctggggacatggcgaaggaacctgatgctgatcagggactcggacagtcatgaatggcgctgctggactaacgtccaccattacgacctcctgcccaaaggctgtggctccgacaatccatag

SEQ ID NO: 531260 - DNA, 432 bp, Stenotrophomonas maltophilia
gtgcagcagcggtaccgcctgcggttgccacgcggggcgcgtgagatgcgcatccgctggatgctgctgatgatggtgctcctgccactgccggcacaggccggcggtggcagctcgcaggcactggaatggcgccaggatgatgcgcgactggcgttgcgctcgaccgagggacaggtgcatgtggaggctgccagtcccgaagcccgcttcggcgtgcgcagcggcgatcgcatcctgcgcatggacgacaccgccgtgcgccgggtcgagcatcttgtcgatgcccttcgccactccacgggccgaaccgtctatctgttgctgcgccgcgacagacgtgaattgactgttccggtgaatgcggctgcctggcgcctggccctggtcaccccgccgcctccggcaccaccgcctccgccccgaagctga

SEQ ID NO: 531261 - DNA, 1035 bp, Stenotrophomonas maltophilia
atgcctcttgatctccgcgtgatggccgctgcactgggtgtcttgttctgcagcagcgcacaggccgccgccccggatgccatcgacctgccgacagcacaggcgcaggcccagctgctggacatgcttgagaaggaatcgctgcaccgcgaccgcgtggactggcccgccatccgtacgcgcctgaaggcggcgcagaacgatccggccaagacccgcgagctgctgcgggaggccaccggccgcagttccggagggcatggtgcctggatcagcgcgaagcagctgcaggcgaaggcagagcgcctggcgcgcgccaatggcgcatcggcgccagcctcgggcgcaacgactgccccggctgaatcactggacccgcgcatcggtcgggtggagatcgggggctacggtgtcatgcagggccctaccgcgcatcagcagatgaaggaacgtgcgcagcgctggcaggcgatcatccgtgaccaggacagcggcctccgttgcggctggatcgttgatctgcgtggcaacaccggcggcaacatgtggccgatgctgctgggcgcggcgccgctgctgcggaccacgcccggcgccgaagaggacgtgggttccttcgccactgtggacggtccgtcgcgctggcagctgactacgaccagcgtgcgcctcggcgggcgcgtgcggatcgatcttggcgggcccggccatctgctgaagcacccgggagcgcccgtggccgtactgaccgggccgcgcaccgccagttccggcgaagcgaccgtgcttgccttccgcggtcgcccgcagacgcgcagttttggcctggccacctcggggctttccaccgccaacgtgatgcggccgctggtcgatggcagcgcgctgctgctgaccaccagcgtgatgcaggaccgcaacggccagggggatgggctgaagatcgaaccggaccagcgcatcgaaggtgatgcagctaccgtggccgccgcgcaggcctggctgctggcccagcccgcctgccaggcgcgctga

SEQ ID NO: 531262 - DNA, 150 bp, Stenotrophomonas maltophilia
atgttgctcgcggcgcagccggcccgcgagatggaggatgcgccggcgcagtgcctgccgcaggtggaggaaggcctgctgcacgcggtggtggtgctggccgatcatgcaggtgggccggaggcaccgggtgcgcgcgcggcatcgtga

SEQ ID NO: 531263 - DNA, 4464 bp, Stenotrophomonas maltophilia
atgaatcacatctatcgtcgtatctggagtcatgcaaagcaatgctgggtagttggtagtgagctgagcgcatcgtgcggcaagcggtcgtcaaccaagctcagggcgcttgctttgctggttgtcgcgtcgacggcgctcgctgcatcggcgagtgagaacgcggagcctgtgtctgagagcgagcggacggtggagtgggaagccgcgcgctttctggctcattctccgatggtgtcttcgctctttgcagcgcaaccgcgtgcgatccacacccagctggcattgctcaacgatgcctactacaaggacgccacgctcaacggcgacatgcagatgattcttggatccaggtccagcatcaacggttggggctcagtggtctacgggacagcgtcctcattgtcaggaaaaggcagtgttctggtagggaatgaagcagtcgcaaaaggggatagaaatgtagcggttggctacaaggcagaggcaaagagcggctactcgacggtactgggtgcgagttcggttgcctcgggcgtcggcaccactgctgtcggtcacgatgctcgtgcctacgctcagaactccatagcagtaggtagtggcgcccgcacagttgaaagcacggcaggtgtgtcccgcatcgctatcggagggaatgcatttgcgggaaccgctggctattccggagccattgcagtgggtggcaacgcgcgtgcagagttcagcggcgttgcgctcggtcatcatgcgaaggcactggctaatggatctgcagccatcggcgccaactcagaagcgaccgaggcaaactcggtctccgttggcaacgcgtctaccaagcgacgaattgtcaacgtggccgatgcgcgcttgagtgcggcaagcacggatgccgttaccggcaagcagctgtttgcaacgcaaacccttgcgcaatcggtcaacaatcgggtggatgcgacggcactggcgcttggcaagggagcattggcagagtcgaataccacctatggcgcaagcacggcagtcggcaacaacgccaaaggctacaacggcgcgagcgttgcgctcggcgatgacgcgcgcgccggcgtcgatgtggcaggaaacaaggtcaatggcagggcgggcggcgtctcggtggggtccggtacccggagtgcgcacggtgccgtggccatgggtcacaaggccgttgcgggtggcaatttctctgttgcgatcggctcagatgccgtcgccaatgaagagctgagtaccgctctcgggaaagccagtatcgccggggcccagcagacgacggccctggggcgaggaacgcaggcaacggcgaagttcgccaccgcagtgggcaatcttgcgagggcaacgggcgtcagttcactggcccttggaaacggtacacatgcagggcacgaaaacgcagttgcgctgggggctggttcggtcaccgcctcggccaattccgtgtccgtgggcaacgcgaagtccacgcggaagatccagtacgtcgccgatggtgtggtgggtgccggcagcaccgatgccatcactggcaaccagttgttccagaccaatacccggctcacggccgtggagaagaccgcaggcgatgtgacgggtgagctggccgcggtgaagtcaattgcacaggccgcgacgaaccgcatcgatgcaacgaccttggctttgggcaaaggtgccaccgcagagaatggtagctacggcgtcagcaccgcactcggcaacaacgccaaagcgtacaacggccgcagcgtagcgttgggcgacgacgcgcgcgctggcgtggatgcggacggcaacaaggtggcgaaccagaacgcgggtgtctcggtcggtgccggaacccgtagcgccaacggtgccgttgcaaccggcttccgtgcaaacgcaagcggaaacttctcgattgctgtaggcggtgacgctaaagcccaggctgagcacgctacggcggtcggctatctgagcaaggcagtcgccagccaggcaacggcactgggtcgcggtagcgaggcgacggcaaagttcgccagtgcgctgggcaatctggccaaggcttcgaacaccagctccgtggcgctgggtgaccgcgctcaggcctcacatgagaatgccgttgcgctgggtgcaggtgcggtgaccgcgtcagccaattcggtatcggtcggcagcgccagcaggaagcggaagatccagtacatcgccgatggcgcagtgggggccggcagcacagatgccatcaccggtaaccagcttcatgccaccaaccaggccgtgaccaaggcccagacagcagctgacggagcgacgaccaccgccaacgctgcaaaggtggaatcgggcaatgcgctggccgaaacggtggcgctgggtggcctcgtcagccagaccgctgccaatgagagtgttcgcctgggacagaagaacagtggcacgcagctggatgtgcgcaacagtgccaatgcgaaccgcaggatcgtcggcgtcgccgacggggccatcagcgcgaccagcaacgatgccgtgaccggcaagcagctccatgaaaccaacgcgaacgtgaactcggcacagacggcagccagcgcagcgaaggacagcgcggacacggcattggctgatactggagtcttgaagggtcttgtcggtcaagtggctgtcaacggcaacgttcgtgttggcgagaagaacagcggcgccgtgctggatatacgcaacagcgcaaacgcgaatcggaagctgaccggtgtggctgatggagtagtcagcgccagcagctatgaggccgtcaacggcaggcagctaaacgtgaccaatgacaaggtggcgacggtggagggcattgccaggtctgcgggtacggaagctggcgtggcaaagacggatgccgccaaggcgctggctgagacaacggcactgggcgggctggtggcccaaggatctgcgtctgggagtgtgcgtttgggcgagaagaacagtggcacgatcttggatgtgcgcaacagcgccaatgccaatcggaagatcagtggtgttgcggatggctccattgatgccagtagcacagaggccgtgtcgggccgtcagctccactcgacgaatagtcgaattgcggatttggagagcgccaatcactatgtgagcgtgggtgttgactcattcagtgagcgcgcagaggcggccttgcttggagtggctattggtgattcagcgaaggccggagctgaaggaggcaccgcattgggagcattcgcaacagccgttggaaagaactcagtggcagtgggccgtggagctggagtcgctggtggcgcctcggatggttttgcgatgggagcaggtgctcaggtgcatgcaaacaacggagttgcgatcggagcgggcgctgtggttggagactctgctattggctccatggcattgggtgcagactccgctgcagacgagcctggaaccgcgtcttttggcaatgctacaactcaacgtcgtctgaccaacattgcccgaggtacagccgaccacaacgccaccactgtctcccagctcaaggattccctcgccactctcgggggcggcgcaggcatggacggcaacggcaacatcatcgccccgacctatacggtgcaaggcggaacgcagagcaccgtcgaagatgcactgatggcactcgatggcgccgtcatcactgccggccgtcgcgcggacaaggtggaaggtcagctcagttcgattttccaggattcaccttcggtccgcgccgacggcgtcaaccagctcaccctcgccggcgccaacggcatggtcatctccaacgtggccaacggcctgatcgcggccggcagccgtgatgcggtcaacggtggccagctgcattcgatgcagcagcagctcaatggccgcatggacggtctggagcagcgcatcgacgatgccccggcaccgcgtgccctggcgtcgtcctcggttccgaagccgcaggccgaggaaactcctgtggtaccggaaggcaaggactcccagcaggttgcctcggtaggcgagggtgacaagcccacgccgcagccgaaggccaacagggacgaatcgccgaagccgcaggtcgacaccgccgagctggagaagatgctggcccgcgccaacgagtacaccgatggggcgatcagcaacttcgagcgccgcctggacaagatggacaagcgcttcaaccgcatggcggcgatgagcagtgcgcagacggcgatggcgatgaacaccgccggcctggcgacctacaaccgcctcggtgcgggtgtgggctacagcgagggtgagtcggccatggcggtgggctaccagcgcgtgctcaacgagaagggctcggccaccttcagcctcaatggtgcgttcaccaacagcggtgagcgcagcatgggcgtcggtgtgggcatcggctggtaa

SEQ ID NO: 531264 - DNA, 168 bp, Stenotrophomonas maltophilia
atgaaccgcagccaggccctgcgccagctggaagactggttcgcgtcgaaaggctggcgctcgctgccgttccagcgcgcgatgtggcggcactatctcgccggcggatccgggttgctgcacacgcccactggcagcggcaagacactggcgatgttcggggtgtaa

SEQ ID NO: 531265 - DNA, 744 bp, Stenotrophomonas maltophilia
atgcctgacgtgaaaatctcccagctcgccgccgccagtgcggcctcggtcgcggccggggccggcctgtggacgatggctggccacatcttgggcctgcgcatggagtacgttggcccggctgctttgcgtgtctcaactggcagcgcatggattccctcgctgcagcgagctgttgaggtgaccagcgcgctcacgctcaacgggctgtcgctgaccgccaacacctggtaccacgtcttcctttttatgaacggggccgtccccgccatcgaggccgtgacgacggcgccggcggccccatacagcgggaccgctcgcgccaagacttcggatctcagcaggcgctacatcggcagcattttgactgatggcgcagcggcgatctgcaggtttgtgcacgccgagggcgagattcagtacctcgtcaacgcactgcctccgttccgtgtcctcgccggcggaagcgccaccaccagaacggcggtatcgctgtcgggggtcatcccatccaccgcgacagtggtgcatttgaatgccatcaataatggtgatcagcagctgttcttagacgttccggagatcggcaattccggggcagccagtcgatacacctgcctggccaaccagcgcaccccgatcattactgcggccccctccttggccttgcagtacttctacaccgtggcaccagttggctctggtgcgttcttggacgtatggggctaccgatatgaccgttaa

SEQ ID NO: 531266 - DNA, 981 bp, Stenotrophomonas maltophilia
atggcctacatcgaacacgccaatgtggcgaatctccacacgctgattgatctgatcgcacagttctgtgccgcgaatggctggaccgtcgaacgcaataccctcagtggcaccaacaggacgcttacgctgcgtgttccaggcgtctcggactacgttcacctctacaacatcgatcaggccaacctcagaagccggatatcgatcggcttctcggcggccgcagttccaggatctcaaccgaacgttacgccggaagacgccatcagcaacgtgctggccggtccgtatcctcggctcaagctgttcgcaaatgggaacgctgtgcatgtggcaatctcgaccgcaacggccggtgactaccgtcatcacgcctttggcgtgctgcagaaggcgggagactatgttggtggcacctatgccgacgggacctattggagagcgctgactgggagctacagtggctatatcacgacgaacggaggcaacagaatcctgttcggtcatgccacgtcgccgccgggcgttgggcacctgcgtgcggactcggcagaagacggccgcagcaacagctttcatcgaatcagcaactactacggtggcgccctgggaactgaggggaccgcatgcactggggttggctcgctcggccagtcattgacctccccgagcgcctacgacctcttgtggttggggcgagccctgggcgccggagatgagaatatcttctccggccgaagtgtcttgcacccgatcatcttttctattcggcgcgcgggcgcctctccgtatctgtcgccggtgggtgtggtgcttggcactcgcgcctgctcgatcgccaagctggagcctgagcaggagatcactatcggcgacgagacatgggtggtgttcccctggctgcgcaagctggcgatgaacactgccagcaacgccactccagcatccggcaactatggctgggcggttcggaagtcctga

SEQ ID NO: 531267 - DNA, 978 bp, Stenotrophomonas maltophilia
atggcctggaaaaccggcacggccgctaacgtcaacgatctgctgctgcaactgcgcgactttctgactgccgactccgcgctggtcgcggcgaaccagcagtggactgccattggcggcgtcatctccggcccgatcgctgccaacgactttgtgtcgctcaaaggccggggcctcgctgggaccgacgaaatctacctgtccctgcaggctttcaccgacgcgtccaacagctactacacgttggctgtgcgaggacacacctcgtacaacccctcggcgccgtccttcgatccggttggcgctaacagcaatcctatcggcttgcccttggtgaactctgcgatcgtctactggttcatcgccaacggtcgatgcttcaaggtcataaccagggtgaatggccgttacgatgccatgtacgcgggtttcatcttgtccgagcaccttccggaggattggtcttacccgttgttcattggcggatccacctattcgcgatcgaaccgtgcatccgatgacagcaacatgcacagcaatttctggaacccatccggttccaacagcttgaatacttcgctgtcacaagcctatttgttctccccgatgcaggcgtgggttccagtccggaacacctacagcaccagctactccacctcgactgtcggacggctcacggtgccgtggggaggcatctgtaacagcaaccatcgccggcttctggacggcactgcatggcttcagcgcggtcagcttctggccgttgccaatgagtcgggaaacccggacgtcggcaccgcctacgatcaagtcccagagggcgggcagttctatggcggattcgatggcgtgttctataccccgtcccttggtgccgttgctgagcagcgcgttaccgccgacgggatcgaacacattctggttcccaacgtctaccgcaccggtgacgggcagttcgccgccttcgctctggagtaa

SEQ ID NO: 531268 - DNA, 474 bp, Stenotrophomonas maltophilia
gtggccaagccccgcaccgcgccgtccagcgcacccaagaccgtccaggacagcaagccggccgccgcgccggccgtcacggaagagaagcccgcagagaccgccacggcacagttggatcctccggccgatgccaatgccgatgccgattccaagatcgatgtcgacgccgccgcatcgtcggacttgaccgccgacccggcgctggcaccggccgagaacgatcaggctcctggcgccggcggcgacgttaccgcgtctgccccgccggccaccgctgatgccgccggcgtgaattcgcacgatgacgacgcgccggcacgcgtctgttttgaggtgctgactccgttcaagttcaaggggcaccccgtcaagccgccggcctggatcgaaatctccgaggatgatgcggcgatctaccaggccgctggcgtcctcggcaccgagccggccgaacccttcgaccacgtctga

SEQ ID NO: 531269 - DNA, 384 bp, Stenotrophomonas maltophilia
atgtctgcgcaaaccactgcctgcaagcaggtgaagcggtacaaggtcgagcaggactggggtgatgcgtgggtgatcctggagattgatcacgcccagctgaccccggaggtggccactcagatcaacgcattctggacgggggcagacgctcgcttggccggcgccgacgacaaccctgtcgtcgcggtgatcaagatggccgcagccgacttcatcggtatggtcctggacgctcggggcgacctcacgtcgcgtggcatgcaggaggagttcgatgatcaggagggctggcctgctgcgcacggcgtgaagctggtcgattgggacggccgaccggatcttgactccgctcttctgcagctgaccgagctggagtcctga

SEQ ID NO: 531270 - DNA, 963 bp, Stenotrophomonas maltophilia
atgtctgtctttcccagatgcccagaacactgccgtcgtgagtacccagggcccgtcgtccacgtcgtggtacggaatatccgccagcatcccgatatccgcgaaattcaactgcagcgtgccttcctcgtctgtccagatccgccttccagtcaatttcaacggattgcggctgatgtccgcctcatcgatttccaatgcctggagcaatccggacagggaagccgagctggtgccctgacctaccgcctgaatcactacatctatgtctggaagattcatctgattgttcaccgacactgtacgaaaatatctgggccgcctacatgtaatcccgcatgccggccccaagtacgggagacagtcgagggctcacggttggtgatcactacgatcaaccggcaggcccacggagatgcaccgaatcgaatcaacaggaccggaaaaatcgactctcagttcatgaccgttgacacaccagatatcaacctcaccagaaaaccccgcttccatggggtcaccagcatccagagcggagagtcgctgcctgacttcctggcgttgcatggaaaatctcagttcatacggcagcgatccagcgtatgcaggactgctttttttgactccccagaagaccacattggtcagaacccagggtccgtcatccaggtcgtgataggggatgtcgttcaacagcccgacatccttgaattgcagctggagcacatcctgcttgtcagtccatatccgcattccagccagattgaacggatagcggcgaaaggcggtctcgtcgatttccaggtcaaggagcagccgggacagggaagccgaaccggtgtcctgacctatcgcttggaccactacatcaatatcaggaagtttcatgcggttgttcacccatacggtcagagtggagaaagcccgcttggctgctcagcgggacgaggcaatggcacataa

SEQ ID NO: 531271 - DNA, 1029 bp, Stenotrophomonas maltophilia
atgattcatccaacaagcatggtgcacatccaggcaatagcagcgctgtttggcagaagcgccaccgacccagccgtcacaacgatgctgcaatcgcttggcgccaggcgcaggccagagctggcccgtcctgcaaaaagtccttacgaggcgattctgcgcgtgagcgggcagggcatgctgttctccttcagcgagcgcaactactggaacgggcgctccgtggcttcgcacggcaggagcggtgagctgatcttcaccaacgttgcggtaactgcaggcattccagatgtcatgcgccggtacgaaggcgagctgccgttcggcctgcaatgggaggacgataggacgatggctcgcgaaaggctcgtgatggcgggcttcggggatagcttgcacgccggtaggcgtgacgcgtggtggttgcccgactaccgcatccgtctgacctatcaacctggatgtatcgagcgggcaggaggccccgggatctttgatatcagcctgggaattcccatgcgcccattggctcgcgcaccggcgacgcgcgagtacccctcagcggagcaggtagttgctgccctcggtagatcgaccgacgatgctgatttccaagccgtgttccgggaatttgggcttgcaagtctgattgcggaggcgagcagggagatcgttgatagagccgacgagcatggcttcatcctttactttgacagtaggcggcgcgtttccggtagccatccggtatacaccggtatcagtttcgtccgcgaacgactgggaaactcaagagcctgggctgggccgctcccattcggtcttcaattcgatgatccgccgtccatactcgaagagcgcatgggtcaacgagccagtcgttggcgtgatgaaggaacgtttggcagcgccagctggtcgctgcctggtcttcaaataaacgtgaattttgacagtctggataattgtcttgagtctgtccgtgtgcttgcagaaggtcgttacatgtccaactgccagccgtgcagctga

SEQ ID NO: 531272 - DNA, 327 bp, Stenotrophomonas maltophilia
gtgacctccgtgctgttcagcgtcgccacgttcagcaacagcgccttcaccacgggcagcccgttgcacggcatgcatgccatcggcatcttctcgaccctgaccccgctgctgttccaggtagcgctcggtgccgacgcgtccccgcgcatggcctgggtggcgccggcgacgtcgctgatggggatggcctacctgtggctgatgatgtccgagttcagtccgccgtcgtaccgcggtctgatccagcgcatcgcgctgctgccggcgttcggctggtacacctttgccgtactggagttgcgccggatgcgtgaacgccactga

SEQ ID NO: 531273 - DNA, 522 bp, Stenotrophomonas maltophilia
atgatcatccggccactggggcacgacgacgcggacacgctatgggcggcccgcctgcaggcactgcgtgaatcacccgctgcattcctgtccacgctcgccgaggccgccggtgataccgcacgggtgatgcaggcgcagctcgatgaccctcatacccgttacttcggtgcctttgaccaggcaacactggtgggcttcctgcgctatgtgcgtccggtgcggctggcacggcggcacacggcggagatccacagcgtccatgttggtgcaggccatcgtggtcacggcatcgcccgtcaactgttccttgcggcattcgcggcggcatgcacggatggcatcgagtcgctcacgcttgcggtgctggcagacaatgctgccgcgcgaggactgtacaagtccctgggattcaccgaatccggcgtcgagccgcgcgcggtgaagcgcgacggtcgctatgtggacatggtgtcgtactggattccagtgaccagccacccaccatcaccggcaccttga

SEQ ID NO: 531274 - DNA, 483 bp, Stenotrophomonas maltophilia
atgaagcaatcaatgcagttcatcccactcaatcgaagcaacgttgatgagttgtccgaacttgcggttcgagaatccgagcagcacttgatctgctcgaaccccgagtggcttgcgcaagcggccttcgttgcggaatccctgacgttcggcatcttcaaggaaggtcgacccgttggagttatctccttcatcgatcctcgcctggtggatgaggatgacgaggaccatgatcactatcaggagaattgcctgtacgtgtggagggtgatggtcgacaagagttcccggggcgccaacgttggcgttcaggcgatcgagttcgccttgggttacgccaggcttgtgggattgcagggtgtctccctgacaacgatggatcgagaagccggcaatgcgcttcccttctacgagcggctcgggttttcggctacgggccgtcgattggacgacgaggcggaacttgtcttccgattcggttga

SEQ ID NO: 531275 - DNA, 489 bp, Stenotrophomonas maltophilia
atgttccgctttgcttccactctcgcactgctcatcgtcgcgccgctggccgcagcagccagcgatccgcgtgacgtggtcacccgtctctacgacgcgctccaggcgccgacttcgaacgaagcggccattccgtcactgctgggcgatgccctgcgctcagccttggacgcgcagagcgcttacgagcggacctgtgccgcgttggccgcgcacgacgagaagccgcatatgctcgaccagagtccgtatctgctggcgccggatcgaccggaaacgatatccgtgggaatgcccggatcgagcggtgacgccacctggatccgcgtcgacatggcggtgggcgaccatcgttggaccgaccgggtcctgctgcagcggaaggacccggactggaagatcatggatatccgctgggggcagggcggcagcctgatcggacggctgcagcagttttcggccttccgctgcacgccttcgggcggctag

SEQ ID NO: 531276 - DNA, 234 bp, Stenotrophomonas maltophilia
atgaaccgcctttcgcgcctccggcgctggagcaaccgcgacgatggacgcctgatccacgtgggcaacggcccgctcggcatccttgaaatcctgggctgcatgagcctgctggtagcaatgctgctgcacctgctgcgggagacgatcggcctgtcgggcctatggacgacagcgagcgtgattctgggactggtactgctgggacggaacgcttggcgcgagcggcgatag

SEQ ID NO: 531277 - DNA, 1362 bp, Stenotrophomonas maltophilia
atgctgcgcgcccacggcctgtggtgcaagccacttgctgaatggccgaccacgcgccatgtcaggcccctgtcacacacgggcagtagaacgatcccaaatctccggcaatccttcccccacacggcgttgaacgcgcagccctcgctgcggcatctttatgccgccggccacttcgcccgcactctggcctggtcgttcgtggacctcgcgctgggcttctacctgcacgcccggctcggactgtcggctgcccacaccggccagctgctggcgatctccttggcctacagcagtgttctggacctgctgctggccgccatgttcacacgcctgcgcaaccagcatcgcctcgcattgcgcctgcagctgatcggcggccttggcaccgccgccagtgcctgcctgctgttcagcccaggtcctgcaaacgggtccgccttcctgccgttgctggccgcgtcgttgctgttccgcacctgttatgcggtctacgacgtggcccagaacgcgctgacgtcattgctgccccgcgacgaagacgaggccatgcgctatgtctccacccgcgctgtggtggtgccgatctccaagctatgcatcgccgcagcactgttcggggtggtcggcgcacctgcctccccaggcagcagtggcaacgagttgctgatcggcatgatcatcggcgtcctgattacctgcgccgcgcttcccctcgcctgcgtttccacgccctcacggctctccgcagccaggatgcccgttaccggcgccctgcccctgccggcactgctgccggttctgctggccgcagcggcagagacggcgctggttggcctggccgggcgtctgtttccctttgccgaccagggcgcgacgctgaccttcgccatggtggcaggcatggtggtcgcgccctggctctgccttcgcctgcattcttcgctacacagcgagacaggaatgatcgcgttgatgtcggtgctggccgtcgctgctgtcggcggataccaggccaagccctccctgcctgtagcaattgcatgtgcttccgcccatggagccgctgtggccagcgtcggcctggtgctgtggcggcggaccgcgctgatcgcccgtcgccatgccgcccgcagcggacgcgaggatgacctgagctgttttgccctgctcactggaaccatgaaactgtccatcgccgcctcctcattgctgctgggccaactgctgcccggcatacaggccggtgatccgggcacagccgccgcactgatcgcgctggtcgccgtcggcagcctgctggcgctggccgcattggcctggccaagcgcgctgccccgtagcgagggcctgcagccatga

SEQ ID NO: 531278 - DNA, 174 bp, Stenotrophomonas maltophilia
gtggtcctgctgggcttcatggcggtgttctgggtgggccgcgcacttgaacaattcgtcttcctgcgcatcaacgactggcgcgtacacctgctgacgggcctgttcgtgctgggtgcggcactgcatgccgtgccgatgtggctgggcttcatgcgcgccatcagccgctga

SEQ ID NO: 531279 - DNA, 621 bp, Stenotrophomonas maltophilia
atgccgcgcctgcatgcagggcaacagcgcctgggtcagccatcgcccggcggagaagttcagcgcgatcgcttcctcccggatactgtcagcgtcatcgaccgtggttggccgggagggcgcctgcggcgacgcccaggcacagcacccgcctctggcaccggcaggcacgctgcgtatcagtgcaccggtgatcttcggtacgcatgcgctggtaccggcactggccgagtacagggcgcgtcatccggatgtccgggtcgaagccacgctggcggatcgtgtgttcgaccttgccgaagagggcttcgaagcggcgctgtgcatcgacagcagcgtgctggtggcgcgtgcactacccgcctatcgcctgatgatgtgtgcctcgccggggtacctggcaaggcatggcacgccactcagcgtgcaggcacgtgccggccatcaatgccggtcgttcgaaccgagcgcacctgcaagtggcggcaggccgatgctggcaggctcgaccgtgtgcccgacgaccgttgccactccacccgcctgcgcagcttcctcgacgtcctggtggagcgcttcccgcccccggcgctggcattgcccgccgatacgcgggcataa

SEQ ID NO: 531280 - DNA, 867 bp, Stenotrophomonas maltophilia
atggcggcaccggcggatctggcgcagtccgcgatctaccagcatccgtccggcaccgtgctcggtcggatgctgccgcgcctgctgcacgctccgcgctggacccggttgcgccgcgggttgttgcggcgctggccgatgccggggctggtcagcgatgtggtggacgtggtctacgtgagctggtgggtcgacgtgcgccacgcgccgacgccaccaccgggccatcattacgtggtccatgccggacgcacgccttacaccatcctcagctaccagcacgggcacttcgggcccgcgctggcggggctgctgcgctccctgatgccgtctcccaggcagagcaactggcgctggtacctgcgtcgtgacgacgatccggacgggacgccggtggtgctgttcgatcgcaacgtgatggaccagctggccttcgtcgccggcgcgcgcgccttcagcgatgccatgcagccgcacctgtccgcgcacttcgagcacggggtgcgcgccgatggcgatgggtacaccctgatcgaaggcgggcagggcagtgcgccagcacttcacctgcagtggcaggctgctgcaggctgggacgcgggggcgtggacggcttccttcggcggccatcaaaccctgctgcgcttcctgacctgccaggacgaggccatcgcccgtacctgcgaccagcgctgggccagcacccgcatcgcgctgccggtggacatcgcgcagctgcaaccgctgcagctggaaggcgagctgcattgcccgcggttgcaggcgatgggcgtgaacctggccgatggactggcgttccgcctgccagcggttccgttccgggtcgtgtcagagcgcctgttgtga

SEQ ID NO: 531281 - DNA, 672 bp, Stenotrophomonas maltophilia
atgcttcccctctcggcgagatccctcaagtcgccgaggaatacgctcagcaccatgtctgaaaggcgatcgaagtctgaggccggaatcttgcgccttccaacggcgacgaacagatcggccagcatctttggtttgtgtagtgggtccgcacggttgagcttgtccagcagcaactcgcctagccgccctcgctttgcttgtgttccagcgagttcgtcgacaacacgagcgcgttcgctggccgataggctttcaacgccaatcaagaaccgggctacttttgcggcgtacaagcgatcacttatcgccgccgctccctcgcgtacggcaagcacagcagagactacgggcaccttacccagcacgttctcgtctagcgccgcctcccatactgccgaggccacatccgttgtaagtctggtggtggggccgatgagagcgcctatcaggtcggcagggattttcatacagtggtgcctgggagtgagttcggacaagttttaccacgccgtctcggtaagttatgcctctcaaatcgtactcgggccagttcgtgcccagaaaactatcgactatccaagacaggccttgcccaaagaagatcacccttatccaaagttcatccttccgctcaaggctaagggtggccctccgccacaccctcggtaa

SEQ ID NO: 531282 - DNA, 576 bp, Stenotrophomonas maltophilia
atgctgggtatccaccgctggctgcgcgccggcctgatcttcacgctggcgggcgcactcggcgcctgcaacagccgcataccggatgcgccggagccgctggatctggtcaagccgatcgatgtggccgaacccggccaggtggtgcggttcgagttcgagatgaatgcccgcaacttccagccgggtcgcacgtatgcgctggagctggagttgcagcgccaagcgacgccaaggccggacgagcctgacgtgggcacgatgagggtcccgttcgatgtgaccctgcagcaatggggcgctgatgcctggaaggatgtgcccacctacgacagctatcaagccggggtgctcaatgcaggtgagcagcttccggaatggcatgcctccagcgaatggcggtatacgtcgccgcacatgggcagtgacggccagtacacgctgagcctggttgctctgccactggaaattaactcccgctaccgcgtggacgtgcgtacggtgcaaaggaccgaggcactgcaggattactcggcccatttgcggatccatgtcgcccgtcccgccggaaagtaa

SEQ ID NO: 531283 - DNA, 372 bp, Stenotrophomonas maltophilia
atgccccggaaatcacccccgcagccattcaggcaaacgcttgtggtcgccaaccgcgttgccgctgccccccagaagccgggggccaagaaggccacgggcaactggcgccagattcagttcggctcggtgctcatcaatagtccagcgctggacgccaaggctggtcggcaaggccgcgtggaaagccagcgcgcgctacaggcacttggccaggcactaggccgccctggcgtcacactcaaggaaacgcggggcgttccttactacagtgcagacccacagcacccaggcgtgatcatccgccgcctcgatggaaagacagtccaaggacggtttgtcaatggcaagttcaaggaaatcgccgcctga

SEQ ID NO: 531284 - DNA, 246 bp, Stenotrophomonas maltophilia
atgaggacggggctgctggcggggctggccctgttggcgcctccggtgctggccgcacctccagcgccgccctcggtgtggctggagcgccatcagacggctgcggctgacgaggcgaacgctgcggcctcggtgcctaaagccaaggagcgctgcagggtggtgaaggaatggaaggtcggtgaggccgtggtgcagcatcgcatctgtgacgacccgccacgaaagccagcggggaaggtatag

SEQ ID NO: 531285 - DNA, 336 bp, Stenotrophomonas maltophilia
atggccctgcatcgaaccctcgcgctcgcgtccctgctgagcctggctggctgcagcacgacctcttcctgggagggtgcggatttctccgcatccgcgcagtgtcgcatgcagtgccaggccagccaccgcagttgcatggcgcagggtagtaccggcaacagcgccttcagttgcgagcagcaggtggtgccagcgccggacaagcgctgcaaggacgtcgccaaccctgagctgcgccgcgcctgcgaactcaaggcgcatgactgcacgctgcgcgcgccgatgatgtcctgtggcgaacgccgcgatacctgcatgagcagctgcggctga

SEQ ID NO: 531286 - DNA, 540 bp, Stenotrophomonas maltophilia
atgcgcaggatcctgttgctgatcgcaccactggtgctgctgggttgttcacgcccggcagcacagacgaatgttgaaaccgcgccagcgcccgttgccgctgccgccaccgcagcagcggacatccataccggccccgatcccgcagcgctgcaggcgagcgatgtgccgctgctgtccgccgtcgccgacagtgccgagccaccctcgacgatgctcaaccgctacgtggcggcgctgctcaaccgcgaccgcgcctccagcaatgccgcctggacgatcccgcccagtgatccgcggcatgcggacgacgccgcgctgcgacagctgcgggacctgcgcaccctgcgcctgcacagcgataccccgatcgcccgcgacgaccggcaaccgccacagctgcttgaagtgccggtgcagatccgcgcggtcaccgccaacggcacgttccgcttcggtggctggtaccgcgtgcaacccagcagcgacggcagcgcctggcagatccagtcggcgcagctgcgtccaatgctggactga

SEQ ID NO: 531287 - DNA, 405 bp, Stenotrophomonas maltophilia
atggcttcgcccgcgcccaccgccacgttgtgccagctcgcccgccaggggtggccgctgctcgtggccgcgctgctgacgctgctgctgggctggtcggccttgcatgaaggacgtggcagcggtaccgccacgcacggctggcaggcgcacacggatgatcttcaccaggccatgccgttgccgcccacgccagtggacgaatgcccgcagcatgccgcacccgcaccggaaccgccgctggatggcgagggcacgccgccctgcgctggcatggcaggtccccgcgccgccctggtcgcacgtatcccgctgtggcgctccgacgccctgcgctggcagctgcgcgaccccgcactgcgcctgaaccccggccacgctccgcccgcaccgcacgccagctga

SEQ ID NO: 531288 - DNA, 396 bp, Stenotrophomonas maltophilia
atgctgtcgattgcgcactacgtggtcggtggcctgatcgcgctgttctcgatgatcttcatcgtccacatcgtgctgggcatcaccgccctcaacggcaatctgccgatgaattccggcggccaaccctcgtcgccggccgaacagcgcctgttcggctggatgttcaccctcatcggctgcgtcatcgtgttcggtggcgtgaccctgggcgcgttcgtcgcctatgccggccgctgcctggcgcgccgccgccgctacctgctgtgcctgatcatggctggcctggcctgcctgttcacgccgatcggtaccgtgctgggggtgttcagcctgatcacgctgctgcgcccgcaggtcaaggccgcgttcgacaccgccggtaccgcggcatga

SEQ ID NO: 531289 - DNA, 441 bp, Stenotrophomonas maltophilia
atgaccgctattgccacccgtttcccgtccgccacccgcctcgatgctggcgacctggcccaagccctgctgggccgtctgcgtaagaacgcgaccattgccgctccccgccgagccgcgtcccagcgccaagcagcccccgatcaggcccgcatgcgctccgaacaggtgcgctggattgccctcagcggcctgttggcagcggccccactgggcgcgtccgaggccatcctgcttgatctggcccgctgcatctttgccgacctgcccatgatcgagctgcgccgtgagttggctcatttggagcgacgcggcctcgccgtggtccgtgaacgtggggctggccgctggacggccaaggccacagccgagggattggcggtggccgactacagcgccccctgcccgatgggcatcgggcgaccgcttcggcccttctaa

SEQ ID NO: 531290 - DNA, 1038 bp, Stenotrophomonas maltophilia
atggccgccaaccaaggcattggtttcctgaaccatcagcccgtactcgccggggaaggcgctggcgtcgatgcggtagctcagttcgccaccgtcgtggcggcgcgccatttcgcgctggccggtgatgaccgcatgcagctgctgctgcatgccggccatggcctccagcaggcggccggtttcgtcgtgcggctgcgggccgatgtggctgtccagcttgccgctggcgatgccttcggccacggcggtggcctgcttcagcggtacagcaatacggttgccgatgacccagctcagggccagcacgatcagcaccagcacgccaccggagaccgccatgatggcggtgaacaccagcgcctgcttctgcacgtcgtccatgtagacgccgctgctgaccacccagttccagggcgcgaacaggccggcgtaggcgaccttctcgaccacgccctcgctgcccggcttggcccagcggtagttgacgaagccaccaccggccttggcagcttcaacctggtcgtagtagatgcgcacgccgtcgtcggtgcggaagtccttcatgtccttgccgaccagatccttgcggaacgggtgcatcagcaggcggtagccggtgtcgtagatgttgaagtaatacgcatcgttatcggcgcgcatcacttccagcgcctgcagggcggcggccttggcagcgtcctcgctgagctcgccggtaccggccaggcgatggtagtgctgcaggatgccgtagctcagttcgacctgggtcttcagtgcggtcttgcgggtttcggtgaggtccaggtactgcatgcgggcggcgatcaccgacagcgcgatcacgccgagcgcgatgagcagcgtcagcaggttgagcttgcgccggacggaaagattgcggaagtagtgttgccagcgatgcaggagattcatcgagcaggaccaggtcgaagcgggcgggcggcgccgagccggtcagcggcgggatacgccgtgacaaccccgttatcggccgcgcgggcgggggattga

SEQ ID NO: 531291 - DNA, 336 bp, Stenotrophomonas maltophilia
atgcgcctgatcagccgactgctgcactggaccaccctgcccgccgggcgccgcctgatggccttactgggtgctgtcctggtgatcgtgctggtctgcaatccggcgctgtcgccgttgctgccggtggtggatgcgcttgggctggacgtgctgatgctgttgctgggtgtgcaggtggtggcggcactgccaagggtgcgtgagcgggccgcgcgcgggaccagggcgcttgcacgcctgctgatcggcgcattggcgggagctgcaggtggctatctccggcagctcgggtggtggctggcatgggatgcggggatcgcgaggcaccgatag

SEQ ID NO: 531292 - DNA, 363 bp, Stenotrophomonas maltophilia
atgaaagaggaagatgcgttcgtcgagataacgaggcttgtggggagtttcgcgatcggtgctgtctctccccaggatttcatcagtcgctattcggatttctattactatgaagcattggatggacacgaagcttcgagtgcgctgcagccagagcatctgcaaaggcttgggcccgcgatcaagttgcaccgccgcatccaggaagaggtggtgaacaggattttgcttgatgctgagtattcaactgaagaactgaagacggcaggacgaattggtccgtctgaggcccaggagctcgccctgaggatatgtgcggaagctgggattgaagccatcgtgtcggcgatcagcgcagcatga

SEQ ID NO: 531293 - DNA, 1419 bp, Stenotrophomonas maltophilia
atgctcatgttcgacaagatcatcaatgaagtaatggacgggaagttccagctgatcgcgaagggaactctgacgcaacgagcggtgtcggaccccatcgtgttcactggcaacgccgtcatcagccaaggccatgacggcaatctccgactgcagttcatctgtgaagggttcaccggcccgttcgatcccaaagccgggctgcccgagccggagcaagggaagacgattgaagaaagcttccacttcgacttgtcggctaccgacaaggaagaggacgagtggactgctcagcacctacggcttgatctggatcgtccgtgcgcactgcctggtctatcagcggtgccgccggggtttgacatactcaccgggtatgtccaggaactctcgctccgagtgccaaaagagaactcgaagcctgagcgtcatcacattgaatgggttgttcccggaacatttcagttcccgttgcgaggctttccgaagccttggaagcacgagacctcagcgtttgcgtggtctgtagagggaaacgaccctcgcttcacgcgaatccagtttcatggtgcagccacggacttccgtaagcaaagccgcgacttccttcgcggcttgtctatgctgtgctctcagcaccttacacctaagtgcgttgctgacatcgatgagagcgcttggacgctaaaaatccgaagcatgaagcgcccgttcgagaccgatcccctgatgtggattcatccgaactacaaatcaggctgggagtcgttcttggagaaatggctcctggccgagaggagcgtcaatgccagccgccatgagaaggaacaccgcccagtccaggacgtgatctatcaatactggtatcgagttcatcgcgggcacaccgtggatttcgagaacggcgcacacgttctttcaagcaccattgaaggaatggtcaagaagtactttgagggtgcagagccggacatcgagtccgacaaagcaaagagcttgcgagcaaccatcgagcacctggaagctcaggacaagaaattgcacggagttgccttgtcttttttgaccagaaaactcgacatgacccgccgcaaggatgagagctttgaaggaaagttcgacgctctcattgtccggggcattgcgactgacgagatgaaagcggcgtgggatgcggttcgaaatgacgcggctcatggtgaccacctcatcaaaagcgccgacgacatcgatggcttggtcacccacttctacccaagctttgaactgtttaagcgtttggttatggtgaccatcggctgccatggcccggcgaccgacctatctgcgccgggatggcctacgttgcgcgttcccggtgggaaggaagaagagcatcctgtatcagcgaaagctgcaagcgagatttcggagaattag

SEQ ID NO: 531294 - DNA, 381 bp, Stenotrophomonas maltophilia
atggaagcgacgatgaagaaaaagcgccttgggatgtggaatcgattggcgattgttggggcgtttatcgctatttttgtgtggccggtctatctcagctttaagcacgagtcggagctgagcggctatcgcttctccgagctgcaagcttgcagaagccagggtccaggatgggacgataacgagcacactaaggcgtgtttgcagaagcagcgtattagagcagacgaagatgcgtcctacattttcagcaaatggctgccggagttgatgctcatctatgccatcgcatacggcgtcctctacctactgatctttgctgtgatcaaggtattcaaatgggtcctcgccggacgtgataagaacgagtcggaagcatag

SEQ ID NO: 531295 - DNA, 834 bp, Stenotrophomonas maltophilia
atgttgagggagtttcctaggccgctcgccgtgactattggtgatgttgtggggtcctactattacagccatcgacggttgaatgagatgctgtatgacgctggtgcatccggcgaggtgccggatggaaactgctccgataaggtgaccaactggttgatcagggagggcaaggaagacgttgccagatcctttgcgatcttaggcaatctcattgaggacatcatggatggagaagtccccgattgggagccggagaaaaagcctgccgctcgaaagcgcatcaacgaagcactagcacgctatcaattgtcctatgacttcggggggcgcattcttggcgctcactctgtcaccgctccaagtaaggcgttagctgatgtgctcagagagttctctgttgcggaagtcgaagaggagttcgagagggcacttcgatcagtagagagcgatccggccgctgctgtgacagctggctgcgccatcgtcgaagcactgtgcaagcactacatcgccaccgaggggctagaacttccgacaagccagacggtcaagccgctttgggtggtggtcgctaaacacttgaagctgtctcctgagcaacttgaagacgacgacttaaagcgtgttctggcgggattgagttccatcatcgacggggttggtgcgtttcgaactcacgctggcagtgctcatggtcaacacaagcggacctacaaggtcgctcccaggcatgcacgtctcgttgttcactcggcacactcgctttgtttgttcgtggtggagacatggaaagagcgtaaaaagagcagcgctgaaaagtgcaaaggctga

SEQ ID NO: 531296 - DNA, 306 bp, Stenotrophomonas maltophilia
atgccgcagaagaagatgagaaggcgcacccgtttcatgtacggcttagctctcctgttcgtggggccaattgcctcttggctggcgtttgggttgcttgtagcgtttcaggactcgcctcattcgctgcgtgcgctatcgatgacgtgggcctactacttagggttgacggcaatccccatgatcttaggattgatcctcatcgcattcgttcgtccggtgtatggatggttgatctatgtcttgggcagtgcattcatgttgtatggacaggctgcgctggtcgctatgccgtcctcttactga

SEQ ID NO: 531297 - DNA, 378 bp, Stenotrophomonas maltophilia
gtgaatttgtcaaaagatgttgagcggctgatcgataacatcatctgggaaacggcagagggaaaagtcgattggtcgtttgctgagccgccaaagtatttgaatgaggggacggagttccagatccattcttaccttgtgtgcaactacaagaacaagcagaaaattggagtttacgagcgccgctataagcaatacacggatttcgatgagttcttttggaacagcatgagcgtctttctgatgctcgatgatttcggaagggtgatttttgagtcagaagaggcggatagcaaaatcaatagcctattcaatgtggctagggacaacgcctccaaggtgaatgacatcatcaagggacttcttgaagaagattga

SEQ ID NO: 531298 - DNA, 159 bp, Stenotrophomonas maltophilia
atgagcgtggactatgtgaagaccgcctttaagaattttaggcgttggattgaaaggacgctgagttggaatcaacgtgcgaggattcgtaacggagttgagggggatcgggaggataataagcgtccgccaccccttgacaggcctaggaagatgtaa

SEQ ID NO: 531299 - DNA, 129 bp, Stenotrophomonas maltophilia
atgaacattgtcgaaaaagtcatcatcaagggattctgggagtcgagagatattgcaatcgatttccacaaagacattaatttcttcattgggccaaacgggctgaccgccggggcgcccagcccgtaa

SEQ ID NO: 531300 - DNA, 867 bp, Stenotrophomonas maltophilia
atgaacacgcctgcccgcagaactgccaccctcgccctgctgctgttcgctgccctgcccgtcctggcacgcgaagccgtcagcccgcaccagcccatcgccgtgcagatgtactcactacgcaacgccggcccgctcgaccagcagttgaagatcgtccacgacgctggcgtggatgcggtggaaacggtgggcacgcagggcgtcagcgccagcgaactcaagcagttgctggaccgctattcgatcagggcgatttcctcccacgtgcagctggccgagctgcgcaaggacctggacggcgtggtggccttcaaccggtcgatcggcaacaccaccctggtggtgccttacctggacgcgaaggagcggccgaccgatgccgcaggctggaccgcgctcggcaaggaactgggcgtgatcgccaggcaggtacgggccaagggcatgcacctggcctaccacaaccatgacttcgaactggtcgacttcaatgggcggaccggcctggaactgctgttcgcagcggccgggccggacctgcaggccgagctggacctggcctgggtcgcgcgtgcaggcctggacccggcggtgatgctcggcaagttccgcggccgcctgttcgcggtacacgccaaggacaatgcagccaagggccaggccgaagacgagggcggcttcgccgccgtcggccagggcgtgctggactggcgcgcgatcctgccagccgccgcagctgctggcgtgcactggtacatcctcgagcacgaccagccacgcgatccggccaaggtcatccagaccggcgcggactacctgcgtgaacacctgtccccccgcctgccagccagcgcgcagcgctag

SEQ ID NO: 531301 - DNA, 297 bp, Stenotrophomonas maltophilia
ttgaaaacgatgctgaaagtggctgtgattctctgtggggcgatgctggcaaccacggcatggtccaaggacgaccctgcagccggcgcaaaactctacacggcgaactgcatggcctgccatggtgccgatcgcgccggcatgccgggcgcgttccccgcgctcaccgacatcggcaagcgcctggatgccgcgcagatcaaggaaaagatcaggaagggcggcggactgatgccgccgttctcccagctgtcgcagcaggagatcgacgacatcaccagctatctggcgaaatag

SEQ ID NO: 531302 - DNA, 297 bp, Stenotrophomonas maltophilia
atgaaaccgctgctcgttctcgcccttctggccggcatcggcatcctacccaccacggacgcaagcgcccagacgaccccgctggtgtgccaggagaacttcgcgcggtccgaggcctacctcacctgcagggtgaatagtgtggaagtggttgccggccgatgccagatgcagattccttgccagcgcaacaacggggcgacttatctcaaccatggttcatacgacgtcgcacggctacagaacctgtgcaaccgcgacggtatgctggtttacggctgcccgccgcgcccctga

SEQ ID NO: 531303 - DNA, 5835 bp, Stenotrophomonas maltophilia
atgaaccgtatctacagacgtgtgtggaatcgaacccgccaatgctgggttgttgccagcgaactggcgtcgaccgcaggtaagccgcggtcaacggctgcgggcgcagtgttgcttgggcttgttcttgcggttccctcagcagaagcgggcgacatcattgcggctgatgagtgcgatgaatccatctggcaggcgctgtgcctgaacgcggaggtgcgcgcaggatcttcctccgcatactcgctgttcgcagctgcgccacgtgcaggcatcaatgcgctggaacttggctatcaagcgaaagccaatggctatggcagttcggccgtgggtccggaagcgaggtccgaaaacttctactccgccgcgttcggttggagggcgcttgccggtgcatcctacagtgttgccgcgggtgccaacgcccaggcaaccgagtccttcgccatagcgatgggcagggattcaaaggcatccgccatgagtgcagttgctattggtggtcaggccgccgccagtggacggtcatcggtcgcacttggaagttctgctgttgcctcagccgagaccgcacacgcgcttggctacctcagccaagcaacctcacagtacgcgaccgcggtgggggccgtctccaaggcattcggtgcatactcaatcgcggtgggcaaccacgcgacggccattggcgacgacgccatcgcaattggacgaagcgcaaggaccgtggacggttccgctggcgtgtctcgtatcgccatcggcggaggctcgtttgcaggctcggatggatggacgggagcaatcgcactgggtggtctgtccagggccgagaacgatgctattgccttgggctatgaagcgcgggccttgggcgagggggcgctgagcatggggcgcggggctcaggcatcagggaagggggcgactgccttcgggaaatctgccttggccaaaaatgagtatggtattgcggttggctacgaagcgctgacgggtagcagtcacgcaaccgcagtcggtactcgttcgagtgcaactggaattggcgctacagcttatggaaattcagcctatgtgaatgggcgtaatggtctggcagtaggtagtggctctcgtgtcgacaacggcagttcagagggcgcgatagcgatcggcgccgattcgcgcgcgggcgcggatggatacaatggcgccattgccctcggcggcaaaagcgctgccagccacgatagcgtggccattggctacggcgcatccacgagtgctgccggcgccattgcgctgggtcgaggttctgttgcgactgaagcaaatacggtttcggtaggtagcggaaccaccaagcgccggatcgtcaatctggccgatgcgaggctgtccagtaccagcaccgacgcggtaaccggcaagcagctcaatgccaccaacggtaatgtcgccagtgctcaggccgcagccgacgctgcaaagacgacggccaccgcagcacagtccacggccaatacggctaatacaaatgccaacacggcgttggccaaggccaatgcagtcagtggcctggtcagccaagtctcggccagtggcaacgtgcgccttggcggcgagaacactggcaccgtgctggatgtccgcaacaagtccaatgctgttcgcagcatcaccggtctgaaggatggggcgctttctacatcaagcactgaagctgtgacgggcaagcagctcaatgcaaccaacaccaacgtgacggctgctcagacggcggccgacgcggcgaagaccacggccacagcagcgcagaccaccgccactacagccaacaccaacgccaatacagcgctggccaaggccaatacggtcagtggcctggtcagccaggtatcggccagtggcaacgtacgcttgggcggcgaaaacaccggcacggtgctggatgcccgcaacaagtccaatgcagtgcgcagcatcaccggcctgaaggatggagcgctgagcacgaccagcaccgaggcggtgacaggtaagcagctcaacgccactaatgcgaatgtcagcaaggcgcaggcagcagccgacgcaacggctgcgcggctgaatgccagtgccgtggcgctgggtgcgggggctatcgccgagcaggccagctacggtatcagtactgcgctcggcaacaacgcaaaggcctacaacggcaagagcgtcgccatgggcgcagacgcacgtgcaactgtggatgacgcgggtaacaagatcagtggcaacgcgggtgtgtccatcggtgctggaacccgcagtggcaacggtgcggtggcacttggactggacgctgtggcaacgggtgatcgtggtattgccgtcggccatgaggcatccggcaaaggtacgcacgcaacggcactaggcttccagagcaacgcgtcggccaaccaggccacggccgttgggcgcggcgcagttgccagcagcctgtatgcctcggcggtgggcaatcaggcgagcgccacggcgcagagcgcgttggccctcggtgatcgcgccagtgcgacacatgcgggcgcggttgcgctcggcaatggctcagccacgaccgccaccaatcaggtgtcggtgggcaatggctcgttgaagcgcaaagtggtcaacgtggcggatgccgccttgagtacgtccagcagtgaagcggtgaccggcaggcagctgcatgccaccaacaccagcgtggctgctgtgaaggcgaccgcggacggtgcgcaggcgcgcgtggcggtgttggatggcctggtggggcaggtatcggcaggcggcaacgtgcgcctgggtgcagacaacaccggcaccgtcgtcgacgtggccaacaagaccggcgccaaacgcaagctgcagaatctggccaatggcgtgctcagtacgtccagcacggatgcagtgaccgggcagcagctcaatgccaccaatagcgaagtgaccagcgtgcgcacggcggcaaccgcggcgaagacggcggccgatgccgcccgtggtgtagccgatggcgctgtgcagaaggctgatgtcttgggcggactggtgggccaggtgtctgccagcggcaatgttcgcctgggtgcagagaacactgggaccatcgtggatgtcgcaaacaagaccggagccaagcgacgcatctacaacatcgccaacggcacgctgagtgcgggcagcacggatgcggtgaccgggcagcagctgtttgcgaccaatgccacggtggaggcacagcgacaggctttggctgggcatgcgcagcagctgacggatcaggacgggcgtatcgccgacaaccgggtcgagctggatgcgctgcgtacggatttcgacaacttcgatccggatctggatggcgtggtcaagttcagtgctgatcgtcgcttggtggatatggagggcgcccgcgtatcgggtgtggcagcgggggatatcagttctgcgaccagcacggatgcggtgaatggcgggcagctgtttgcgactaacgatcgggtagagaagatcgaaaaatcaaatggctacctgagagttggagtggatgatgagagcaattacgcgcaggcgggattgatgggtgtggcgattggagattcggcagaggcagccattcactctgatggggctaccgcagttggttcattcgcgcgcgctcgtgggcagggctccgtggctcttggcaggggggcgcttgtcgacgccgcagcaaagagtggatttgcacttgggacgggttctaatgtctacgcatcgggaggggcagcactgggttccttcagtcagattgaatcaggagcggaaaactcagttgcgctaggcaccggttccgtagccgaggacgcaaacgttgtgtccgttgggaactctcggcttatgcggcggatcgtcaatgtggggcgaggggtgaactccagtgatgcaactactgttgggcaactgagcgaagccttggctgctcttggcgggggcgcaggtctggatcgaaatggcgatgtcgtttctccgacctacaacctccaggggggaacacagaagaacgttgaagacgccttagttgcgctggatggtgcggtggtaagggctgacagtcgcgtagatggcctcgaaggccagctgcgtgcgacattccaacaatcaccatcgacccgggcggatggagttggtcagctgaacttggcaggtgcgcagggcatggttctgtcgaatctggccgatggacgcattgcggcaggcagccgtgatgcggtgactggcaatcagctgcatgctgcggagcagaagatcgagcacaacagacgcgacattgatgcaatgcggcgcgattggcgtttggatcagaagaatctgctgactgagattagcgatggagctctcatcgatttcggcggcgcacgcctgaccggtgtcgccgatgcgcgtctctccgcggatagttcggatgtggtgcgtgggagccagctattcgagactaatcagcgactgaatgacatggagggcaaggataggtttgtatctatcggaagcggtggagaacagagtgcagcatctgctggggcgttctccgtcgcagttggcgattcggcgatggccgcaaagggaaacgaggggggcgttgctatcggcgcgtacgcttacgcagggggaatgaactcgattgctctcggtcgcgcagcttctattcgagacggagttaacgacgggtttgcagtcggcacgcgatcattggtggaagctgatgccagtatggctattggtgccgaaagccgagtttctgcaggtgctaagtatagcgttgcactaggcagtctctcggtggctgacgagtttggtactgtgtcagttggtcacgcgacattccagcgtcgcctcgtcaacgtagccaacggccgcaacaccaacgacgcagccaccgtcggccagctccgcggcgccctgtccacccttggcggcaacatcgacgccaacggcaacgtcaccacccccggcttcaccgtccagggccagcaccagagcaccatcaacgacgcacttaccacgctggactccgccgtagtcaccaccggctcccgcatggaccgcgtcgaaacccagctccgttcggtcttccaggaaacgccctccacccgcagcgacggcaccgcccagctcaccctggcgggcgcaaacggcatggtcatttccaacgtggccaacggcctgatcgcggccggcagccgcgaggcggtcaacggtggccagctacacgccgtgcagcagcagctcaatggccgcatggacgggctggagcagcgcgtggatggccagccgcagtcgcgtgcgttggctgcggcttcggccgtgccgaccgaacaggtcacgccaacgccggaagccagcgattcgccgcaggtggcctcggcaggcgagggcacgtcgcccacgccgcagccaaagtcgaagaaggacgacacgccgtcgcccacgccgcaggtcgataccgctgaactggagaagatgctggcccgcgccaacgaatacaccgatggcgcgatcagcaacttcgagcgtcgcctggacaagatggacaagcgcttcaaccgcatggccgcgatgagcagtgcgcagacggccatggccatgaacaccgctggcttggccacctacaaccgcctcggcgcgggcgtgggctatgccgaaggcgaatcggccatggcggtgggctaccagcgcgtgctcaacgaaaagggctcagccaccttcagcctcaatggtgcgttcaccaacagtggtgaacgcagcatgggcgtgggtgtgggcatcggctggtaa

SEQ ID NO: 531304 - DNA, 984 bp, Stenotrophomonas maltophilia
atgcccgcgcagattgcagtggtgattccgtcttacaaagtcacaaaccacattcttggagtgatcgcaggcatcggtcctgaagtgggacgcatctatgtagtggacgatcgctgtccggtggggagcggagacttcgttgaggcgaactgcactgatccccgcgtcgttgttcttcgccatgacgaaaatcaaggtgtgggcggtgcagtgatgaccggataccgggccgcgatcgcggaaggagtggagatcatcgtcaaggtggatggcgatggtcagatggatcctgcgctgattcctcgcttcgttgcgccgatccttgcgggagaggcggactacaccaagggaaatcgcttcttcgatctggagcgtatttctcagatgccacggcttcgcctgtttggtaacgcaggtctgtcgctgctgacgaaagtgtcatccggttactggaatctcttcgatcccaccaatggctacaccgcggtccacaccgacgtggcgcgtcacctgccgcttgggaagatcagcaagcgctacttctttgaaaccgacatgctgttccggctgggaacgctgcgggcggctgtcgtggacgttcccatgcatgcacgttatgccgacgaagtcagcaatcttcgcatcggccaggtgatcggcgagttcttcgtcaagaacatgcgcaatgcaatgaaacggatcttctacaactactatttgcgagatatgtcgctggcctctttcgagctgcctgtcggcgttctcctgctgctgttcggcgtcctgttcggcgccagtagctggatccacgccagtgccaccggaacgaccgcgtcgagcggcacggtgatgctggcagccatgccggtactggtgggcgtgcagctcattctggcgttcatcggtcacgatgtacgtgccacgccagaaaaggcgatccatatgagggggcgcgtggcacctgaactggacgtggcaccatga

SEQ ID NO: 531305 - DNA, 1821 bp, Stenotrophomonas maltophilia
atgagccgcgttggagccagtgttgtaagcgggccggaagttcgatcaatcgccggctatggtggagtggcctgtctcctgctattggtgtttggcgtcatctggcaggcgttgacaccgtcgttccaggcgccagacgaatttgatcatgtcaagcgtgcctacatgctcagccaggggcagatcctgcttgatacgtccaatgggcagccatcaggtggtgacgtcgatgttggtctagcaaggtacatggatcacttcacccctcttgccggcaatcacaaggtcaaactgaccggggaaattctcgtgtcagcgcgcgctgaacgctgggcaggacagtccgagcgtgccacccagccgggtaccgcttattacctgcctgttctctatgtaccgcaggctcttggactgtggattggaaagacgatcgacttgagtgttgatcagtcttatcgcctgtccagactgctcactctgctggcttgcgtcggcttgttgtactgggcattccggcttttcccgccgccgccgctggtactggcattgctgttgctgccgatgtcgagtttcctgatgggctttgctgtgctcgatggcatgtccatgagcatggcagtgctggcgttctctgctttctggcggatcgtggccctccaggatgacagaggctcgaccgcgatcatcatgatggtcgcgctgggattgtttgccgcatgccgtgccaatacgttgccgttcctgctgttgccctttgttgcagcttggtaccggcgtgacagtcgcttggctgtcggcgccgccgtgctcacggtgctggttctggcctggaccgtggtaacgatcaagacaacggtctatccgcccggagcccgcaacattgatcacctggcgcggctgaccagctatctgttcgatcccctgaggttcggcagcatgttgcacaagacactcaccagccctggcgttgcggagtattactacaattcgttccttggagtgctcggctggctggacacaccactgggcccgcgccactacactgtgtttgccctgctcctggtggcctgcggtgccacttcgattgcctggacccagttccgcggaactgggctggcacgctggtcgatggtgctcgcgctcagcgttgcgatcctgcttacctatctggcgatgctggtgcagtggaccattgacgatgccgggatcattcagggtgtgcagggccgctatttccagatcccggccatcgcgctggcgtttgccctgggagccaattcacgtccgctcgccgttccaatggaatggatcagtcgcatactggtgctgtgtattgcgctcgctacagcgtcctcggtatctacggttctcggattgcgctacatgatggtggacggtcagcgcattggagacgggttgacgctcacaccaagcaacgtgctgagtaccgaacgaactgttgcccttggtttcccacaggagcagttgcagaatccgcagccacttgccgagctgaagcttctgctggggacttatgcccgccgtaatgttggaaaagcggagctgcgcctgtggagcaaacagggcgacaccttcagaagtacattcgacctggagagtctggtcgacaatggttatctgtccgttgatctggacggcaagccgtacgtcggaggagagttgcgggcgctggagggtgaaggtgtcagcgtatgggaagtgcgtcaggttgacggcgatcttcaggggacgtgcgtcgtactggtccccatccaaggatcagcggcgcgccccagcgaggcctgcccgctgccgcagtag

SEQ ID NO: 531306 - DNA, 1188 bp, Stenotrophomonas maltophilia
ttgtcagccctggatgggctgcgcggcgtcgctgcgttcgcggtacttctctcgcactgcgccttcgcatttctcccataccttcacacgggtaacccagcccagctccgctacgcatgggaagagtctgtattcaacagtccgttctacctgttctactctggcggattcgcggtcagtctgttcttcgtgctgagcggattcgtcctggcgcgcaagttcctcctacgtggaaacatcgatgacctgcgtgcctccgcacagaagcggtatgcacgactgggcattcctgttcttggctccgtcctgctgggatacctgctgatgagcctgcaggccattccgcaggcccccacggaagtaccatccggattcgtctgggacagctaccggaccgccccggatccctgggaagcattgaaacagggagcattcggtgcactgctttttggcgacaccaagtacaactatgttctgtggacgatccagcttgagatgatcggaagcatgcttgtattcggcttcctcgccctgttcggaaaatcgagatggagtggcgtagccgctttcgtattggtcaccgccatgtgcctgcgctggcacaaccccggcacatacttggccatgttcatcgttggcgcctacctaaaccggattccgcaacggcttctgactcctgggctgggccttcccatgctagcgatcggtatctacctggccagctacaaatcgaatgctgccatctacgcccccgtatcctggagcgcgaacagcattcaggaggcaaccggcatccatttattctggccggtattcatcgaactgctggctgcttcggcgctgatcctggcggtgctttcgctcggtccacttcagtggctgctcaatctcaaagccttcgattggctgggcaagtggtcgttctctctctatctgacccacacgttcgtgctcagcacgatcgctccgagcgtattcaagtccaccgttaccagccatggctacggtcaagcaacagcacttgccatcttctgcacgatcgcggtctcgctgttgattgccgagccattccgaagggcgttcgacctgccctccatccgcgtggccaatcgcatcggccagagcaccgctccacgggcggaagcggacgcatccgcagagtcgaacgctgcccaggccagctcatga

SEQ ID NO: 531307 - DNA, 3282 bp, Stenotrophomonas maltophilia
atggaccaggcactgaacatcttctcatccactcccgcagagacgggtaccgaggcggtgtacctcaaggatatcaacgacgacgcaatgcagtcgctgcgcgtccagttggcatccacgcatgcgtttaccttgggtgagaccgaaggcgatgcacacctcgcccccttggccggccgaagcaacagcgcactggtactgggaattggtggtggcttgcatacaaccgtgcaacacgtgctggaccacctgtccaaccatccggacactcgacgcctgctgctggtgacggacggcgagactgccgacggcatgttgggcgccttggcgttctggcaggaggttcttccctcgcgcacgctgcctggcaatgccgcgatcgaactccttgtcgacctggcctattgcagcgaactggcgcgaaacacgagcatcaacgttccatcggagcttgtgcccctgttcgatgccgcgacttcggcaaccacggacggtagcggcctgatccatgcactctggaatgaattactgctgtccagaattcatgcggcgaacgcatcccatgaacgccggcaactactgcttcggcaagagatactgacgcgctccctcaaccgcacaagcctgtcagcacaggcctctgttggcgccatcagccaggcacatgcgcgcatcaccgaactgctgcattcacgctcctggcgggtgaccgcgcccattcgggccgccagcacgctcgctcgtcgtgcacgcaacatgtactaccggctgcgcgggcacgctggcactgctcttcgcctgcgctccgagcgtggcacgaagggtgtattgagggaattcatcagaatcgcctcccatccgcgctcggcgatgaagtaccttcgccacaaggacgccgccgcgaaccgggagcagccgatatacgcgttgccgccggccagccccgctctgaccgaactgagcctgcgcgtgctcatcgtcgcggacatgaatctggcccagtgcaccaagtatcgcgtgctacagaagcagcagatgatccacgatctggggctggattgcagcattgtgcgctgggaagaccttgacaatgcacgcggccttctcagcacccacacagtggccatcttctatcgagtcccaggcttcgagcagcagcttgaatcgatcacacgcgccaaggcacttggaatgcgcacgatatgggaagtggacgatcttatttttgacgaatcgctctatcagaccaacagcaatctagcagacctggaccagcgaacacgccagtcattgctcaacggtgttccgctctaccgcgccgcgatgctggcctgcgaccgctgcatcgcctctaccgttgcgctggccgaagccatgcgtggcgtgggggcagccagagttgacgtggtcaacaacgccctcgacgaccagaccctgctgattgcggaagaaattaacgccaagccgcggcggaaggatggcctggtccgagtggtgtacggctcaggctcagcgtcgcatgactccgacttccgccaatgtgctgacgcaatgctggcgattctccgtgagcattaccatgtccggctgaccattgtcgggacgctcaatctgccgcctgcgttcaaagaggtcgagagccagatcgaacggctcccccccgtcgactatgcatccttcctggaacggatctcccgctgcgatatcaacatcgcaccgttggaaccgagcgtgttcaatgacgccaaatccaacatcaagtacctggaagcagcaatcctgaagctgccctccatctgctcgccttcgcaggagtatcgcaacacagtcgcacatggcgagaccggcatgctcgccgcctcttcctcggaatggaaagcatgcctggatcaattgatcgccgacactgcacttcgtcggcgcattggcgaacgggcctaccgacacgtgatgcagcactacacgcctcaggttgtagcccgggaacaggtgcttcccttgttcaaggatttggatcagttcgaacctaaacgtccccggatcctgggtgtgaacatcttcttcgagccacgcagctttggcggtgctacgatcgtggccgaggaagtcgcacgctgcatcaacgcaagtgggaaggctgagtacgccatggtcacctccctgccctgcagcgatgctccaccctacaatctggtgcgctaccgctcatcggctgctgaagtgttcgcaatgggccttccgttcgaggccgatcccgcgttcgatttcgacaatccttttactcccggagcgttccgtcaggtcctccgcgcttggcggcccgacgtcgtgcacctgcactccatccagggttttggggtgcagatcgccgaggcgtgccaggaggccggtattccctacgtcgtcaccatgcatgacgcatggtggatctgtgcgcgtcaattcatgatcaccggcgagggcaagtactgccatcagagcaaggtggatctcaatgtctgcgccaagtgcgtggctaatcccgtgctgaacccctaccgccagcaccgcctgcacgaagtgctttccggcgcagcaatgatgctggccccaagccgcttcttccggggcgtctacgtggacaatggattcgatccatcgcgcgtacgcgtcaacaagaatggcgtagtgccgccgcgcaggtcggtcacccgtgaatctcttgcccgacgcaagctcaggctcggattcgttggcggtgaaggcccggccaagggcagtgagctcatcaaggaagccctgcgccagctcccccataccaactacgaactgcacgtggtcgatgccgccctcaacctgggacgccggcacattttcgaagaaacctgggagattcccggcacgctgaagatcgtccctgcgtatacccagtcaaccatcgacaacttcttcgcaaacgtggatgtgctgctgttcccgacccagtgcaaagagagtttcggcttgacggttcgcgaggcgatgcttcgcgatacctgggtcatcgccacggatgctggtggcgctgtcgaggacatcattgacggggccaacggcgacatcgttccgctgatcaacggtcttgaacctttccgcgacgcgctgcgccgactcctggacaatccagaacaactggatggctatcgcaaccctcacccggagctgatccgcgtcttctccgatcaagctgacgaactgatcgggttcatgggcgaggtgatggatcgttttcccgcaaagcatctcgctcttccgcgcgactga

SEQ ID NO: 531308 - DNA, 753 bp, Stenotrophomonas maltophilia
atggcattcattcaactcgacaacgtatatttggatctgcccatcttcgaggtccaaggccgctcactgaagcgtcaggtcatgcgccttggccggaagaattccattgccgccgacaacgacggcgtcatcatcgtgcgtgccctgaatgatgtcagcgtacgttttgaaaaaggtgatcgcatcgggctgatcgggcacaacggtgccggcaaatccaccctgctgcgagcattggccggcatctatgccccgacgcagggcaatatcagccacgaaggaaagatcgtgccgttgctggatatcagccttggcatggatgacaattcgacaggcatccagaacatccggctgcgcggcctgctgctgggaatgaccgacgaggaaatccgcatcaagacgccggagatcgctgagttctgcgagctgggcgactatctcgaccttcctgtacgcacctactccagcggcatgcgggtcaggctggccttcgcagtttccactgcggtcgaggctgaaatcctgctgctggacgaagtcatgggtgtgggtgacgcgtccttcatgcacaaggcgcagaagcgactccaagacctgcacagccgtgcggagatcgtagtgctggccatgcattccaacgcggaaatccgccgggtctgcaacaaggccctctggatggacaacggccaggtaaagatgttcggtccgaccgaagaggtcgtcagcgcttacgaacagtttgtaggcgtctga

SEQ ID NO: 531309 - DNA, 780 bp, Stenotrophomonas maltophilia
atgaatgaagcactctccgacctgggacgcagcctgcgctcctggcgcctgtggacattgctgggctggctggaaatccgccagcgctacgcccgctcccgtgtcggtccgttctggctgacgatcagcatgggcgtgatcatcggcaccatcggcatcgtgtacggcacgctgttcggccagaagatgagcgattacctgccctacctggcggccagcctcgtgctttggggcctgttctcaagcatcgtgacggaaggtagcaccgcgtacatcgccaatggctcctacatccgccaggttgcgacctcacgactgatctacattctccaggtgacgtggcgcaacgcagtgatcttctgccacaacgtggcgatcatcatcctgttgctggccatcttcggggtaaagcgctgggacaccctgctccttttcctgccgggcctgctgctgctggttgtcaatgccacgtggatggcgatgatcaccgcactgatctcagcacgcttccgtgacttcccgcagatcgtggcctcgatcgtgcagatggcgttttacatcacgcccatcatgtacaaggccgagctgctgacgaaatattcattcataacgcgctacaaccccctgctatacctgctggacgtggcccgtatgcccctgcttggacaggttccgtcgatgcagacgtacgtgatcacgatcatgatggcgattgtcggctggacgtttgccctgtggttcaccggccgctacatcaagcgtatctcctactggatctga

SEQ ID NO: 531310 - DNA, 834 bp, Stenotrophomonas maltophilia
atggccagcagacggagcaagacacagcgaattaggcatggctactgcaaactgaccggaaagcccgggcgtttcgtcaagtcgcacatcattccacaggcgttgacgaagatcagcgaacgagggggcccattctttcagtacggggagggcgcgaggcctactcagcgctgcagtagctggtatgaccaaggtcttgtcatacgcgagggagaggacatcttgtccgaaattgacacccgggcgattgaggcattgagggagcatcgccttgtatggagtagttggggcgaggcaacgacgctcggcagcttacatgacgtgatccaggatccctttgggttcaggcaggtccacacggatacgaagatgttgcgtatcttcttcttgagtctgctctggcgagctgcggagagccagctcagcgagttcaaggagattgaacttcccgctgcagatgctgaggtgatccgtaaagccctggtggacggactggagccaccaatgagcttctatccaatacagctgactcagttatctacgttggggccggtgcacaatcatgctccaagacgggatgtcaaatacctgccttgtgctgatggttttgagcgtccgatagatatgtaccggttctactccgacgggctaatcgctcatatcatgcttcccacacttgctagcgtcgagattggggatctaggcgcacttgttctagggggagaatcttctgtagttctttctaccgtaacgtttgagaaatcagcacaacggagagatatggccgccatcctcagagagtacgatcttcacgaggacttcttacggcggtga

SEQ ID NO: 531311 - DNA, 1221 bp, Stenotrophomonas maltophilia
atgaacgcatacttccatgttgcacctatcgcccttggcacattggaggttgagtgcttgtcctcgctgctccaccgcatttcatacgcccacggcgtttcgcggtttcagttcatatcgcaccttcagtctcgctggtggaccgaaactggagaccatctccctcgatgtgaagagctgagatgggacggctacagtccgaatgtctctattgcgttaaccgcactcaattatgcgtttggctatgacttggagggaacgaccctcgtcgccttgcagggcatttgcgcaggaaattgcatcggatccataaagcatgaaagatgctggtgccctgcttgtctcaggggtgatcgtgaagccggcaggccaccctatgatcgtctactgtggcgaatccaaggcgttgaacgctgcagtcttcataagcttcggcttcgacgcaactgcccccactgcgggtcagggcaaaccaaagacagcagcaaagtcgagctagaccaatgcagcacctgcggtcaaagcctatccaacctaacgtctatcggggattatgcgccgcgaccgccattcggtgaggagcagacagagcaactgatcctccgactgggagaggtccgtggagcagcctcgggttcgctgcaggtgttcctcagcaacgttagcagccctgccaaggactggggagagcaacttggagatattcttcatacgaggcggtgcccgattcttccgcgactgacatccctgattgcggtagctactcactttggtgtggacatcgtgcagcttataacctcgccagcctcggcagcagcccaatacggattggaaattggcagagcttcgccgcggaggatacgcaggccgattaaccacttgcgagcaaatcgtagcgtgtggttacgaaaggaactggaagctgccatcgccggaggcccgccctacccttctacggatcagttctgccgcagccgggactacagcgtcacagctgccagaaacagctttccatggcttaccagacagctcagtgccctgcatcgtgagtggaaaaatgccgagaaggagcggcagacattggcggcagcaatggcaatcagatccctgctaccaggcacaaaacaccggtctatcaaggctctcacccgcatggctgccgaactatcaggcgcgccgttgcatgtcgtgcgaaaagtactatcagcggagacgcgatga

SEQ ID NO: 531312 - DNA, 393 bp, Stenotrophomonas maltophilia
atggctgaccagctgatcaccgctgcaccgatgcgcactgtaaccggcgcgcggttcatcacctcacctggcaccagcgtcctagcggcccgattccagtgcctgctggcctgcggtcacgtcatcaccctagacctggtccaggccgtgaagccggagtcgggaaagccgctgttccggcgcggcaagccggtcatggtcaaccgagtcgccgacaagggcgagcgggtgcccgtcgagcgtcaggccattgtcccccacaagcgttccagcgagcgcacttggcgacagttcgtcgcggcactgcgggccctgggctacgcggtcgagtggcgctcgcacctgcccgccgatcctggggcgcctgggacccgcgagctgcaccgtttgtaa

SEQ ID NO: 531313 - DNA, 858 bp, Stenotrophomonas maltophilia
atgtccagttgccatccggaaaccaatcgggtgaaaggcatggctaagcgtccgattctgtttaagcgaaccatatcacgcgcctctctggcggacgtgcagccaggcggtgggcaattgaaccttctaccctactcccgacacctggttcacgctcctcttcgcttgggccaatctccattcgcgctcattgatcagggccacgtcacgcaggttgaaggcaagcgttcttgcatcctcaaggagctcttggggcttgctaccaatccatcggtgcaaagcgcgtctgagcttcagcacatcgtccgcgacgctttcataccaaccaatgtcaccagctacagtgtaagtcgcgcccggatcgacttccgcgaggaaaacgcgcctctggcgagcaagggccagcatcgcagcgcattgggcgagtgctgtgacaacgtagcgaggcagattggggctgaaggagacaagatccatcaccgcctgtgcatcaagcaatgccgtggccttagaaatctgctggtactcccacgcagaaacttgccacgtctcactcaggggaacctgcatcgcggccctgagatgaagctcttggatggagaggttgtcgaccagaatctccgcgagaaccttagcctggcgtttcctcctgcggcgcgacatcaacaagggaagcacgccgaccaagagcgcaataaatgcagcaacagcagttgcaactgcggaaatcgcgttccagttccatgcaccagctgcgaccgtcccaacctccaccacaacactcattcgctgatccccctgaggactcgccggcattctgccatgccgctgcaccgggcggagaccatcaatggctga

SEQ ID NO: 531314 - DNA, 225 bp, Stenotrophomonas maltophilia
atgagcccgcgcgtagtcggcccccaggccttcggcgattctctcggcctcatcctggctttcgtggtgcgccatcgtgtgatcacggaacgcaggcgcgtcatcaccttcgcgccagacctcaacttccgcgcgccagaacggcagcggtcgaccttccgcgatgtactgagagtcgatgtccagttgccatccggaaaccaatcgggtgaaaggcatggctaa

SEQ ID NO: 531315 - DNA, 201 bp, Stenotrophomonas maltophilia
gtgcagttcggccagatcctgcagcgctcgctgaagaacggtatccgggtgggctacgccgaggccatccgcgccggcctggccgccgcggcaccggtgatcagccaggtcgccatgctctcgctagagcaggacgcacaagcctacctggtgcgccagctggacattgccctgaatggtgaagccgccgcagcacgctag

SEQ ID NO: 531316 - DNA, 951 bp, Stenotrophomonas maltophilia
gtggagtggaagcgggacgacctgaattgggttcgcgccggtcgtgtggctaccgccagcatcgacatcccgggaatctatgccggtcagtacctggcgcgtgttcgtgcggtcaacgcactgaatgcggtgtcgattccggccatgagcgtgctgaccgagatccgtggcaagaccgtgcctccaccggcggtgacctcgttcaccacgactccaatcgtgtttggcatccagcttgcgtgggcgttccccccaggcgcgacggatacgcagcgcacggagatctggcgcagcacagggccggaccgagatgccgcggtgaagcttggcgatgatgcctacccccagaaccgtctgcagctggatggtctggcagcaggcgcccggttctacttctgggcacgcctggtggacagggctggcaacatcggtccctggtacccgacgggtaccggtgtaatgggtgaatcaagcaccgacgtgacggagtacgacaagcacttttccggtctgatcaataagagcgccctgggccaagaactgctcgcacgcatcgagagcatcgagcagctcgctcctctggttttggacgccgatgccacctacgaacccaaacagaccgtagtgcacaacggaaagatctggttgtggaccgatgccgagcccggcaacgaggagccgccaggtacgaagtggaagagcgtgggcgatgccgttgccgaggccggtgcattggtcggacgggtggaccagctgcaactggacgttacggaaatagatggcaaggtcactgcggtgggcaaccgcgtggacggcctggttgcgcagtacagcgcagagcatgcgagcgatgaggactggaacgcaagcgatgaggactccttcgcgggcaccatcaccacgttgaccgtcatcgccagtggcgaccacctccccaacatcggcacatag

SEQ ID NO: 531317 - DNA, 1149 bp, Stenotrophomonas maltophilia
gtgactcaactcaactcgaccccgaacattctctggaccactccaaatcgtgaggccgttgtaggcattaaggttaagaacctccgcaatttgttcgtgagcacctacgacacgcaagacccggacagccccgcgcccaacaaacatggatatcagcggaatccagacgaaaggcggttcaagccgattggtgaatatttcgccgaaaatccgtaccttgttccgcccatccttgtttccgttcgggtcgacgtcgacagtgacattcgcacggttgctgagttgctcgccgccaacaatatggcggaaatcgcgaagcgctacgggcaccaggttgcatccgtcatcgatgggcaacatcgcatcggcggcatgctgcacgctgcaaagttcgacaaggacttcgccgagtttctggttccggtcactttgttcttcggcttgtcgttcgaggcggaagccgaagttttcaataccatcaattcgagccaacgaaagctccccaaggcgctcatcgaagtgacgcgcggcgacatttcagagcgcgaagagctcacgcacgcccagatggtacgaaagattgcgtttggcattgcgcgcgataaggactcggtatggttcgaccagatcaacatgaccggagggcgcgcgccaagtcaaaaggtgacctacgaagggctgcgccgctccgtcgcgaatatgttccccgcgaacctactcagccgcctccgccaggccgggctcgatcccttggacgatgcagccaaacccttctggcgaaaagttggcgagctctttccggacgcttggaacggccgcagtcgtacggtgaccgacccggatacgaatcagagtcacgaagagacggtgcaataccgccttaaggaacttgtcggtgtggcttcgctaagtcggcttggccaagacatcatgagcagcagcgttgaggcgtaccaggaatatggaatcgactttgacaaggctatgagcaaaaagatgtcccgcctggcacatgtcgactgggagaagacggacaccaacccttggatggcttcgcaggcgggcttcgcaggccaggccaagttgtacggggatctccataaattggtttacgaaggcgtcgatccaaacggcaacgcagttgactag

SEQ ID NO: 531318 - DNA, 1161 bp, Stenotrophomonas maltophilia
atggcgggcggcattgcgctgatcgggctctgcgccgatcaggaggccggcgcccaggtgtacgcggtggcctcgcacaaggatcaggcaggcatcctgttccgcgatgcggtcaagatggtgaaggcgtcgccggcgctgaagaagcggcttgagttctcgggcggcgagggcaaggaatacaacattgctcaccacaagtcgcagagctacttccggccggcctcccgtgacgtgggcaagaccggctcgggctaccgaccgcattttgtcctggcggacgaagtgcacgagatggcggacggcaagatcatcgaaatgatggagaacggcttcaagttccgccgttctccattgctgttcatgatcaccaactcgggcagcgaccgaaacagcgtcgcctgggcggagcatgagcacgcggtcaaggttgcagctggccaccacgaggccgtgaacgatccgaccttcgtcggcgaggtcattgatgaccgtacgttctcgtttgtgtgcggcctcgatgagggtgatgacccgctggaggatccgcgatgctggttgaaggccaacccgatgctggggatcacgatcacggaagagtatctgcggggccgtgtcgacctggccaagcagattcccagcaagctcaacgagatcctgcggctcaacttctgcatgtggaccgatgccgatcaggcgtggatgagccgcgaaattgtcgaacctgcgatgcagtcgttcgacaaggcgcagcatcatggcaagcgcgtccatctcggattggacctttcgcagaaccgcgacattacggcgttaggcgcggtcgtggagaccggatcgcaggaggtcctggtagaggtcgagggcaaggaaacactggtcaacaagccgacgttcgatgcgtgggtggaggcttggacaccgggagatacagtcaaggcgcgcgaacttcgcgacaagctgccctacagcacctggatcgcaaagggccacctgcacgcaccagcgggtcagacgatcagctaccggcacgtggcgcagacggttgcggagtacgaccgggacttcgaagttgtccaagtggcttacgaccggtacgcgttccgacagttcgaagaggaagtgaaggagctggggcttcactacgggatctacagctga

SEQ ID NO: 531319 - DNA, 768 bp, Stenotrophomonas maltophilia
atgaagaagctaaaacctgttctcttgcccctcgtactcgcgctgacagcctctgtaggctgttctggtcctaagcctgtcataggagaggaagtcgcgagcaagagagctgctccaccagcgccattccagtccactgggagctgccttccaagcctgatcgaagatttgaaggttgagtggccgaacaacgaaatcataaacattgtggcattcggccatagcgttcctgccggctatggggacacgactgaagtccagatgctggatgcctatccacgccagttggaaaacgcgctatccgcgaagtaccgccgagccgttctgaacgttatcaattcaggagttgggggcaacgattcacaacgaggattgaagcgaattcaaagagatgttctggatcaccacccaagagtcgtgctgattgacttcgctttgaacgatcgtggtatcccgctggagaggtcaagggaaaacctgattgagattgtagagagggtaagggcggtcggcgcatgtcctgttcttctgactccgacttgggatttgacctctaatttcgaagaccctaatgacccactggtgaagcaagttgcaatgattcgagctattgcagcagagcaatcagttcctctagcggatagctacgctgccttccttcaatttgatggcgaccgaaggtcgttaatggcaaccttcaaccatccaaaccgcgccggacatcaacttgttcttggaagattgctccctcttttcgaggagaaatga

SEQ ID NO: 531320 - DNA, 897 bp, Stenotrophomonas maltophilia
atgacgatttgtggtgtctgttctacagaaggggtatctgtcaagcccttgggggactctctctcggttgagtgtccggtgtgcatgaagttcgtgatcaccggcactgcattgtcagtggtaaagaactggtttccacatcgtcgtcactggctttcgggccgtattcggaggagctggaatgaaactcagcgtcctcttaaggtcgattctgaatacgtcgagtctattgaggggcctgaactaacgtccgtaatgcagaagcagaatgctctgttggtcgatctctcgcagcgctccaaatttcctggtgaggcaattgcgcttccggttactgctagttacgtagtcgattcttcctccgcggtagagttgaattatcacatcgattcgttgcgcgccagagggcttctgctgagaacgaattcaactccggttatttctccaggcgggtgggagtatctggataatctattaagaccggcaggcggcaatcgttcggagttttttgtcgctatgtcgttcaaggaggagcttcgctctgcttgggtgaaaggcattcagcctggtgcagcggatgcggggtacgccgcaaagcgagtagatagtgatattcataacgaccgaattgacgatcgaataatggccggaattcgatcaagttttgcggtaattgttgacgttacaactcagaacgcaggtgcgtactttgaggctggttttgccatgggtcttggtaggcctgttgtatggacggtaagaagcgacgatgtgcaaaatttgcactttgatacgcgacagtttatgcacatcgtctggaaagacgaggccgaattgcgcgtccgacttcgtgatcatctgctcgcagtgttcggacaaggacgtgctgtgacttag

SEQ ID NO: 531321 - DNA, 348 bp, Stenotrophomonas maltophilia
atgacgcgcccgcttacccgcatcgaatcggtcatccaggccgtccgtacccgtatcggcacgcgggtggatggccccggctcacgcctaccctcggtgcgtgcgcaggcggcggcaatgggcgtgtcggtctccaccgtggtcgaggcctacgagcgcctcgccgccgaagggctgatcagcgcgcgtgccggttccggcttctatgtcagtggaccggccgcaccgctcgccctggccgaaatggaaccacgcctggaccgcgcgattgccgctgtgggtgtcgcggcaatcgctggaaacgccggcgggccacctcaagccgggctgcggctggatgcccagtga

SEQ ID NO: 531322 - DNA, 930 bp, Stenotrophomonas maltophilia
atgctcaagctgcagtacacccaagttgatgtattttcagcacaaccaatgcgcggcaatcctgttgcgatagtccactgcaatgaattgctccccgaccattgcatgttggaggttgccaggtggcttggtcttagtgagaccgtattcctgcttccccccgtcgatcccagggcggactaccgggtacgtatctggtcgactctaggagagcttccgttcgctggccatcccaccctgggcgcttgccatgcttggcttgaatcaggcggagtaccgcgtggtgcgcgcattttgcaggagtgcggtgctggactagtgcatattcgccatgagcagcggcggcggaaagatatgagcggatgccacccggagccaactaccctcagcaagctgtcagcgcagctggccttcaaggctccccccctactaaggaacggcccgctggagccgggtctcctgcctcgtgtttgcgagggtcttggtttggctcctggggaagtcttggatgcggcttgggtagacaatggtgcaggttggctggccctccgtcttcgaagtgacagggacgtattggcggtggtcccggactactccaagctgatgggtctggcggtaggtattattgctcctgctcagaatcaaccaattacagatgcaacgcggttcgaatcgcgcgctttcattgccggcgacgcggtgcccgaggacccggcaaccgggagtctacaagccggaattggctgctggtttgctcaacttggtcttggcgcggaccgatacattgttcagcaaggaacatgtttgggtcgcgcaggcaggatctttgtccatcgggagcaggacgaaatatggataggaggacacaccacaacctgcattagtggggccattagcttgaacccgcatcacatgccgaatgaaatatag

SEQ ID NO: 531323 - DNA, 642 bp, Stenotrophomonas maltophilia
atgcgacttcgcgtcattcttgctgatgatcaccccatcgtccgcatcggtgcacgggcgctaattgagggcagtggcgtaggtgaggtgatcgctgaggccaacaacccgggcgaactactgcaggcattggaagaccattcctgtgacgtcctggtgaccgatttttccatgcctgggagtcaacagcctgatggcttcgcgatgctggagttgatccggcgcagacaccccaacctgccaatcctgctcctgagcatggccaacaacctgggcatcctgcggatggtggtctccactagggtattgggactaattgacaaggcctcctcgcttgatgaactgccgcaggcgctgcaggtcgtgcatcgcggtgcgccatatgtcagcaagggattgaaaaaacgcatcgccgaactcggcagcgaaaccgtggcagccggcggcaagcagccatcaccacgcgagggcgaggtactccgcctgctggcctcaggcctgtcagttaccgagatagcgatgcatctgaaccgcagtaagactactatcagccgccaaaagaccgatgccatgcgcaagttgggtatcagcaatgacgccgagttgttcgagttcctgcgcgatgaaggcatctccaactga

SEQ ID NO: 531324 - DNA, 3657 bp, Stenotrophomonas maltophilia
atgggacggactgctgtggggatttcgtgctgggtgaatatgcatttttacctccgtggtttcttgctgtgcctggccgcagcgctggccgtgcctgcgctcgcccaagaggaagccttgccgttgtcgccgtcgcaacgcgcttggctcaaggcccatcccacggtgacagtcggattatacgacaacctctggctgccttttgagcgagttgaggatggccaaccggagggtctgacctacgattacctcgtcgaggcgaccaaccagctggggctcaaagtgaccacccgtcgctacgccagttggggcgacgtgctgcgggccgcctgctcaggcgaggtggatattgtgatggatgtcgcacttaccgccgagcgcacgcggtgcatggtcttcacccgcgagtacgccgaagctcctgtcgcgctagtaagccgccttcaggacagtcgcgctgcacgagatgccggcctggagggtctgcgggtagtgaccgaaggcgattttgcgttctcagacagcgctcgggagcgatacccagccgccaagcatgtgcaggcccagacgacttcggaggcgctacagatggtctccgatggtcaggccgacgtgtacttgggcaatgcttatgtggctaccgcgctgatcgcagagctcggtattccccgtatcggtctgctgcggccgagcgatatgccgctggattcgctgcactttggcgtacccaatgccaagcagacgctagccgaggtgttggacctggcactgacatcaatcccggaggcgcgtagtcacgcaatccgagcgcaatggctgccttcgttgagttggctcggcagtggaaagctggccctgacggccagtgagcgtaaggcattggcgcaaccactgtttatcggcttcgcatcgaagtgggcgcccatctccttcattgatgaggagggccagcctagcggcattgccggtgagtatctgcaatctttccatgccattggcgctgacaaactcaagctgttgccgttggatagctggcgatctatccgcgatgccatgcgcgatggtcggctcgatgcggtgatcggtgtacccaatgacaccacggcattcggcgccgactgggtgttcagccagccgtttctgaccgtgtccaatgtgatcgttgtgagagatagcagcggtcgcgtgttggatatgagcgatctcaatgagcgccgggtggcgctttctgacccagagagactgggttccttgttgcgggcgcaggcacccgatgtagtcgtcgtggaagttgccacagcccaggatggcttggaacgggtgcgctcgggacgggcagatgcgtacatcggcaacctcgcggtggtggaccgattcctgcgggaccgatactcaggcgaactgcatattgcggcaccggcaggggtcgaggatcggctggcattggcggtgcggccgcagcatgcagcgcttgcttcggcatttgaccgcatgctgatgagcatgacgccacgcgagcgcgaggccatccggaccgactggatggcggtggagtatcgaacggggttcgattggcagatcttcttgaagtgggccatcccgctggtgctagtgctgctgactgccggtgcagtacacgccgtaggacacatacgcctgcggcgggaggtggagcagcggaggttgatcgagaagcgactggcagaggtcaccggaaacctgccggccgtggtctatcaggtccagcgcagtccagaggggcaactttcgttttcatatatcgcaggcgacatgccatcgctgtttggtcttgaggtggaacaggcgatacgcaatgagcgcgagcttttttcgcgcgtgcacccagaagatcagccgctgcttgcgacagaggtggagcgtgcagcggcggcggtcgataacattgttttggatttccgagtgcgctccgaagatggctggcgttggatccgttcgcgcgcccggccacaccatgccgacgacggcggtttgcagtggagtggctactggattgatgtcacccaggtccgcgcacaagcgcaggcgcttgaagccgccaaagcctcggccgaacaggccacagaagccaaggcaagctttctggccaccatgagccatgaaattcgcacgccgatgagtggtgtcctggggatgcttgagattcttgcccataccgggctcgacagcgagcaacgccgtgtgctggcaattattgaggattcagcacagatgctgcggcagatcctcgacgacattttggatttctccaagatggaggccggcgcgttggtgttggaggccacgccgatcagtctgcggcggacgatcgataatactcagcagatgctgattacgcaggcaaccgctaaaggactgctgctgagcaaccgcatcgattcacgcgtggctcatcagcacatggccgatggcatccgcctgcgccaagtgctgttcaatctgctgagcaatgcgatcaagttcactgcgcagggtcgagtcagcgttctgctcgacctgctggaggaccggccgcgagcgcaacgcatacgactgacggtacgggacaccggtatcggtatctcggaggagcagcggacgtatctgttcagtcccttcatgcaggctgaggcatctaccacccgtcgctatggtggtaccggtttgggcttgagcatctgccaacgattggctgagttgatggatggacagttggaacttcggagtgcgctgggtgaaggaaccgaagtgtcgctgaccgtgtggctgcctactgcagcagccgatgccgatgtcgccgctaccgcagtgccgagcgagaccgtgctattgccactggcattgcgtcagcagaatgtcctgatcgtggaagaccatcctaccaatcaggatctgatgcgctggcggatgcagcaattgggcctcaagcacgagattgcaggtgatggtttggccgcgctggcgatattggccaaaggcaatttcgatctgatcatcaccgattgccgcatgccgggcatggatggctacgagatgacacgtgagattcgtcgcatggaagccagcagcccacatcgcaaacgcatgccgatcatcgcgctcactgccagtgcacttgatgaggaagcgcggtgctgccgagaggctgggatggatgatttccttgccaagcccgtgccgctggtgacgctgcggcaggcgctgatccgctggctgcagaatggttccgagcacgccggcgatcaccgtgatgaagggctgggcgacgatttacccgggcaggtgaaagtgcccgactcgcgtgcgcctgttgtgcaaacaatctccgtgcgcgaggcgctgattgctaggtttggctcgatgcaggtggcggatcgcatgatcgtcagcatcgttgccaccacgctggaggatctgcaggcgatggatgtagcgatagccgcgcaggatgacgcgacctgtgcggaccgtctacatcgcattgctggtggactgggggctgtaggggctgaagatgatgcggactgggcgcgcgagttgcaggcggcaattgaagcagacggcatcgttgcccacgacgaggaatggactacgttccgtatggcggtcatgcagtatctgaaggagctgcaaagttga

SEQ ID NO: 531325 - DNA, 321 bp, Stenotrophomonas maltophilia
atgaacaacgtgttcgcgctccgaagcgccgcttctactagtgcttccacttccaaggaagtgactgctgcacctcgtcgcgccgcgttggcccagctcttgagggattcggcacgcatcgagggcgaggtgctctacccattgctggcagtgttgttggaagcccacctggaccacggccatgatgactgtcgtggcaacgcgagcattcgtgacggtttggacaacttggaggtgctgctcgcattggatatcgaacggatggggttgcgacggtctcccaagacaccttgtacgacgttgccgcgctcgcgtagctag

SEQ ID NO: 531326 - DNA, 1335 bp, Stenotrophomonas maltophilia
atgctttcgcatgtgagcctccccccgatgtcccgattccagacccctctgatatccctggccagcaagtggcggggcgatcacatcatcaatcgtgtcgaacacaatgcggtcatggccgatgtacttgagggcggggctgcaaccccgcgttatctgttcatggctacgatgtcctgcggtatcgcgatccttgggcttctgcagtcctcggcagcggttgtgatcggcgcgatgcttatctccccgctgatggggccgatcatgcagctgggcttctcgttgtgtgtcatcgatttccggatgatgcgtcgtgcgttgatcgcgctcgtgatcggtacgctcgttgcgttgctgatgtcctacctgattgtgaaggcctcacccattcgcgaagctaccagtgaaattctggcgcggacgcggcccaccctatttgacttgatggttgccgttttctccgggctggcgggagcctacgcggccattacccgcaaaggcgaaaccatcgtgggcgtggccatcgctactgcgctgatgccgccattggcggtggtgggctatggcttggccgtcggcagtatggccattgcaggcaacgcttttttcctgttcatgaccaatctgttggccattgccttgagtgtcacactggtcgccaagtggtacggttttgggatgcagaactcttcacagagtacggcctggcaggcggtattgatcgcaatgacattcctggtacttgccgttccgctgggtatcgcgctgcgggacattgcggcgtctacgtggataggcaatggcggcagggtcgagacggaggcctatctttctcgcaacggtggtgccattgacagtttccatgtggaccacagcgggcaggtaccgatcttcaatgtcgtggctttcgtgccgcattacctgccaatggcaaaaatcgaaattcagaagcagattcaggccaagctcggtagggaagtgcaggttgagctgcatcaaagcctggaagccaatgacagcatccagaacggcatggccgatatcgatcgcatccgcaggcaggtcgcatccatcgaagcacgcttgagcgccgatgcccaacgcaccgtcctggagcaggccagcacggatgccatcacgcagcagctactcgcgaatctggtgtcggtggaggttgccgagcacgagcatatcgtcgtggtgcgaccccatggcccactcatgccggaacagaaagcaatcctgacgctggaggcccatcttcagggtcagatgcccggatggacggtagtggtacgtgcgcaggaggagtcccccatcactgtcgccaactga

SEQ ID NO: 531327 - DNA, 1554 bp, Stenotrophomonas maltophilia
atgaaccccaatccaatacggatggtccagcgggacgtcaagatgaatgcgaatttcacgtatagcctcataccgacgctcgacagcggattgctggcgatgcttgccagcagcctggtattcacgcttgtgcggggcttcccgttgttcctgatgtatctgcggcgcactgcacagcttgagcagtgcgccgtgctcatgggagtatcatcgaaacaacccatgcaggcacaggtacctgtacctggggccatgcaagatcgtttgaccgcattgccggggcgccttctgctggagcagcaattacgtgggtcgcgcggtcagggggcgtacaaggccgtgctggtgatcggcgtggatggcttcagcgccatcaaccaactctatggccatgcttttggcgatgaacttctgaaggccattgccgtgcgcatccggtccgctgtccgcaccgagaatatggtggtacggctggccggtgacgaattcgcgatcatcgcagaggtcgaagagctcggacaggcaaagaccattgccaagcgcctgatgcaagagatgcgccgggcgtttgtcatgaatgacaaagaggtcgaaatttccgtgagcgtcggtgttgccatggaaaccatcgctggcggtcaacgtagtcgcttgctgacccaggccgccgcagccatggcggacgccaaggatctagggcgcaaccgctacgcggtgttcgacgtgctgatgggggcgagtgtttcggaagtcgagttgatggtgggggacctgcgtcgcgcattgcgcgagaacgagttcttcctgctgtaccagccaaaactggatcttcagagcgggcgggtgatgggcctggaggcgctgttgcgctggaaccatcctgagcacgggcaggtacctccggatcatttcatctcgttggccgagaagacgggaatgattgtggatatcgggcgctgggtgctcaacgaggcgtgcagtcagatgcagcaatggcgaagtgagggtgtggtggattggtgcgtctcggtgaatgcttccgtcttccagatcaacgcagcctcgttctacgtggatgtgcttgacgctttggagcgaaacgatctggatccagaagatctgtatatcgagatcaccgaatctggtgccatgcgcaacgcagaattgagcctgatgacgttgcgcaagctttctgctgccggtgtgcggatctcgctggatgacttcggtgtcggttactcgagcctgtcgcacctgaaacgcttccctgttcaggagttgaaggtggaccgtagcttcatcagcgatattgccgagtgttcggagagcgaggccattgtcagggcaatcattggcctggccaaagcggtgggattacaggtagttgcagaaggcgtcgaaaccgaagaacaacaagcgctcttggccgagatggattgtgatgtaatccaaggctatctgatcagtcgcccggtacgggcgattgaggtgccggcactgatcgccaagcataacgaagcaaatgacgtattgaatcggctgttggagagctga

SEQ ID NO: 531328 - DNA, 3429 bp, Stenotrophomonas maltophilia
atggtggccaccaatggtggcagtattgttgccaatgacatggacatttcctccatgggaaccactgcggttggtctgattgccaatcgcagtggcacggtggtgttcaatggcggccggatcagtaccagcggtttaaatagcgatggtgcagttgcccgcaacggcggtcacctggacattggtcgtgatgcaaatggtgtaggcacactgatccagcttggtggcgacaatgcacgcggcgtgtcgatctccagcgccaccgcccgcattgacggcgcgaccatcgaaataaacggtggtcgcggtactggtgtggttggtgcggccggtgtggtcacttcgcagggtggcgatgctcttgtcaccgatactgccatcatcaccagtggcttgggggccgatggcctgaacgtggaaggcgattccagcatgacagtgcgcgatagcagcgtgcttaccacgggtgatagcgccaagggcgcggtcgcctacgacggcaacggcagcctgttgctggacaacgtgagtatccgcaccgagggtgcaggtgctcgcggagtggtttccagtggcgttagtgctggtgtgtcatcgagtgtgacgatgcacggcggcagcatcaccaccacgggtgcggggagcataggtgcacaatctgcagccggcgccgtcatgcaattgagccaactcagcatcgatgcaactgctacgggcgtacaagcgattggtgcgggccgggtcgatatgtccgacgttgatatcctgactcacgaaggctacgcacatgcggtggaggcgaccggtagcggcgcagtggtgacgggcagcaatatccgcgccaccactcttgggcagcatgcctacggcctccgggcgaacgaaggtggctgggttgacgttggcaatgtgatagtcgataccaacggcgtgtatgcgcatggtgcggtagccgatacagcaggttcgaacctgaccctggcctccgcagacatcactacccaaggggaagtggcaatgggggcgcgcgcatatggcggcggcgtagtcgctctcactgatgtccgcctgacgacccacggcaacggggcttacgggttggacgcgatgggagctggttcgcaactgcgggctgacaatgtcttggtggagaccttcggcgccaattccggcggcaccaccgcgtcagccgtcgttgccgagtggggtggccagttggatattcacaacagccaggtcaagacgcatggtgcctcggccatgggcctgctgtcgcaggtggccggggacctgggcgatacggatactgtgctgaatgctgttggcgttcaggtgctgaccgtaggcgacaatgcgttcggcgcgatggcatgttcactgatcgtgggcgccggtgacgcttgtgccagtccgaattattcgggtgcagcgatggagggggcaaacgcctttctcaacatcgatgacagccgcatcgaaaccaacggtatcggtagccatgggctgtacgcttacggtccggcaggtgcaagcatcgtcgccaatggcagtgcggtactgacgaccggcgaaggagcgcatggtgtcgttgcggagtttggcgcggatgtgcagctcaatgactcgcacgtgcgtgctgaaggtgcaggtgcggttggcgctctcgtgattgacagtaccctgagcatggctggcggcaccctgagcagttcgcaggacagtgctatccgcagcgacgcaggggatatctccttgtccgctggcgcccagatcatcggtggtaatggcgtattcgttgaacagattggcaacgccggaaaccgtgtgcagatgagtgatcgtgcaatcgccatgggtgacgttgtattcgggaatggtgccagtacggcggccacttcgttgagccttgatgatgcttctgtttggattggcaagaccaatggtgtggtcgatgtcctgcaagtcgctggcggttcaacatggcagatgacgggggactcgacggtaggccagctttcactgaacgacggtgtgattgctttccaggcaccgagcacgaatgacttcaagacactgactgtgactggcgactttgtcggcaacggcggtaccttgctgatgaataccgtcttgggggacgatcactccgccactgacaagctccatgtattgggcgatacctccggccaggcatatgtagcggtgaacaacgttggcggggccggcgcgcaaacactggatggtatccagatcgtcgaagtgaatggcgcttcaaacgccgagttcaacctgtccggtcgagctgtgggtggtcagtacgaatacttcctgttcaagggaggcaaagccgatcctaacgatggcgattggtacttgcgttcggagttgccgcctatcgtgcagccggatccatgcgagttggatccgagtgctccgggctgcattgacccgattgatccgaccgatccgccggcgcccgtcctgcggccggagattggcgcgtacctggctaaccagtcggtggcagtcggtatgttccagcatgccatgcatgatcgtttgggtgagcccaacttggccgaacgactgaaggacgacgacaagctgggtagcgtatgggctcgggtgactcgtaatcaggtcgactacggtgtgggtgaaggtcagatcgatgtcagtagcgatagttctttgttgcagatcggctccgatatcgcccggtgggggcagactagtcgtggccaggtcggtttcatggccgccgccggtcaagcgaacagcaccgcaacctctgcactgaccggatatgcggccaagggaaaagtggatggcgtcgcgctgggcgtttatggcaattggtttgcgcgtccggatgaagctgtcggcacgtacgtcgatgcctggctgcaggctggtcgctataagaacagcgtgcatggcgatggtttggttgaggagcgctacgacgcacagactctgacagggtcggtggagatcggctatgcatggaaggtatttgccaacgaagccagggccttctatctggagccgcaggctcaattcatctataccgactatcgcagcgatgaccacatggaagccaacggtacggtggtatcagcggagcaaggcggcggtctgacgacccgtgtgggcctgcgcgcctacggccatgcgatcaacatggacggcaatcgagtgcagccatttgtgacggcgaactggtatcaccagtccaacatcaattcagttgcctttgacggcgaggcactggagggcggaactccgaaggatcggtacgagttgaaggtaggtgcccagctgcaactgggcagcggctggaccggttggggccatttgagtggacagtccggtaaggatagctaccgcgacattggcggtcaggtcggcttgaaatatagctggtaa

SEQ ID NO: 531329 - DNA, 429 bp, Stenotrophomonas maltophilia
atgcaccatcgaggcaatagcgagtcggatcatcccgacgaactgctctcgcgcgacgaggacatcaccgcgcgggtggttgctcgattgcatccgcggatcaatgccgcgtcatcgatcacccgcagcagagagcgcagccgccttctggccaagtaccaagagcgacaagccgagtaccgtcgttggcgtggcaggccgggcaagctctccggtggcgctgcggccagcgcattgacagatcgcgacgtgcgcatcgccgagctcgaatcccaggtcgcgatgatccgcgccgtcggcgaactgggcggcttcagcaagtgggcgcagttctatgagtcgtaccgcggctcgagggatcagctggcgcagttgggcgcgctgccggaagcgacggtggagtcgcttccgctgcgcaagccaaagtag

SEQ ID NO: 531330 - DNA, 1437 bp, Stenotrophomonas maltophilia
atgaagcgattcgtcgatggcgtggatcggacgcaggcgcttctcctgcctgatcggctcgaagactacgtccaccaggacaatcctgttcgcctcgtcgacgccttcgtggatgcgctggatctccggtcgctgggcttcgattccgccagccgcgccgccggtggtcgacccgcttatcacccgggggcactgctgaagatctacatctatggttacctcaaccgggtgcagtccagtcgccggctggagcgcgaggcacagcgcaacctggaggtgatctggctgacgggaaggctggcacccgacttcaagacaatcgccgacttccgcaaggacaacggcgccgccatcgtggcggtatgcagccgcttcaccgcgctttgccgcagaatgaaggtcttctcgcatgccgtggttgcgatcgacggcagcaagttcaaggcggtcaacagccgcgatcgcaacttcaccattggcaagatcaaggcgcgacgtagccagctcgacgagagcgtgacccgctatctggccgaactggatcgcgccgatcgcgacccggcgatgctgcctgaggcgcgcgtcccgcagctgcgtgacaagctggccaaggtgcgagagcggatggcggcgctggatcgcatcgaagagcagttgcaggaagagcccgatcgccagatctcgctgaccgatcccgatgctaggtcgatgacctcgacggggcgcgccaccggcacggtgggctataacctgcaggccgcggtcgatgccgagcaccacctgatcgtggcccacgaggtcaccaacatcggaaatgatcggacgcagcttgcgcccatggcgctcaaggccaaagacgcgttgggcaccgaccacctgaccgcactggccgatcgtggttattacaacgctccacagatcttggcctgcgagcaaaacgggatcatcccgctcgtgcttaagccgctgacctcgaacagcaaagccgaagggcgcttcgacaagcgggacttcgtttacgagccggcgctggatgcctatcgttgcccggccggcgagcagggcacgcatcgcttcaccagcgaagaaaacggtctgacgctgcgcaaatattggtcatccgcctgtccagactgctcaatgcgagaccagtgcaccacggcacgttaccggaggatcagccgctgggagcacgaacacgtgcttgaggcgatgcaattgcgactcgacgccaggccgcaggtcgccgttgcgcgacggcagacggtggagcacgtcttcggcaccctcaaggcgtggttgggcactacgccgctactaaccaagacgttgccgaaggtcagagcagagatcagcttggccgtgctggcctacaacatgaaacggatgatcaagatcatcggtatgcctggcatgttgaaggcgatcgcggcctga

SEQ ID NO: 531331 - DNA, 366 bp, Stenotrophomonas maltophilia
atggacaagttgcttcttgccacaatggtagccctgttgctggccagttgcagcaccgtggggggggacatgatcatccgtgtttcagggacagtgccggcatcctcagtcatcgccgagcgccaggacacatgccagctgcagatggtctccatcgagaccggggaacatctgaataccagggaagttgagggtgagttctccttgacgatgatggttgtctcaggccctgcgccgacacactacttctttgttgccgactgcagcgatggtcgcaggttgaactccaagaaaatcagcatcagcagtcgccgctcacagagcaggaccttcaatcttggaacgctcagtgaaggcgacctctga

SEQ ID NO: 531332 - DNA, 678 bp, Stenotrophomonas maltophilia
atgtcagtgacgaccgtggcctgcggaacgacgatgcattcatgcactttctccgcctgtgcaggctgcgtaccgaacacaagaggaatgaggaagcagagtattttgaccgacaacttcattcttggattcgagctccatattgaaagctgtctgccagaggttggagaagattcacctgtcgccacgtggttacgcggaggttcgcccgggtctgttcgtattggaagctcccatcctgtgacttatcagaaggagcatgaagaacgcgatcgtcataccgataagctggaactggatggaatccgggtatcccttgcagtactcgaacgcaggggtgtcgtccacatgatcgaggcactctctgacgaggcgatacagggacgatgctctgctgtagaaatagaccaccgcaccgacgcagagggctcgtccgactggaagagccatcgttctcaactgttctttattcactcttttgcctcgacttccccacggcaagcttccgcgattgaccggtcatcctatagtcgaccgaatcgctccccctgctaccgtagcggacggttgcaacctctacaactccgccgggagcatatggatcgctacaggctgaagtgcgtaagctgcggcgaccacacaggcttcgccggcattactccctcacgccggcggtag

SEQ ID NO: 531333 - DNA, 678 bp, Stenotrophomonas maltophilia
atgagaaattggccagggaggcaaacattcgaactgaacgagccagtattcctggggagtgcacctgtgcaaattaggtggttgactacgcttgccctggtcctggcctgcagtgcgtgcgcatcgcttcctggcaaccagaaggtcactgcgttctatgtctccaacgccaactctgatgtggcgggctgtgatacgactgacttcagggaggttgcccttgcctgccaccggattgttgatggaaacagtgtagtggtggctttgcgtgaatacacagcgcctgaagtcgaaaacgaaaggtacaagaagctgacgttgatccttcgctcgaatctggctgaaggtgatgtgcttgatttgccaagcagtgaaggcagggcggtctacagcactggccttagcttgagacccggcagcactggatgctacggaaaggctgtttcgggtagcgtcgagatcctgaagaagtcagccgatctgatgcgggttcgcatcaacgcacgctttgatctcgatagtccagcaggctggaaggaccactgcaagatgcgcgagttcagttacgaattgaatgccattcagagatcgctgggtcagctggacgcatgggagggagtgccagcacctggggattctcttatcagcgagggcagcccgggtagcggtctgccttag

SEQ ID NO: 531334 - DNA, 363 bp, Stenotrophomonas maltophilia
atgaagatcacttccattccgttggacaaggccgtgtcggacggccccatcgatgccttcagccatgtggtgctgggcgattcgcccaccctggatgaggtactggattgcctggcgtcgctgcacgtggccaatccccgccatcgctatctgtgcacgctcgacgatgtcggtcagtgccgttacaccagcatgcacgcgtccgacgacgcgcgcatcgcactgtacgaggacgaagacccggcgacccccgaagatgcgttggcggcacgcgagcggttgctggcgcatgtcatcgcagctggagcactccttccatcggctggaatggaccaccctgccgggtaccttgctgtgcaatga

SEQ ID NO: 531335 - DNA, 1062 bp, Stenotrophomonas maltophilia
atggtttacgaaattgactttcttcctgtcggtgaaggctctggggatgcgatcgttgttcgttacgggcatgcatctaccggctactggttgcacgttgtcgacggtggccggacagaaacaggcgacaccattatccgccacatcgacacgttctatcccggatatcacatcagtcatatggtggtaacgcatgcagacaacgatcatgcatgcggcttggttcgcgtaatggaaaagaaggtcgtcgagcatctctggatgaaccgcccctggctttacgcggcagagatacttcatcacttccacggcaactatactctgcaaggcttgatcgatgagatcaaatctaggcactcctacttggtggagttggagcagcttgcgatggagcaaggaacgcagattcacgatgtttttcaaggtgacaagatcggtcaattcaccgtactggcgccgtgcaagcagcgctacatcgactctatccctgacttcggcaagacaccagacagatactctgccgaagcaactgcagatggtaaattcggcctaataagagcactattggaaggcggaaagaagcttttggagaattgggatgttgaaacgctcgctaagagcacacgaacttcagcttccaacgagagctccgtcgttcagtacgcaagcctcgaagggaagggtgtgcttctgaccgcggatgtgggacctatcggtctagaggaagcggcagcgtatgcagctcaacttgggttggatagacctaggtttgttcaggtgccgcaccatggcagccgacataacgttactcctgccgttttggattcatggcttggctccaagaaaccgcccggaaccgttattggtactgcatactgttctgtgggatccaataaggctgactacccgcgcgcacaggtaaccaatgcgtttatacgccgggggttcaaggtgtatgctacgcgcacaaagtggctctcgcattcacacggtggaggccacccgaataccgtccctgcggttgcagaagtcttctcttccgaagtcgagcctgttccatga

SEQ ID NO: 531336 - DNA, 798 bp, Stenotrophomonas maltophilia
atgaacggcctcagcgccttcgacacctacgcactgagagcccgactgttccctgcgatcattgctgccgcgccggcgtttgccgcgttggctctgcttatttcgtggaagagctttgggctctcacaggtagtgtcttcaattggtcttttagtccttacctatgcaattgctgatgccgccagggcgcgtggccgagccatagaaggagcactccacaacgagcgcggggggttgccctctgtcaccctgtttagacgcagtgacctcaccatcagtagtggatccaaggaccgttatcgtgtctttctcggacatgtgcttggcattgatgttccaactccggcgcaagagcaggaatatcctgagatagccgatgatttctacgctcaatgcggcgtgtggctgcgccagcatactcgtgatagtcgacggttccggctgctatttggcgagaatgttacctatggatttcggcgcaacctgctgggcgtcaaaagaatcgcgctttttttaaatgccctcgttgtgctctgctgcatcgctctgctttggcgcattggatggacgcttgatacgggtcagggaagtcgcatcataatggtgttgctcgtagcaatcgcgcacgcggcatacatgctattggccgttaatcgagatgtggtatgggatgcgtcccgtgcgtacggacgcgaactcatcctgagctgtgaagcctttctgccgcgcccagaaaaagccattaaggcatccgtgcctgcacgagtacgccgtcgcggcggccgagcggatggctaa

SEQ ID NO: 531337 - DNA, 1434 bp, Stenotrophomonas maltophilia
atgaataggttctttagcaccgaatccacggagtccgaatacccgcagacggcatatgcgagggtcgatcagttcgagcccatctacttcgatgaggctgaagaagtgacgatcgcgtttgatgcgatggacgcaagctggcgagggttcagggagggtggcccgctggacctcaatagggcagaacaggaagtaaagcgctattggacgcagttgttcgaaggtggaggtgagatcgccgataaccccatagtttccggcttagacgaagtgcctctctatcggatcgagataaccgtccccacctcgcacgagtatgtaagcctgctgagggatggcgcgcagtgggttcagatcgagcttgctccgcgaggtgagatagaggccttcgtattcgcaggcgcctttgccaatccggtccaagcatggatagaaagcctgacccaaaaaggggtcccggctaccgctctggacagggtattcgacatgagcttgtggccgaaggccacagaagctcaaatttccgctgaactccccagaggatgtccgattgagcagttgctgatgcttgacatagggcaggggtcggcgaacgcgctgacttgcaagtgcggccttccgcgtctttactttgatgtgggttgtggcgtgtacgggaacaagaaaacgtgtccgccaggcattcagttctgtacgtgtgataagcctttggtgatcctctcgcattgggatgcagaccattggactgcggcaacgctggatacggacctgctgaagttgacgtggatagttccatgtcagaccatcagccaaagccacgccacattcgctgcatcgattcttgccgccggagggaagctcctgatttttcctccttacgggaccgtaacgtggggggcgcctcagctcgagatcagacagtgcaaaggcgctctgaacaacaagaacgaatccgggctagtccttatcgtaactaataaggaactcgacagaacttggttactaatgggagatgcgccatacaacctgattccaggcgatcttcctgagaacatctcggtgatagtggcgccgcatcatggcgcgaagatgtcgccaaagagtgtcccgccggcaaggcctgcacacgactacgcaaggttgctgtactcgttcgggccagggaacacgcatggcaagacaaaagtgcaacaccctacgatcgaatcggtcatcgtgcatcagagcgaaggctggaagcatggtagctgggtctccccgatgctgccatcggacccggggagtacagttgccggattagatggtgacgtgcttgctaccgctgtccatttggttgatcacatcggcggagcgcgagtgggctggctcggcatgccgagcgctccgattcacctgcttacgtgtggaaagaccatgtcgattccgcaaacctga

SEQ ID NO: 531338 - DNA, 294 bp, Stenotrophomonas maltophilia
atgcgggccgccgcaggggcgctgacgctgctcctgttggcgggctgtcagagcgacccggcgctgcacagcgcacggatcggtccggcacagctgcggctgcaggtcgatcgctgccacgtgatcgaccgcgcgcagctggaggatgacctgcgggccctggcttcgcggaagtgcccggcgggcgcagggacgctggagaacatccggtccctgccgagccagcagggcagcctgttcggcgaatgcctgcggcgcggggcgctgcaggccgagctgcgttgcctgccttga

SEQ ID NO: 531339 - DNA, 645 bp, Stenotrophomonas maltophilia
atggcatcacgtgagccgtccggcgcctcggctgtccgcgggtatatggtcgaaaaagggtggctgacatcatattggtcgggccgccgctcctcgattctgtccacgccacgtcctaggctgcccctacgctgtagaacgggcaacagcccgttgcagccatcaatggacgtaaaggaatctgatgtcacgatacttgatcgcaagcttggcgagcacatagcgcgcatacatccacgagagcatccgcgccagtggcctccgctcgaacacgacgggccaagaccttatcaaggaccggatccgccagagcattccgtctgcgtccatgtccgaccagagcgcggtgtcatggcgaattaccgagggcatgactacgagctgccactcattgtccgcaaagtcaatcatgaagcgcgtgtctatcccatacagggtcaagcgctcgtcaaatcgcggctgctgcaggtagccatagcgaatcaccattccgctggagatcgcaagaacatcctttggcgaccggacaccttgctgtggaacgcttacatgctttcccttgaaaacacggagacgccccggactgacgcatctgccattggactccacaacaggcaggaacaggctgcaggctgggttgcttga

SEQ ID NO: 531340 - DNA, 972 bp, Stenotrophomonas maltophilia
atgggcgttgatttagctgtaattgatgctcagatccagcctcagctgcaggagtcgtacgttaaccacaacgccgcgctttacaaagcccttcttcgtgagaaatcacgcttacctgcggttaatcaactttccgtgcgactgcagtccctgggcctgcagctagaacactccttcactgaaaaccaggacgaagttgaggcacgtagcgagtctctgacggccttcattagaagtcaaaaaaagactgagacagatgcgctacctcagaactggagagcgatcgtcacaagtgcatttgagaaacttgaggacttctacgacgttgaaccccaaaccctgatagacaaagagcaatacatcgctgccaaggcaaacgaagcccagagcagcaggcttatgcaatgccttgatgagctacatgctcttcagcaggaaacgaaggcggccagcagcgccaaagccaaggttaacagtctaaaaacagcactggaaaatgcagaacggaactattccgagcaaacgattgccgagatcgagctgatttttcatatctatagcggacgcctcatccagaactatcagcgcggcttaggcttatttattgaaagcaaggatggcaaagaactgcgattccaaacggccgagaagtcagagtatgatgcaattctgtcaatgagctccggccagatttcggccctcagcctcggttttttcctatcactaaacagagcttactccagcattcccctcatcctaattgatgacccttcccagtcgctagatgaagtaaatatcgcctcattgaccgatctacttcgttgcgaattcagcaatcgacagttgataatttcatcacatgaagatgatatttcctcgtacattcgctatcgattcgcgaaagctggcctcaacaccaaatcactgaacatgcagcgactagcgaaggatgcgctcggtaacgaagcgtag

SEQ ID NO: 531341 - DNA, 741 bp, Stenotrophomonas maltophilia
atggcactcgatcttgtcaattacgaagataaagctcgcgaagctgtaaaggcgttttggggaagccgcgaaatagcaaggcagaagcaactggaggcaggtaaggctgaccagggtgagcgtgcaggagttactgctggaaagaatatggacggatttctatccttgctgatagaaattattaaagctaacggtctagctcacgccgaaattcacttggggcgcgcaatgctagccctgccgggctattttcgcccaaccaagctatgggatgtgatcgttttatacaagggtcagctaattgccgctatcgaacttaagagccaagtaggtccttcattcggaaacaacttcaataatcggactgaagaggctattgggacagctcacgatctatggactgcctatagggaagaagctttcgggaagcaaccacgcccctttgtgggctggatgatgatggttgaggatgcaaaggaatcgcgtaagcctgtccgggattcttcacctcatttcccggtgttcgacgcgtttaagggcgcgtcctatctccagcggtatgacttgttgtgtcaacgtttagtccaagagcagctttacaccacagcttcagttattgccgcagagcgcagcgccgtgagcacagggcatttcaatgagctttcctcgatgactagtttgaggacgttcgtatctgctttagcaggtcacgtcgctggagaagcagctcgattgggatag

SEQ ID NO: 531342 - DNA, 1749 bp, Stenotrophomonas maltophilia
atggtccgacaagtagacgtcgtaaaaggcatgcacttcaaggttgcttctaaagccactgcgggccgcaaatccctggtcaatgctgcaactgaggcaatggcggtaggagcggatagcaaggcacgaggcgctgttttcacgcgccctgaggttgttgattttattctggatctgtctggttatagggaggatcaaccccttcacgagaagcggattcttgagccgtctttcggtcgagggcaattcttgtatccgatcattgatcgtctgctgaacgcatggatgtctgctagtccgggaggttccccattgaaccaactgggcgatgcgatccgggcggtagagctgcatcatgactcctttcgagaaactagagtcggcgttatcgcactgctcgtacatcgaggaattcccgctgaagaggcggaggttctggctgggcgctggctgtcccaaggggacttcctgctggtttcgattgagggagagttcgattttgtagttggcaatcctccctatgttcgtcaggagatgattccggcgccgttgcttgctgagtatcgcgatcgctacgttacgctctatgaccgggccgatctctacgtccccttcatcgagcgatccctttcgatgctagcgagtgctggagctttaggcttcatctgttctgatcgttggacgaaaaaccgctatggtgcgccattgcgacgcctcgtagccgagcgatttcacctcaaagtctacgttgatatggtcgatacctcggcctttcattctgatgtggtcgcctatccagcaattactatcgtcagtcgtgaaaagccaggtgcgacgcgcatctctcatcggccggaaatcgaccgaccagctttgacttcacttgcgagcttgctcttggctcccatgctgccgaaaggtagtagtgaggtgcgcgagctggaaggcgtaacgaatggttccgagccgtggctgctggggtcatccgatcaaatggcgctgatccggcgcttggaggagtcgttcccatcgctggaggaggcaggatgtagggttgggatcggggtggcaactggtgcagacaaggccttcatcggcgatttcgccgctcttgatgtcgagccaagtcgaaaactgccgcttgtgacgactaaagatatactaagtggcgaggtggtgtggcgcggtcaaggtgttataaatccctttgccgtatcgggtgggttggtaaatcttgaaaagttcccgcgattgcgtcggtacttggaggcgcggcggagtgtgattgttgctcgtcactgtgcgcaaaagaatccggaaaaatggtatcgaaccattgatcgcatcacgccttcacttgcagcaaggccgaagttattgattccagatattaagggtgaggcaaatgtggtgttcgaagatgggcatttatatccacaccacaatctttattatgtgacctcagatgactgggatcttcgggcattgcaagctgtgttgctgtcggctgtttcccgcatatttgtggcaacttattcgacaaagatgcggggcggatttcttcgctttcaagctcagtatctacgccgaattcgcatcccgcgttgggtggatgtgccaatgcccttgcgccttgagttggctgaggccgcaatcaagcgcgatatgcaagcgtgcaatcgcgcaacgttcgagctatatggtctgagttgtgaagaaaaatatgccctcggagaaggtggggaataa

SEQ ID NO: 531343 - DNA, 600 bp, Stenotrophomonas maltophilia
atgaacaaaattccttccgccctgatcgccgccgctctgcatgtggcccccaagaatgacgttcgcttctacttgaatggcgtgctgattgagtcgcacgccgatggtgcgatcatcgttgctacagacggccaccgcatgctggtggtgcgcaccagtctgccgtgggatctcggcaagatcatcgtgccgcgcgatgcgtgcgagctgatcgccaagatgaagggcgacgtcgatttcagcgctgtgggcgacgcgaagaggttcaaggcggatcgcggctgccaggccatcgagtttgccgccattgacggcacctacccggactggcgagctgtcgtatccaagccgaacgagttgaagccatctggctttgatccgtctgtcctcgaaggcgtggtgaaggccgccggggtgctccgcaaggcgttcggcggcaaggccacttcgctgatcccggtgactggcggcgatgtgacggcaatgttcgccgtaggcggcatcaccgatgcctacatcaggagcgccgctttcgtcgtcatgccgatgcgcgattcggcttacccggaagcactgtgcagcgacgcgctccgcgcttaa

SEQ ID NO: 531344 - DNA, 2448 bp, Stenotrophomonas maltophilia
atgatcgaactatcgcgcggcctttccttcgtgctctacatctacgagggaggccctacgcggttcaccgtgccgttcccgtacatcgcccgcgaacacatccgggcgttcgtcggtgaaccggactcggcccgcgctgtctccgtgtcgtgggtggacgcccgcaccatcgagattccgtcgcaggatggcgtgctcgacgcaccctacactgtgaccatccggcgattcacgccgattgacgccctcctggtcaactacaaggaaggcgcaaacctcccggcgcgcgacttgtccaagtcgttccgccaactgctgtacgcacaccaggaactcgccgagttcggtagcggcagcggcctccccggtggcggccccggtaaccccggcggcgacccggacctcaacgcaatcatcgagcagctcctccgctcgccagcactgcaagacctgctgacccgcatcgacctcatcgacgtgaacgccgaggcgatcctggaggagatcatgcgctcgcacgagttcttcgacgtgcagcgcgactacggcggcaagatcagcacggccacccacgagatcggactgctgaccgaaggcaacaaggtcatcgcgcagcagatcatcgacctgttcgcgcgggtggatcgcggggagcaaagcaaccaagcgcgcttcctggaggtcaaccgcgctatcgccgacgagcactctgcgcgcgtcgaggcgatcaccgagctgcaaggccaggtggtcgagaacggcaagacgatctccgctgcgctcaaccagcgcatcgacgaggtggagagcaccaccgaagcggcgcgtgcggccaccgagcagcgcctcggtgcggagatcgaggacagcgcggcgcaggtccgcacggcagtcatggccgaggttgacgcgaccaaggcccgcgtgtccgacgttgagacggcagtggtccgccacggcgagaacattgctggcctggccgagaccaccgaagccctgacggacgccgagggtgccaacacggcattccggcagcagatggcggcgagctacggcgcgaacgtgccgcaggggatcgccaatgagatcgatggccaggtgtcggcggtatcggctgccttcgagcagcgcatcgacaccgaagcgtccgcacgcgaagccctggcgtcgcaggtatccacgctggagaccagcaccgcgccgacgatcttctcggacacgcagccctccccgcccgctggcggcttcaaggttccgaccttttgggtcaagaccgggcagaccggggcgtacctcacgcagatttgggatggcaccggctggcgcaaggccgacctggatgtcacctctccgaccggcgcgctggtgcagcagctcaacaccaccaagatcaccgccgagcaggcacaggccatcgcggccacgcaggtccaggcgttcaaggacggcgacttcgccaccatccggcaggagttcaacgtggtcgccgggcagcactccggcatgtacggtcagtggcaggccaactactcggtcaagatcaacgcgggcaccatcaacggcgtccccgtggtcgccggtatcgccctctccgccaacccgcagaccggcagcgacttcatcgtcaccgcggatcgcttcgccttcgtccacccgcagtacacctcgggcggcaccctggcgagcatcaagtatccgttcgtgatcggtacggtcggcggccagtccaccgtgggtatccagggtgcgctggtggtggacgggacgatcactgcggacaagatcaaggtgaacgacctgtcggccctcacggccaatgcaggcacgatcaatggcggcaccttcaagacgcacacgctcgatggcaacggcaacgtggtcaacgccaacgagtttcgcgcggaaatgtccaacgtcggcgacttccccctgtgggtggggtcgggcggcaagaacggcaacaacgccgtcttctacgtggaccgctccggtggtgccaagttcgcgggcagggtcaacgccccgaacatcgtgggccagttccaggccgccgcagcaatcacttggtctggtgcagtcaaccttggtggcccgcgcgaggaagtcgaggtgatgcgcttctggcttcctgcgccgctgcttgccggggagcagcacatcccggcaatcaacctcagtatcgtccacgaccaagcctactgccctgtgtacgtactacagcagcgtgtcggctccgtctggctagacgttacccgcgcgggcatggacggcatctacgcgttcggatcgaccgcgatccctatgggccgctacgggcagatcagcggcgccggttatcagaccggctccgagtccgagtttcgccttctgattgttcaagacctcgacagcctgcgtaagaacggaatcgtccgctcggttcgcggctacgtatttggcattcgctaa

SEQ ID NO: 531345 - DNA, 198 bp, Stenotrophomonas maltophilia
atggctgacgaaaagcgtcgcgtcgagatcaagtacctacacaagaccgagcaggggacattcgtcgagtggggccgcgacgtcacctacgacgatggcaacaacgcaattcctgtaacccgcgctatcgttgagttggataacggtcaggtgatcctcgccgagccgccgcagattcgcttcttggaccggaagtaa

SEQ ID NO: 531346 - DNA, 627 bp, Stenotrophomonas maltophilia
  misc_feature (253)..(262): n is a, c, g, or t
atgcggctcacgcccccagccaacccacccgcccggccacggacagtttcctgcggccgccaccgcaggaagagaaagaagaagatcaaaagcaaagacaacagcaacagccgcgcgctgtgggttggggtcggatccgttttccgaaggaaaacggatccgaccccttcttgttttccgatacacctgatccacgcgtggcgtggatctactgccgtcaccgggaaattgtcggaggcgggggggggggggnnnnnnnnnngcccaacaccccgcgagcgcggtgggttggctcttagaagcaagagcggaagcagtgcggaccaacggtccgcacccaccagggcggcggcgggccgcctccgaggccatgaacccccgcttttgaccccgctttcgggcggtccggccgcgcccgcaggaaattgtcggaggcggggagggggccgatggcgggaccgtccacggcatggatgccgtggccgagcctacagggacgtacttgcggcgtgtcccgccatcggccccctccccgccagaccctcagagtcccagagccgcttttgctgttgccgttgcttgaaagaagcggtgcagccgcaggctgcaaacccccctcaatcctga

SEQ ID NO: 531347 - DNA, 1650 bp, Stenotrophomonas maltophilia
atggtgaacgcaaccacgtcgcatccccccgcacaggccgcaggcgcctggtccccgctgaagatccggatgtttcgctcgatctggctggcgatcctggccagcaacatcggcacctgggtcaatgacgtggccgccgcctgggtgatggccgagcgtaccggttcgccgttgatggtggccctggtgcagtcggccaccaccgtgccgattgtgctgctggcgctggccgccggaacgctggccgacatcgtcgatcgccgcaggtacctgttggcgacccagggctggatgctgctggtcgccgccgtgatggcgacgttgaccgcgatggacatgctgaccccgcagctgctggtgctgctgactttctgcatgggctgcggcgcggcgatggcgatgccggcgcaggccgcgatcgtgtccgaactggtgccgcagccgatgctggcctcagcggtggcgctgaactcgatcggcatcaacatcgcgcgctcgatcggccccgccatcggcggcgtgatcgtcgcccagctcggtgcggtctgggcgttcggcttcaacgccatcacgttcgccgcgatgctgttcgtggtgtggggttggaagcgcgacccgaagcagtcgagcctgccgccggagggttttggcgcagggttgaaggcgggcctgcgttatgccagccgtgccggacgcctgcaggccgtgctgatcaagtcggtcggcttcttcttctttgccgcggcgatgaacgcgttgctgccggtggtggtgcgtgggcagatgcacggtggggccgggcagtacggcatgctgctgggctgcatcggtatcggtgcagtgggcggtgccttgctgctgccgaagctgcgcgcgcagatggatcgcgacctgctggtgctgctggccacgctctcacttgcgctgaccctggtcgggctggcgctgacccgcagctggtacgtgctgccattggtgatgctgatcaacggttttgcctggatcaccgtgctgtcgtcactgcagattgccgcccagaccgcggtaccagcgtgggtacgcgcgcgtgcactggcgctgtacatcatggtgttctccgccggcatggcggccggtggcctgagctggggtgcgctggctcagcgtacctcgccggagctggcgttgctggtggctgccgcaggtgcggtgatcggcggattgctggtgtggcgcgtgcgcatcgccggtaccgaagacctgaacctgcgtccggccgggcactggccggcaccagagctgtcggtgccggtgtcgaacgatcgcggcccggtgctggtcaccatcgagtaccgcatcgacgatgctgatcgtgccgcgttccaggcgcagatgcgcgcgctgggcacgatccgccgccgcgatggggccgtggtctggggcgtggtcgaggatgtggccagcccgggcatccacctggagtatttcgtgaccccgtcgtggctggagcacctgcgccagcacgagcgcatcaccgccgacgacaaggcgacccaggaagtgctgcgggaactgcatcgcggtgagcgcgcaccggtggtacgccacttcgtgggtgggcatgacccgctgccgaagaccggggtcccgcaccaccacagcgacatctga

SEQ ID NO: 531348 - DNA, 1284 bp, Stenotrophomonas maltophilia
atgctcgtgcttcgcgttctgagcctggtgctgctggccgtgccatcgctggcgctggcctgcgagggtggccgctgcactgacgcaggtgacggccaattgcagtgggatgcctcactgcgcctgcgtggcctgtactacgacccgacccggttcggtattggtggcagcgaagatggctatggcctgctgcgtgcgctggcctcggtcacctatgtggaggacagctggcaggcaaagctgcagttgggcgcgcatgctgagaatggcaaggcaggcggccctggccgcaccgaccgcagcgcgctggacgtgcagcaggcgtactggcgctggcagcgtggcagcttccacctgcaactgggccggcaggaagccggctatggcagctcgcggctgctgtcggtgcgcgatgggccgaatatccgcctggccttcgatggtgcgcgcctggggtggaagggccgcctcggcacgcttgacctgatggcgctgcggccggtgcagaaccggccgggagccttcgatgatcatggcgaacacggtgcccacctgtggggtgcctatgccatcacggcacgcgggcagggcgcaggacagtgggatctgtatctgctggactatcgccgcgaaggtgcgcgcttcgcggcgggctccggcatcgaacggcggcagaccgtgggtacgcgctggttcggccagtccggttcactggactggaacagtgaactggtggcgcagggcggtgaactgcgcacctcggcagctacgctcgacatccgcgcctggacgctggccaccgacaccggctggcgctggacggacctgccgctgcaaccgcggttggggctgaaggcggacatcgccagtggcgatggcaatctgcatgacggccgcctgggaaccttcaacgcactgttcccgaaatcggcctacttcagcgaggccagcctgctggccccggccaatctgatggacgtccagccgaccctggccctgcgtctgcacgacgcggtgacgacggaactgggcgtacagatggcctggaagcatcgccgtgccgatgcggtctacaccacgccggcaccgctggtggctttgccgggcagcgccggtggcgcgcgccgcatcggcactcagtacaaatccgaaacccgctggcaggccagcgaacactggcaatggcagctgcagctggcctgggtcgatgccggtcctgcactgaagcaggccggtggccaggacacgctgttcgcctcgatcgttggagcatggcaatggtga

SEQ ID NO: 531349 - DNA, 1971 bp, Stenotrophomonas maltophilia
atgagtcacgatcccctcgatcacggccgccgcaacgtggtgctggccagcggtgccgctgttgcgctcagcctggccggtcgcgccggtgccgcactcgattccacttccaaggagcgtcgcatgagcacgctggtcatccgcaatgcccgcattaccacgctcgatccgcagcagccgcatgcgcaggcgctggctgtgcagcaaggacgcatcgtcgccgtcggcagcgatgaggagatcatgcgcggctggggcaatgaagcgaccctgatcgacgcgcagggccggcgcctgctacccggcctcaacgacagccacacccacctgatccgcggtggcctgaactacaacctggaactgcgctgggacggcctgcgctcgctgggcgacgccctggacatgctgaaggcccaggtcgaccgcacgcccgcaccgcagtgggtacgcgtggtcggtggcttcactgccgcgcagttcaacgagaagcgcctgccgacgctgcaggagctcaatgacatcgcgccggatacgccggtgttcctgctgcacctgtacgaccgcgcgctgctcaaccgtgccgcgctgcgcgcgtgcggctacagcaaggacacgccggatccgccgggcgggcagatcgtgcgtgattcgctgggcaacccgaccgggctgctgctggccaaacccaatgcgttgatcctgtacgccacgctggccaagggcccgcgcctgccgatcgaataccaggcgaactcgacgcgccacttcatgcgcgaactgaaccggctcggcatcacctcggtgatcgacgccggcggcggcttccagaactaccccgaggactaccaggtcatcgagcagctgcaccgcgatgaccagctgacagtgcgcatcgcctacaacctgttcacccagaacaagggcaaggaagtggatgacttccgtggctggagcgagatcctgcagccgcgccagggcgatgacctgctgcgccacaacggtgccggcgagatgctggtgttctccgcggctgatttcgagctgttcaacgagccgcgaccggagctgccaccagaactggagccggaactgcacgacgtggtgaagctgctggtcgagaagcgttggccgttccgcatccacgccacctacgacgagagcatcagccgcattctcgatgtctacgaacaggtcaaccgtgaggtgccgttcgatggcctgcactggttcatcgaccacgccgagaccatcaccccgcgcaacatcgaacgcatccgcgcgctggggggcggcatcgccgtgcagcaccgcatggcctaccagggcgaagccttcgtcgagcgctatggcgtgcaggccgcacggcatacgccgccggtcaggcgcatgctggccgaaggcgtgccggtcggtgccggtaccgacgccacccgcgtggccagctacaacccgtgggtggcgttgtcctggctggtgaccgggcgcaccgtgggcgggctggccctgtatggtgatgagaacctgcttgaacgcgaacaggccctgcgcctgtggacccagggcagcgcctggttctccggcgacgaggcggtgaagggcacgctgaaagccggccagctggccgacttcatcctgctctcggccgacttcttccgcgtcgacgatgcgcagatcgccgacatcaccagcgtgctgaccgtggtcggtggccgcatcgtgcatgccgacggcgactacgccggcctggcgccgcagctgccgccggcgatgcccaactggtcgccggtcaaccggttcggtggctaccatgtcggcggtgctgccaccgggttggccgccgcccatcgccaccatcacggcgtggcctgcagtacgcatggtgctcacggtcatgccgcgcaacatgcggcgcccaccgatgacctggccgccttctggggcgcgatgggatgctcgtgcttcgcgttctga

SEQ ID NO: 531350 - DNA, 426 bp, Stenotrophomonas maltophilia
atgctggctggccatggcctcgacctggccctgctgatgctgcgcgtggcggctggaggcttcctgctgccgcacgcgctgggcaagctgttcggctggttcggcggtccggggctctctggtttcgccaccgagctgcgcggcttcgggctgccagcggtggcacctttgccactgttgctggccctgttgcaggtgctgtccgggctggccgtgctgctgggatggcagacccgtatcgccgcgcttgcggcggccgctttcatcggcttcaccgtcctgttggccctgcccaggggatggttctggatgcgcggtggcagtgagtacccgttgatgtggaccacggtactgctggccatcgcgctggccgggcccggcacctgggcgctggacgtccaccgacttccgggagacctcgcatga

SEQ ID NO: 531351 - DNA, 657 bp, Stenotrophomonas maltophilia
atgagccttgccaccgccactcccgccccggcgctgctgtcgccgaccgaccacgccctggtgctgatcgacttccagtcgcagatggcgtttgccacgcacaccatcgacatctccgcgctgcgcaacaacgtgtcgctgatcagcaagggtgccaagggcttccacgtgccggtgctgctgaccacggtggcggaagcctcgttctccggcccgatgttccccgaactgccgcagatcttcccgggccagacggtgttcgaccgcacctcgatgaatacctgggaagaccagccggtgatcgacgagatcaaccgtatcggcaagcgccggctggtgatggccggcctgtggaccagcgtctgcatcgtcggcccggcgctgtcggcactggcgcagggcttcgaggtatatgtgatcaccgatgcctgtggtgatgtcagcgaagaagcgcacgagcgtgcgatcacccgcatggtgcaggccggcgcggtgccgatgaccagcgtgcagtacctgctcgaactgcagcgcgactgggcacgcggggaaacctacgacctgaccaccggcatcgcgcgcgatcacgcgggtggctatggcatcggcatccagtacgccaagcgcatgttcggcgcgcaggaaggcgggcactga

SEQ ID NO: 531352 - DNA, 462 bp, Stenotrophomonas maltophilia
gtgcaggcgccccgcaccatgggccaccccctcgcggcgacctcgatggccaccgttactccacaggaattccccgctgcgtcgctggcaccacagcaggtcgcagcattgcagcgtgcattgcgctatgtcgatgaacacctgtcgcagccgctgcgggtgaccgagctggcggcggccgcctgcgtcagccgcttccatctggtgcgcctgttccgtaccggtaccggtgccagcccgttgcgctatgtgcgtcgccgccgcatcgagcgtgcgcgccagctgctgccgggtgcgcagttgccgatggcctgcctggcccagcagctgggcttcttcgaccagagccatttcgtccgcagcttccgcgcggagaccggctgcagccccggccagtacgtcgccggcgatgccgccctgttgcttccccttgatcgtgtttccaacggagtccatccatga

SEQ ID NO: 531353 - DNA, 333 bp, Stenotrophomonas maltophilia
atgcagcgcctgttcgtgatgtttcccgaccgtggcccgggcctcggcctgctgtggctgcggctgtgcgttgcggccgctctttgcgggcccggtatgccaggcggctggtggtcggccttgtacctgctggccgtagcgatgctcgcacttggtgtgctgacaccactggcggcagtgatggcggccgtgggtctgtccacgctgcccgggccttggccactggcgctgctgcctctggccctgctggtgctggggccgggcgcctattcgctggacgcacggctgttcggtcgccgcgtgatcggccgccggcctcccccattcgggtag

SEQ ID NO: 531354 - DNA, 3021 bp, Stenotrophomonas maltophilia
atgcgtggccgccccttcccgttcctgcgtcgcctaccggcgctgctgacgtgcctgctgttgatgaccgccctgcccgcgctcgccgtgcagcgtcccgccctgagcagcggactgcccggctacgagcacaccgcatggcgggtcggccagggtgcgcctggcgatatatgggacattgcgcaggaccgtgatggactgctgtggctggcgaccggttctggcctgtaccgcttcgacggccgccgttttgaacgccaggcgccaccaccgggcagcagcttcccgtccaccaacatggtcaccctggcagtcgggcgcaatgacgcaatgtggatcggctacttccaggccggcatcagccaactcgcacgcggccaactgcacaactacggtcggcaacagggcgtaccggtcggcgtggtgccgcacttcagccaggaccgcgagggccgcctctgggcagcgatcaatggtgggctgcgctggttcgatggccggcgctggcaacccccgccggcctccgccgggctgccggaacaccgcgtgcaatgggtgttgcatgacagccgtggcacgttctgggtactggcggatctgaagatatggatgcgcggaccccaccatgcggccttcattgataccggcatcgccgtctcgcagatggcaacactggtggaaaacccgcagggtgaggtatggctggccgaccgcgtccgtggcgcctcgccactggcaaacgcacatggtctgctgaccgggcccgaacgtgaggcgaggcgcctgcccgacctggtcgctgcccgcatgcagttcaccaccgacggcgcgctgtgggcgacgatgagcccgcatggaggcgtcgcccgggtcacgttcgacggcacccgagccgtgcgcatggagcgcttcgattcaccgcatggcctgacggccacctcggcggtgccgatcatcgccgaccgcgaaggcaacctctgggtaggtaccaatcttggcctcaaccgcttccgcgcgcgcagcgtgcacaccctggcggtcggccccagtgatccctaccgctcgctggtgcgcaccactgacggacgggtgtacggctacggtgaagacctcaagccctacgacctgcggcggtccctgctggaaggcagcgccgcacagctgcaggccgcagcgcggcaggcacctgcgccgatctggcagttcgattgggtcaatctggcgcgcactgtcgaaggccgtaccacgctgattccgctgcccgcgccgttcaccgggcagccgctgcacgccctgctgtttcctgacgagacgcaggcctgggtatgcacgggcgaacgcggtgtgctgcattaccgggacgagcaatggcagcgggcgagtcgcctgcccgagcaggcctgctcctccctggcgctggacgcccatggccagctgctgctcggctacgccgatggtcgcgtgcgccggatgggcaccacgaccatcgatgccttcggcgcagcgcagggcctttcggtagggccggtgaccgccctgctgcagcatcaggacctgctgctggtagccggcgaagccggactcgccgcacgcatcggcgaggggcccttcgttgcagtgcgcaccgacatggccggcgtcctcgaaggcatcaccggcatggtcgccgatgcgggcgggcatctgtggctcaatggcagccgtggcctggtgcgtcttgagagcagcctgttgcgccgagcaatgcaggcagggcagcaggtgacgccccgcctgttcgatgcggtggatggcatgcccggcattgccctgcagagcgggccgatcgccaccgccaccctggccgacgacggtcttctgtggctggcgaccaaccagggcctggcctggctggacaccaagcgttcgcacgtcaacacactggcacccagcgttcgcatcggcgacgtgctgtatggcagcgaacagcaaccactgcgggacggcctgcgcctgccggccggcaccagccagctgcagatcgactacgtggcgctttcactggcccgcccggagcgcaaccgctatcgctatcgactctccggcgtcgatgacggctggcaggacgcaggcagcagcacccgcgcctattacaccaacctggcgccgggaagctatcgcttcgacgtggaagccgccaatgaggacggcatctggagcacggtcccggccagccgcagcttccgcatcgcgcccaccttcatccagaccgtgtggttcaagctgctgtgcgtggccgccgtgctggcgctgctcgtactggccgtgcgcatccgaagtggccagctcgccgcgctgttccgtgcgcgcctgcaggaacgcaacggcgagcgcgagcgcatcgcgcgcgacctgcacgacaccctgctgcagggtagccagggcctgatcctgcgcctgcatgcaatcagccagtccgcgcagacgccagaagcagtgcgcggccagctggagtcggcgatgcagctggccgagcgcaatctggccgagggccgcgaacgcgtcaacgcattgcgcgacggccctttcgccggccgcgacctggcttcggcactggccgatgtgcacgccgagtacgcggggcatggcaccaatcctctgcgcctgaccgttgagggcgcgacgccaccactacaggccgatgccgcggaggaagtgttcctgattggtcgcgaggccatccgcaacgcgttgcgccacgccaacgccagcgccatcgaagtggagctgtcgtacggcacgcgttgcttcctgctgcacgtgcgcgacgatggcgtcggcatcgccgacgagaacgccggccatggtcattggggcctgcagggcatgcgcgaacgcgcacagcgccttggtgcggaactgcagctgtggacccgcgccgggctggggaccgaagtcgcgctggcggttcccgcccggcgcctgtatcaccgccgcccatcgcgttggcgctggccctggagtaaagcaaaccatgactga

SEQ ID NO: 531355 - DNA, 654 bp, Stenotrophomonas maltophilia
atgactgagtcccctgccccgatcggcgtgctggtggtcgacgaccacccgttgctgcgtgacggcctggcggcgctgctgggcgcccattccgacctgcgcctgctcggcgaggccgccgatggcgaggaagccatcgcacgctaccagcagctgcagcccgacgtggtgctgatggacctgcagatgccacgcctggatggcgtcgaagcgatcgtacggatccgcgcgatggacccacgtgcccgcatcattgtgctgaccacctaccgcggcgatgtacgcgcggtgcgggccctgcaggcgggtgccagcgcgtacctgctgaaggacatgctgcgccacgaactggtcgacaccatccgcatggtggccggtggccgccgtgcgccgattcctccagcggtggctgccagcatcgccgcgcatgtgatcgaagaccgcctgtcaccgcgcgagaccgaggtactgcggcacgtggccggtggcctgtcgaacaagcgaatcggcgaacgcatgcagatttccgagcagacggtgaaggcccacatgaagagcctgatggacaagctgggcgtgggtgatcgcacgcatgcggtgacccaggcgctgaggcgcggcatcatcagcctggacgacagcggtcacgattag

SEQ ID NO: 531356 - DNA, 666 bp, Stenotrophomonas maltophilia
atgatcatggacctgatccatcaagcgctcattgcacacgacttctccgaagttcatgaagatgacgcgtctcgcttctatattagagaaagtgggccagcgatacgatttgccattttgcacaggcttgataacctaacgaagcctggcgagctcaatgcggtgatcaatcattccgcaccagccgcgttcacgaaagaccctgcatttagaaagaactgcgaccttatctgcatccatcatctcggcaaacttgctgagtttaaaaattatgaagagcagatttttgagatcgaagaggatcctcacttctacaagaaatatgtcctgtactacagcgacgctgaacttgaagcaattagagatttaagcttcgacaaattaaaagaattgatttcagacaagaagcagttcgatacctataaatgcaacccgctagccccttcaaaatacggcgcggccgccaaaatattcatcaaactaccgttcctaaaacttcacatagacaaatccgaactgattccacttcgacttcaaattgaagaggtagtcgaggaaggaaagctaagcaagatctacgaaacaatacggaaattcgaccaaataggcgcagaagatttaatcaaggaactgattgatgatgagctggaaaatctcaaagattga

SEQ ID NO: 531357 - DNA, 1227 bp, Stenotrophomonas maltophilia
atgagcaacgaggaagcaagcgattatccgcatagcgccatctcaacttggagcggatttgtctaccaaggcaaggttgctctttaccactgcctaagattaattaacgaaggccacggcgaatttgagctccagctagatagcacagatgatttcgctatttatagcctcggaaagctagtaagcgcccaccaagtaaaggcaaaaataggagattatcgcagcaattataaggaggcgctaacaaaatcagcagcgatacatctcgatagagtcgccggaaccaaaagatactttcacatatctcaagccatagacgaccactccgactatgtagactccaataatgagcgcgtggaattctatacttatggcgcgcaccgtcattgcgagctagacaaaatagagagcctaacaaaagatataatcaaagaaatatatgatcgcgacaaaattatctatgacgacgatcttatcggcgcaaactattgcctattgtcggacgggataagctccaaagcaatttatatccacgcgaaaatacagaatgaaggcaacactcaacgccgcgcagcttacgaccatcgaatatcgtccagcgccattatcgatgaattgaagaacacgaatccctacgacaggaaagactattatgcaattgaattaaagttccgcctcagcaactatctagaagaaaggcttgccgactcactctcaggaatgtcggattccgcctacgaaagagctcgacgcatccatgagcacattagactttctgatggcagtgacttcaagacactctgccagctaatgaagccgtcagagaagttttctcgcatccaaaactcagacatacggcgatattctgacttagtacatgctattcgcgcagaaccaattctaaagagactgcctcactattcggattacgagaacaagttttatgttccaacagccctatccctaccagacccaaaagacagtaagtactgcacttcagaaataatatcagaaataaagaataatgaagatctagggcggctgctatttgagttcaacaaccttattgcagcagaagccaatgagagtttcacggttgacacaaaatataccagccacctagatgtaatttcgacaacgtctcaagagaaatcggatagcaatataacaaaaagcctatgcgtaagcattctgaaaaaggacgacgcggaggtacgccttaaatga

SEQ ID NO: 531358 - DNA, 327 bp, Stenotrophomonas maltophilia
atggataatgtctacatcgtctttgctgaagaagaaatcacgttgagcggaatgaatggtcggaaggtgctgctggcaacctttctcgggagcaaacacccacctgacgatgttcggccctccgaagactactggagattgatcggtaccaacgggaccattgttcttgaggaatcccaaacgtccatggccaggcatcaacgcggcttgcgggtgctggtccagtttcctggaagcatcacggatatggggcttgcgtgccacaacgaagtgccggacagcctttggattttcgtctccgaccttgaaatccactcgggtgattga

SEQ ID NO: 531359 - DNA, 738 bp, Stenotrophomonas maltophilia; identical to SEQ ID NO: 332893

SEQ ID NO: 531360 - DNA, 423 bp, Stenotrophomonas maltophilia; identical to SEQ ID NO: 332894

SEQ ID NO: 531361 - DNA, 1233 bp, Stenotrophomonas maltophilia; identical to SEQ ID NO: 332895

SEQ ID NO: 531362 - DNA, 738 bp, Stenotrophomonas maltophilia; identical to SEQ ID NO: 332905

SEQ ID NO: 531363 - DNA, 195 bp, Stenotrophomonas maltophilia; identical to SEQ ID NO: 449943

SEQ ID NO: 531364 - DNA, 918 bp, Stenotrophomonas maltophilia; identical to SEQ ID NO: 449944

SEQ ID NO: 531365 - DNA, 933 bp, Stenotrophomonas maltophilia; identical to SEQ ID NO: 449945

SEQ ID NO: 531366 - DNA, 981 bp, Stenotrophomonas maltophilia
atgagccatcaactcaccttcgccgatagtgaattcagcactaagcgccgtcagacccgaaaagagattttcctctcccgcatggagcatattctgccatggcagaatatgaccgctgtcatcgagccgttttatcccaaggctggtaatggccggcggccctatccgctggagaccatgctgcgtattcactgcatgcagcattggtacaacctgagcgacggtgccatggaagatgccctgtacgaaatcgcctccatgcgcctgtttgcccgattatccctggatagcgccctgccggatcgcaccaccatcatgaatttccgccacctgctcgagcagcatcaactggcccgtcaattgttcaagaccatcaatcgctggctggccgaagcaggcgtcatgatgacccaaggcactttggtggatgccaccatcattgaggcacccagctctaccaagaacaaagagcagcaacgcgatccggagatgcatcagaccaagaaaggcaatcagtggcactttggcatgaaggcccacattggtgtcgatgccaagagtggcctgacccacagcctagtcaccaccgcggccaacgagcatgacctcaatcagctgggtaatctgcttcatggagaggagcaatttgtctcagccgatgccggctaccaaggagcgccacagcgcgaggagctggccgaggtggatgtggactggctgatcgccgagcgtcccggcaaggtaaaaaccttgaagcagcatccgcgcaagaacaaaacggccatcaacatcgaatacatgaaagccagcatccgtgccaaggtggagcacccgtttcgcatcatcaagcggcagttcggcttcgtgaaagccagatacaaggggctgctgaaaaacgataaccaactggcgatgttattcaccctggccaacctgtttcgggtggaccaaatgatacgtcagtgggagagatctcagtaa

SEQ ID NO: 531367 - DNA, 1515 bp, Stenotrophomonas maltophilia
atgaaggaagtggatcggttaaagaccattgaagcccttgcagagggtagattgactgccagtatcgcggcacaacgcattaatctgagtaccagacaggtctacaacctgttggcgcgttatcggctggaggggccgctaggattacgatcactgcgcgttggtaagcccagtaatcaccagttgccgaccggcatgaaggaactagctgggcaactgattttacagcattaccccgacttcggccctaccctcgcagcagaaaagctggtcgagctacacgatctccaccttgccgtgtctacggtacgccagctgatgatcaatatgggactatgggtgccacggcgacaacgccctccaagaatccaacagcctcgctaccggcgtgcttgcttcggcgaattgatccagatcgatggttgtgatcatcgatggtttgaggaaagagggcctacatgtactgccatcgtgttcgtggatgacgctactagccagatcactgctctgcggtttgtgtattccgagtctacattcgcctattttagtaccttgcgcgatcatctgagcgcacatggcaagccactggccctttacagcgacaaggccagcgtttttagggtgaatcacaagtcctcccgtggtgagggacaaacacagtttgcgcgagccctggacgaactcaatatcgaggggttctgtgctcatagcagtgcagccaagggacgtgtcgaacgtgcacacctgaccttacaggataggttggtgaaggagttgaggttagctggcatcagctcgatagacgatgctaataaatggttaccggactttatcgctgattacaaccgacgttttggcaaagctccattgcatgaactggatgtacatcgccccttgagcccacatgataatctggatcatatcctgctttggaaagagccaaggctgatctcaaaacggcttacgacgcaatatgacaaggtgcaatatctgttgatggatacgccttcccaacgccgtctgattggacgagaaattgtggtttatcactattgcgatgatcgggttgaattacgtggccctgatggcaacctgttggattactgcattaatgatcggcttgcaccggtcaatcagggggctattgttgataacaagcggcttggccacgttttgcagatggctcaggaagtacagacgatgcgggatgatgtgcgttcacgtagcttgccgaacaccccgacagccaaccgacgtcgtgggccacatccagacaaggtaaagccgaatcgactgggggaagaacagtattacaaggcgctgttggatgtcagtggtgaacggatggaggcacaattagataggctagaacttgccgatattgccaatgaagctacacagacagcggtaaaacgtaaacggggaaggccacaaataacagggccaagagatgaatctccgtcaccagttgttcaagatgcgataaacctgtggcagcagagagcacgatcataa

SEQ ID NO: 531368 - DNA, 195 bp, Stenotrophomonas maltophilia; identical to SEQ ID NO: 449943

SEQ ID NO: 531369 - DNA, 918 bp, Stenotrophomonas maltophilia; identical to SEQ ID NO: 449944

SEQ ID NO: 531370 - DNA, 933 bp, Stenotrophomonas maltophilia; identical to SEQ ID NO: 449945

SEQ ID NO: 531371 - DNA, 981 bp, Stenotrophomonas maltophilia; identical to SEQ ID NO: 531366

SEQ ID NO: 531372 - DNA, 1515 bp, Stenotrophomonas maltophilia
atgaaggaagtggatcggttaaagaccattgaagcccttgcagagggtagattgactgccagtatcgcggcacaacgcattaatctgagtaccagacaggtctacaacctgttggcgcgttatcggctggaggggccgctaggattacgatcactgcgcgttggtaagcccagtaatcaccagttgccgaccggcatgaaggaactagctgggcaactgattttacagcattaccccgacttcggccctaccctcgcagcagaaaagctggtcgagctacacgatctccaccttgccgtgtctacggtacgccagctgatgatcaatatgggactatgggtgccacggcgacaacgccctccaagaatccaacagcctcgctaccggcgtgcttgcttcggcgaattgatccagatcgatggttgtgatcatcgatggtttgaggaaagagggcctacatgtactgccatcgtgttcgtggatgacgctactagccagatcactgctctgcggtttgtgtattccgagtctacattcgcctattttagtaccttgcgcgatcatctgagcgcacatggcaagccactggcccgttacagcgacaaggccagcgtttttagggtgaatcacaagtcctcccgtggtgagggacaaacacagtttgcgcgagccctggacgaactcaatatcgaggggttctgtgctcatagcagtgcagccaagggacgtgtcgaacgtgcacacctgaccttacaggataggttggtgaaggagttgaggttagctggcatcagctcgatagacgatgctaataaatggttaccggactttatcgctgattacaaccgacgttttggcaaagctccattgcatgaactggatgtacatcgccccttgagcccacatgataatctggatcatatcctgctttggaaagagccaaggctgatctcaaaacggcttacgacgcaatatgacaaggtgcaatatctgttgatggatacgccttcccaacgccgtctgattggacgagaaattgtggtttatcactattgcgatgatcgggttgaattacgtggccctgatggcaacctgttggattactgcattaatgatcggcttgcaccggtcaatcagggggctattgttgataacaagcggcttggccacgttttgcagatggctcaggaagtacagacgatgcgggatgatgtgcgttcacgtagcttgccgaacaccccgacagccaaccgacgtcgtgggccacatccagacaaggtaaagccgaatcgactgggggaagaacagtattacaaggcgctgttggatgtcagtggtgaacggatggaggcacaattagataggctagaacttgccgatattgccaatgaagctacacagacagcggtaaaacgtaaacggggaaggccacaaataacagggccaagagatgaatctccgtcaccagttgttcaagatgcgataaacctgtggcagcagagagcacgatcataa

SEQ ID NO: 531373 - DNA, 1248 bp, Stenotrophomonas maltophilia
atggacataaaaaaagcacctcaaggtttcacgcgccgccgtaagctgctgacggcggcactcgtttcagtgctgtttttggccgcgatcgtgctggcactattaggcaaagcaccaccatcaattggcttggacgatatttggatagacagcgttgtccagggagagatgaagcgtgagatcagggctagcggacgattggtgcccaaagacatcaggtgggttaccgctggtgccaccgcaactgtcaagagagtggtcctgcaaggcggcacacaagttgtcgctacagacaccattttggagctcgagaatccggaagtgtcgacgaacatgatcaaggcgaaggccgcttacgttgcagcggtagcagatactgccgcccttcgagcgtcgctcgcctcacagcttatggatcaaaagtcggcagcaattcagtcagagtctgagtctatggctgcgactgtaaaggcagatgcgcatagaaaggcgtttgctgcgggaattctttcatcggtcgaacttaagcagacggagattgctgagcagcaagctcagcgaaaatcagccatcgaaagggagcgggtgacagcgtttcaacgaaacatggaagcacaactgcgtgcggcgaccgcaagaaatgaagaggtaaagagttcactagatatagcgaaccagcaggtgtcttctctgacagtcgccgcgggcatcaacggaacgttgcaacatgtcgaagttgaagaggggcaacaggttgaaagcggcgccaaactcgcgcgagttgcacagcccgacaagctaatcgctcgactgctcgtgccggagatgctcgctacaggagtaatccaaggtctgtcagcggagattgatgtccgaaatggtagcgtccttggccgcattgcacgtgtagatcccgcagttcgcgatggcgccgttacagtggacgtcgaattaccagcagaacttccctccggggctagaccggatctttccgttgaggggcgaatactgctaggaacgcttgctgacgctgtatcgattggcaggcccgcgctcgccgctgctgatagcacagggcgcctattggtcctggacagtgctggcgcacgcgctcactgggttcctgtggaatacggtgccgcttcaagcgaccgaatagaggtgcgtagcggtttgaaacccgggcaaaaggtgattctctcagacgcaacacgttgggcagactacgaagaggtgcgcatcaaatga

SEQ ID NO: 531374 - DNA, 774 bp, Stenotrophomonas maltophilia
atgagcaacgctagcatcaacctgcatgcagaggagccgtttatcctcctctcagaggtaaacaaggtatttcacactacagagatagaaacgcacgccctctcttcaatatccctaaatattaatcggggagagttcgtcgctgtcacggggccgtcaggctgcggaaaatcaacactcctatcaattctcggcctcttggactcgcctgacgagggaaagtacctcatcaacggcgaggaaatgaccgggacatccctcgccaaacgaacggtaatgcgaaacagccacatcggttttatcttccaatcattcaacctgatagccgacctgactgtaatagaaaatattgccctgcctcttacctatcgcgctaattatgatcgaaggactgcgcttgaaaaagctgaccaagctctagagctcgttggcatggcgcatcgccggaaacactatcctggtcaactgtcaggcggacagcagcaacgcatcgctgtcgcacgagcgctagttggcgaacccgctctacttctggcggacgaacctaccggaaacttggacagcaaaaatggcgagtctgtcatggagttgttatcaaatctgcatgcgtcgggctcaacaatctgcatggtcacgcacgatgcaaacttcgccaagcgcgcagaccgggtgattcatatgctagatggacagatcgtcgatgaggatgaggttgctcgcagtggtcgaatagcgccgtcccaggccttgagtattgcggagcaggcgagatga

SEQ ID NO: 531375 - DNA, 2439 bp, Stenotrophomonas maltophilia
atgataaaggcagacctaatcactgatgacgccctgcaaagctggcgcgcgctcttccgtcgaccgggctatctggcacttgtaagcttaacgctggctctgggcatcgccaccacaacaatggtgactgcacttctggaccagacggtttttcgtgagctgcccttccccaacgcagataagctcgtcaccctcggggtttcctccggagagggaacgacctacgggtcacctggcctctacaatagagctaaggagttccagacacttgaatcaacgggactagttcaagcctatacgcgcaatgtaaacgcggtcgtcgacggtgagccaagagttcttacatcgctgggcgctgatcgtggcttccttgacacgatgggccttctcccgacattagggcgtaactttttagagtccgaggatactaggaatggtgcagatgcagtgatcattagcaacgatatttggcggcgtcacttcggcgcagcaaaagacgttgtgggtcgtagcatcgtgattgaaggacgcgaggtcgcaatcgttggcgtcttgtccccggcgtttgtgtggccagatacctttgatttgattacccctctgcgcaacgatcctacaagcaacagcctatcgataaatgaatttattgtggggcggttatccggatcgcaatcaagatcacaattggttgcagagcttcaaacgcgatttcgcgcgtatctcgcgcagttaggtgcatctaaaggggggagagcatccgcccgtcagatggagtttactgcaatcgatctgaacgacggaatattcgtgagccgttccggcaacgtgccatggatgttccttgcagtcgcaggatgcgtcctcgctatcgcacttatgaacctcactaatttgatggttctcagagcaagctctcgcgcacatgactcggccatccgcgccgcgcttggcgcaacgtcttcccggctgctcgtgccccaactttccgaggccgtgcttgtcggattgatcggtggaattgccggcatcgcaattgcttggctagggctgttactcctcacccctcagattccgctcgaatggactcaaggtagaacggtggggcttgggtcgtttacgatagtcagtaccctgctcatcgcccagttaaccgcagttagcgctgccgtgataggaaatgccaggctgaccaagtcgctccccgccagtatcttcaacgaaagtcggagcggattggggcgtggcgccggtagactcgcgagaattctaatcgtctttcaaatagcggccgcgtctgttctcctgctaacagcggcgctgtttggccggagtctgcaacagctgtcctccgtccccatgggattcaagagcgattcgatcacaaccttttcgctgtccccaattcagcttgaccagccggatattgatgcggtccttcagcaacaacgacgcattgtggaaatgctgtcggtgcagcaaggtgttaaaaatgtcgccgcaagcacgaacctcccaacgggatcccagttcaactacaacatgcaactccccagcgggcaggaaattagtgctcagttccgccccataacttctggcttcttcgatgtcttctcaatacctctgctgtccggcagaacgtttacggatacacaggacagggctgactcgccacgagcgtgcatagttagctactctttcgcaaagtcatatctgacaggaagtccgttgggacagatgatcacgctacccgacgaagacggaattgcacagacaatgcgtgtggtaggcgtggtgggcgacgttcgtcagctgggcccaagtgagcctgcacctcctatcatctacatccccctcgcccaggttacgcagacgctttgggtaacaatcagggacttcctgccactgcgctacgctgtcctcttacaaccaggctctgctactgaaatccgccacaagctgcccaggctgattgcctctacctcgaatcagcagcccatttcacacattgagagcatggatcatgtggtgcgatcgaccacctcgggacagaggctcaatgtaacccttgtgtcgatcttctcgatattggcgctcgttctcgcttgtgttgggctctacgcggtgctcgcctactcaatagcggctcgcagtcacgagttcggcgtgcgtgcagccctaggggcgagcccaagccacctgcttttacaggttcttaaggagagcgggaaacagttggcctacgggctagcgattggtatcgctgtttcgatggcagtgtccaagctggtccagcgcttcctgtttcagacctcctcagcagacatagctgccttcgcgcttgtgattgtgacattgacccttgcttggctggctgcgagcataggtcccgcacgacgcgcctcggctgttgatcctatgaaagtacttcgggagagctag

SEQ ID NO: 531376 - DNA, 1479 bp, Stenotrophomonas maltophilia
atggacgccgccctggtggtgaagcggacggggctatacgcctcgtccgcaatgcttcatcgtcgccatacagatgcagaactgatagcaatgacacaagatatcccaagacctctcatactcgtcgcggacgacgaggaagacatccgtagagcgctaggccttctacttaagggcgctggtttcgccatagtggaggccgcaacgccagccgaggcgatcgagaaggctgagtcaaaccaagtctgcgcagccttggttgacatgaacttccagctcgacaccacatcgggccaggagggcgtggatctggtttctcgcctggccagcagctatcccgatctacctattgtcgcgatgacggcctgggccagtgtggaggtcgctgtagacgcaatgaaagcgggagccgtcgacttcattgagaagccttggaacaacgctcgagttctagcggtaatcgacggaagggtcaagcttcgtcaaagcatggtagagaacgaaaaattaacccaagcgcagcgccttcggctatctgaggccagcccgtttgtggtgtcgcggtcggaagcaatgcggtccttcctgaggaagtggtccaaggtcgcaacgagtagcgcaaatgtgctcattctcggtgagaacggcacaggaaagtctatgctcgccgccatgatgcaccgggagtccccgcgctgtgacgctccgttcgtaaaagtggacgtggggggattggctccctcgctgtttgaaagtgaactgtttggtcatgtaaaaggcgcgtttacagatgccaagtcaaatcgcatgggcagattcgagctcgccgatcggggcaccctttttctggatgaaatcgcaaatttgggcttggaccagcaggcaaagatacttcgagccatcgaggatggctcattcgagcgcgtcggttcctctactacccaacgagtagatgtcagaataatctccgcaacgaacgccgacctaaacgagcgcgttcgcgttagggaattccgagaggacctcctctatcgtctcaaccctctccaacttcacgtccctccgcttcgtgagcgaggagaggacattaacgaactcgcaacaaacttcttagacgctgcggcgttgcgatatcaacgaggaaagctgaggctgaatgaagcggcgtccgaagcgctgcgtgcatacgagtggccagggaacgttaggcagctcgctcacgtgatggagcgggcagcactattgtgttccacgcaaaccgtcgagccggaggatttgcagcttgatacaagtgtgactaaagcaggctcagctagtagcgagaaggatctccatgggctcactctagacgatgctgaagctgaactgctacgtcgagcacttcgggatcacaagggaaatatccagcgtgcggccgatcaactcgggatcagccgacaaagcctttatcgaaaaatgagtcgacatgagcttgcgtaa

SEQ ID NO: 531377 - DNA, 1320 bp, Stenotrophomonas maltophilia
atgagcttgcgtaagttgcggcgcagtagtccctcctccgcgcgatatgccctggttgctgttcccgccacgcttggattagtgaccgttctagtcgcaggagctccgcccttgggcccgtcgctaatactgttagtgctggtcgcaaccctgactatagcgcttgccaagtcattgggggcacgcgagcagcacgatgagcgaaccctactcacgctacttgaatcgatccgaaaaggaaacgtcgcaattcgggcaagcatacagaagggagggaacacatactaccgaattttagaggaggtcaatctccttgcgacagctctccagcaacgacaggttgccgagcgtgaagcccagaatctcgttcgcaagacactcgcagcgcttgatgcgggggtctatttgtttgaccacgaacagtgcctgaaaatgactaacctggcgggagccaacattctgcgatcaactgagaagaatctgatcggcagaagcgcctctgatctttccttggctaggctcttcgacgtgccgtcgggctcggtgcagagtcacgacttcggaggtttacccggacgttggcatgttaggcacgcgacgttgcgcatcagggcaaagcccgcacgacttcttttcatccaatccgttgagccaattctgagaaagcagcaggcacaggccttcagtcaacttcttcgcgttatcagccatgaaatcaataacactctcgctccgatatgctcaatggctgccactgcacagcagctattgccggcttccgcacaatatacggatacatatctattaggagacattcgagagagtctggtcgtcattgaaagaaggagcgcacatctccggtcattcataagccagtacgctgctttggccaagatacctgctccctgcattcaaaaaacatctcttcgggcagccgtggaatcttcgcgtgcaattttcgaaggcattgatgtgaaggttaatggtgcggacgtttcagtggcagcagatcgagttcaactagagcaggttttgatcaatgtcctgcgcaacgggatgcagtcaaccggtgcaacacaactgctagtttgctggaaggaagggaatggcagcgtcataatagaaatcgccgatgatggcgctggaatagttaaccgcgaaaacctgttcatccccttttacacgacaaaaaaggacggtaatggcatcggattagcgctcgcgcggcagatcatggatgcacatggtggtcgaattgacctagacaatagggtcggagtgaggggggctgtggcgcggatagaacttccattattctaa

SEQ ID NO: 531378 - DNA, 123 bp, Stenotrophomonas maltophilia
atgaataatgttctcgcattgcaggccctcgaaaccgccaagggcgcagaactgctgggcatcagcagcgtcagcaatcactgcagcagcggcagtaagggctgcactcaggaggaggagtaa

SEQ ID NO: 531379 - DNA, 123 bp, Stenotrophomonas maltophilia
atgaacaacgtccttgcattgcaggccctcgaaaccgcccgggtcgcagaactgctgggtatcagtagcgtcagcaatcactgcagcagcggaagtaatggctgcactcacgaggaagagtaa

SEQ ID NO: 531380 - DNA, 1665 bp, Stenotrophomonas maltophilia
atgaaggctggatcgttcggtcgccttatgcggactgccagctactgtttcgcttttccctttagaaacatgcggactgctcggcacgcgctagtctgggtgttcgtacttcactccctcgttaccttctcctggtcctttgcagatccattcattcaaaggttcatgattgaccaactcgtcgcccggaacatcgagatgttcctggcggcggtcctcacggccttcgccttgtatatcggaatgtactggctgggatggcgcacagtgctactaagggcggatgtggacagggtgctatccgcactgctgatggatcgcgccatgtcttcgctttacgcccatccgcctaggcggggctcgcagggaggtgatctcgtcagtcgcgttatgaatgagccagcgcaactatcgggcaccgcaaccttcgcgctcgagatgtttggaatagtgctgacattctgcttctccgtgatcttctgcgctttcgtatctatctacgccatcttgccgttgctgctcttgcttccggtggtcatagtcgttgtcatgcgcgacgccaatcgtgcgcatggcgcgtcaatacgagttgaaagacgcaaagcagaggcgacctcggagcttacgcaaaccctggcgtcaatggctctgttcgtgcctttcaggctcttggggcgagtacgcagaggcgttagtaggagcttctcaaagtaccgctgggagaaccgcgagatgttggcaggtcgtgcgcgtgtcaatcgaaacgctcggatgtcgatgtcggccgtagaggtacttattttcgctgccgtggcatttgttgtgatacagaaagatctgagtattggatcctactttgggctgaccgcagcatactggcgactactgaactcagtacgcgacatggccgaacgcatgcccatggtggcagtgcattatggtcgcatccgcagatacgaacggttctgtgggcgcaccccgggccgctggctatcgaccgcgagtggcaatgagtactcggaattgagggtgcgaggcctagtaactgggcgatacgacggcacaacacggcaattgaccgttgatcttgcaccgagccaaagattggttgtaacgggtgctaatggcgcaggaaagacgacttttctcaatgccttaagttgcccaagcagcgatcaagttggacatttgcaggttccaggtccaatgtcactggtagtcagcccgccagccttccccgttctatccatctcgcgtttgttaaagctcgacctgttgggtgacgaggctattcaagaaatcagggagctggcgagcgagcttgggcttgatccaggtcggtttgatgaatgcccccaaggttggtctgatggcgaaaagcgcagattgggcgtccttctggcgctaagcaaaaaagcggcgatctacgtctttgatgagccactgtcaggcttagagagtgctgccaaatcgagaatcatgaaggtcattattgatcgaaccaaggcggcaattttggtggtgaccctgcacgaacccgagcttgtaacgctcttcacgcatcacttggacatgtccggcaacaccggcgatggtgatttgacgcctaccaaatttgaaaaattgccaatatcgacaccacgtgttgtccagattggcgtatga

SEQ ID NO: 531381 - DNA, 2718 bp, Stenotrophomonas maltophilia
atgagctacttcgagcatagtcttgtccaatcgcgcttcttcgagcctatcgatgcgtacaagcacaaagacgactggcaaagtcgagtacgagctgcgctgccaggggactggcagctgttccgttcctcatactggcttcaagccatcgcaccaggcgatgcatttcctgatcagggcttcaagcttcacgttgcgcccgactacgagcgtatcgccgagcaagtcgacaaggttctcgaagtgctcgtccagatgggagcttcattcaagatcgttgccgatgacttcctagtcgagctgaccaactcaaagaattttccgaggaccgcgtccggcaagttcgtcacggtctatcccgtcgacgactcacatttcaagcgccttgctgaagccttggcaagcgcaatgcacgggttcaatgggccctacatccttaccgaccgacgcgtccctggatctgatgtagttttctatcggtacggcggtttgcgcagcattgtgggcagcacagaggacggtcgagccaagcatctcatccgacgtcctgatggcgaactggtcgaggatcgacgtgacccatcgttctatctacccccgtgggtatccgatccattcgaaggtcagcacgccgtgcccgctcataatgagtcaaatgatcccgctttgcagggacgctttgaggtcgagtcagccttgcacttttccaatagcggaggggtgtacaaggcgaaggatcggcatgacggacagatggtggtcctgaaagaagcgcgcccgcgctgtggtctccgatcaggaggcgcaaaggggcgcgcggacgcgcagcaggcgttaacgcgtgaatacgaaatactgtgtcggcttgaagacttggggtgcgctccaaggccaatccagctgtttcaagagtgggagcatctctttcttgcgcaggagctaattgattgccctacttggcagtcatacttcgctcgagaagatatctttttgggaccattcgttaagggctggtgtcgtgtagagagcttcttgcaggtgcttcctcagatcgtccgcaatgcggtggagatgcttagaagggtgcacaggagcggcgttgtgctgggcgacctttcgcccaacaacatcatggtaaaccccgacgacttcaccattcgaatcatcgatgttgagtctgcgtctctcggtgaccaggaatctgcttggaacacgtactgggcaacgcggggttatggtcgctctgatcggatgtctcgaactgaggtcagcccacttgatgactggtatgcactgggcaaatgtgtgatgagctcggtgatcgctcttgagggcctcacgatcgctgaggggggtgaagagagcctcagtgatttggagttggcacagtatcttgttgatacaactggacttccgcaccttgtcattgatgttatcactgcattgctcaacggcgacccggactcggctctagcgttcctgcaacggctccaagacttcattgagctgccacctcctcaacgtcgcctgtccgaacttagctcgacgaagcgagatccgttgaagtcgagaggggctgtcgacctgaatgaggttgcggacttcatttctgagacatatcgagagtcatccaggacagagttctggcccgctgatcctggcctttacgcttcaaatatgtggaacctcgcccacggagcaacgggcgtcgtggccttccttgatcagatgaagcgcggtactcccgaccgagtcgaccgagtgctacggtcagcaaagctggtcgaatgcactgatgatatcgggctctacacgggactttcgggcattagtgcttttgcggcaatgcgcggtgactacatcgccacagagagagcagtagagaagattgcggagagcgcgttccgttaccgcggcgctgatatcgcgaccggtgaggctggcgtgggcgtcggaatgctcagtctgcataggctgaccgggtctgagaaggcgaaagtcagcgccatggggagcttccgctacctccaacagacagcgattcatgacgccacgggtgccagatggccgtctaacgatgccaagaaaaattcctactttggctatgctcgtggtggtgcgggaattgccttcttccttgcgcaatacgcggtgagtgaaaagtgtgaagaggcggcagtcctggctaaggacgccttgaagttcgtcatttcaaatggactcttggacaagagaggaggcctccaatggactcctcatgcggatgacacgcggctaatgccctattggtctcatggcgcaggcggcgtcggtgctgttctgcttcgtgtgggaatgcaacttgacgagccttactttgtcgaacttgccaaatccgtggcaagctcagccttctcaaagctctctgtgtgcgttgggcaatttgacggattggccggttgccttgagttccagactgatcttgttcaactggccgatcttaccgaggcggcgttctatcaagagcagcttgtagagggtatcggtctctactcaaggcggacaccggaaggtattgcgtttcctggcaactttgccatgcgactgagctgcgattttgctaccggcagtgccggcgtgggcgtggcgcttcgaagggcggcactgggcggcagtcgcccgctgatggacttcgcacttccgtcagctgagcttttcagtgggagatcggtgggatga

SEQ ID NO: 531382 - DNA, 708 bp, Stenotrophomonas maltophilia
atggtcgagtacgacgaggaaattaggctcaagattcacaggctgcagcgacgccagttgtatcttgctgccgccatcgttgtcgcaacgtttgcaatcgtgctgactcgcccttcggtggagcgagacaaacatgccgatctggacgtactggatgttcaacgcatcaacatccgcgagccagatgggacaatccgcctcagcctgtccaatcgcacaaagttccctggcgccatcgtgcgcaacgaagagcatgcccacccacgtgatgttgcaggcatgctgttcttcaacgacgaaggaaccgaaagcggcggattgatctatagtggtgtcgaaggatctttggggaaaccatcgagcgggttgagcttgacatttgaccgttaccaacaggaccagcaggtgcagttgctgggtgtggacgaagaaggcaggcattacgggggcctctccttcaacgatgtggctgatggcctcaaaagaccaatcttctccgcggtcgatgaatcgcttcatcggcaagggcaggctgcaatcacgcgtcgagtcttcttgggaaagtctgaaaagcaagactctgtccttgaacttctcgatgccaagggcaacgttcgtctcgagctggtcgtccgaccaaatggagaggcgttgatgcggttccttgatgagcaaggaaagcccacgcgtgagctgactggccgatga

SEQ ID NO: 531383 - DNA, 603 bp, Stenotrophomonas maltophilia
atggatctaagtagtcagattggtctttggaccgcagtatttgcgggcctttccgcagcagcggcagcggtgtcggcaatcgtatccatggctgcagttcttctgccgatgagagtccagcgtagccagcgaatgcttgaccaggcaatccagtccctggagcgcgcttatgaggttctctcggccagtgcggatagtgggcccccgattgcagaccgtcttgcgtggctgacggctgcccgtctgcttcagcagtacgagatgatcaaggggctggtcatcgctaaggagcacaagttggtgcttgtggagcaagaagagtattggcggcatcgcttctacgtcctacttgctccgctagcgatgcgagcgcccagctattacagtgacaagggcctatctcgagctggcaagggaagagggcccatcgagccgatgtccgctgtggtagtgaatcgattcgcccattggcctgacggtaagttggatcccctcccgacgcttgaacgcgaatcgctctcctctaccgacagcttcctgaaagggaacgttgcacttagggagtacctcgttgatggtggctatctgagagagccaccatga

SEQ ID NO: 531384 - DNA, 1059 bp, Stenotrophomonas maltophilia
atggcagcgaaacgagggcaacgggtttttgtagatgcaaacgtctggatcagttggggctatcaactcagcaaagctgaggcttccacccttgcggacctggtggagcatgagcttgtacgggtagtggtcacggatctgaccgtgatcgaagttgccaagcgattcagggatattgatttcgaaaagcttgaacccctgaccaaggcggacatacgtggtttggccaagcagcatatggatcttgccatcccagtggttgatcgtgaggaactacgcagctcgctgttcggcggacatctggatgcagtaaagcgccgacttcacaaccgcttcaacgctgaggttcgcagcattgatgccgtcaagccaagtgaggtcttaactcattacaccagcggcacgggactgtttgggccagcaggcaagaagaatcagtttcctgatgcattcatattttccgctattactagcgatctgagtgagcgcaatccactgattgtcctatcacatgatggtgacttcgctagcgcctgtgagaagacgccgaacattcaacgtgtcacttccatggctgcgctgctgaagacactcgccattgaaccagagggagctgaaactattgcattggtcgtcgctgcacgcagccagtttgagtctgccctaaccgagatgcttcaggactatggagttgaagcaacggatgtcgaggacgctgagatcgatgtgcactatgttcaacgagtctcagagcttcaattgaccgggctctacagggttagcgaggaagacaacaagtacatcggatttgggaactgtgcggttgaggtattcatcagcttcacccatcctgactgggatacggcaacttgggatagtgaagatagggtgccaattccgcatagaagcgtcgacggtgagatggacgttgacattgatgacattagattcagcttcctcgttgagatcgagaacggcgttgtcgggaacgtgtcgaactgcgaggttagagggactcggggaatcatgacccaactgcagtcgccttgggattactga

SEQ ID NO: 531385 - DNA, 453 bp, Stenotrophomonas maltophilia
atgaaaggaaagtcgaaacgcaatcgctggctgatgatcgtggtcgcgtgcctgggaggcgcagcaatcgcagcgtcggttgggaaattctactgcggcaagtcttgcagtttcgatggaccctacctacaggacggtgaagcacatggattcctccgatcaacgatcaatccaaaagttgattcttggattgacgcgaaaggatcccccaagactgtggagctctgcaacggcagcgtctgcgcgaaatatcgctacaggaaaggaactgtgctgtgggaaaagatctctgagtacagcagcaactgggttggctccaacgtaggtggaggaggtggcggtggcgacggaggcggcagttttggtggcggaggtggctggggatatggtggcggtggcggtggcggtggcggcggaagggtgaccatcggagctacttcggtagctcaatag

SEQ ID NO: 531386 - DNA, 1368 bp, Stenotrophomonas maltophilia
atgatgacgctgatgaagcttgagctgccggcgggatgggtcgaaacaacactaggttcgatcggcgccatcaagagcggagttggttttcccgttgaggcgcaagggaaaaattcaggcgaatacccggtttacaaggtcagtgacatatcgaaggcagttcttttcaccggaggcgagctgcttcactcggccaactacgtgagcgaagaggtctcgtcctcgctgaagggttacgtcttccccatcggcaccatactgtttgcgaaaattggcgaggcacttcgcctcaaccggcgagcaattgtgcatgcccgcggattggcggataacaacgtgatgggattcaaggccggcaatgggttggatgacaaattcgtcttctacttccttcaaacacaggacttggcttctttttctcgatctacaaccgtcccgtcgataagaaaaggcgacgttgaaagtgtctcgatcagactccctccggcttcggagcagaagcgaatcacgcagaagctggatgcgctgctggcgcgggtcgacgctctcaaagctcgcatcgatacaatcccccttctcttaaaacggcttaagtcatcagttcttctatcggccgttagtggccttctctcagatgaatctagatctggctggcaagtggtcgtcattcgggatcttgttgaaagctctttaacgggccttgtccgatctgcggctgagcagtcagatcaggttggagacctaaacccatacttgaagatgaacaacataaatcaggattggggcatcagccttgaaaagattgttggagtgagagctgacgaagaggatttgaaacgctttgagctacgaaacggggattggcttttcaatacgcgtaacagcattgagctagttgggaagtcttgcgtctggcgcggagaggcggggtttctctacaacaacaatatcctgcgaattcgcttcaatagccgggcagtgccagaattcatagagatctggttcagatccccgctgggccaatccaatcttgcgaagataaagtcagctaccacaagcgtggctgcgatctaccaaaaggcattgatgaatcaagaggtaaacattcctgacatcaccgagcagtggcagatcgtccgacgagtcgaacagatgttcgcgatcgccgatcagctggaagccaaggtcgccgcagccaagcagcgcattaacgccctgacccagagcatcctcgccaaagccttccgtggcgacctggtcccccaggatcccaacgatgaaccggccagcgtgttgctggagcgcatcagcgaccagcgtgctgctgctcccaaatccaagcgtggccgcaaggccgcagccgactga

SEQ ID NO: 531387 - DNA, 333 bp, Stenotrophomonas maltophilia
atggaccagaagctcaactcgtttgcatacatcgtcgaaatcttcattgaagcttgcaacacttcgagcacaaaactcacagtgcagctgaatgcccgcaccgtaggtgtatttcggcgccagttggcacctgcatacgggacagagagccacaatggcataaaccttcccggagtcctttccgaatcgccactgccaatcgacgcccagaaaggtgtcgtgtgtatagctccaggcgctcacgccactctgattttgacgaagatgagcaacaccaactgcaagcagcgctacgacaacaaccagaagcgaaagccagagaacgaggaatag

SEQ ID NO: 531388 - DNA, 1191 bp, Stenotrophomonas maltophilia
atgagtattgccgtacaacttcaggatgaagaagtggtctttcgagtactagcgtggcagcgacgatcggttgagcttgaggatccagccgccttcaagctcaccgcgcagggagttgaatgtgcggttcttattcgacctgagcactcagacgctggagatcagctgaaccacggtggcgcactccttagcatcgagttcggattcccgaacatcgatctcatggaagcggccaatgttggcattgagcttctggaagacgttctctgcgcactatctctggtggatggcgtagatttccagccgattcagttgcggtatgctgagcgacttgaggaagatgggacacgcgattttttgcagttccttgatctctcggcgaaccattggcagaagaaggtctcgaagaagtctctcggacaggcaagcaagctcgtcgctcattgggatggacttgagaagggtcatcgattgcgtcgtgcggcgagactgtatggacgggcgatcggcgaagctgacgcactaacggccttccagagcgcatacacaggcttggaaacactagaaacggtccttgcgccgcgcttcggacttaagccaggcagtgaggaggtgaccggagagtgctccgcatgcaagcatacctacaccttcaacaagaccgcattggtaggcgtgcgcgctttcattcttgatggagaggcgcttagctctgcagatccccagaggatatctgaatggaagggattcaatcgcctcagaaacgacgcaactcacgggctggaggaaattgctgacctgcttgagcgcggagtgaaatggctccccggagcgatgcatcatctgcatatggcaatgtgccatgaatcacacgctgtcgagctcatctctgagaagtatcgcatgccccgcggtccgcgcatctatgcgatggcggggaactatcgccgcacttctgaagcagagagcattgagaactggaacccggtattcgaggtaaggccagcgaagtgggttgaacacgatcagtatggccgagttcctgagttctccttcaagccgcgagctgatgcaaaagagcttcggtgtgcggaactgcagcttgaaggtgacattcgaaacgcaactatgagctcgttcaagaaggcagctgtcgaacgcgttgagcctgttgaggaaccatcaaactaa

SEQ ID NO: 531389 - DNA, 174 bp, Stenotrophomonas maltophilia
atgtcgtcgtacgaacgcatcgtcaaggaggtcgccactgacctccagctgggtcatcgatcacgctgggtagccgaagtcatcgcaagctggatcagcagccatccgttggggttggatggtctggagcaacagttcgagcaggtcgggctatttgagcgattccgctcttag

SEQ ID NO: 531390 - DNA, 1062 bp, Stenotrophomonas maltophilia
atggcacgccgaagcgggatgggagcgggcgagttccgtgtggtggcttgcgacctctttcccgctctcatcgctgtgatttcgctgcccatcgagcgcatccgtcttgatcgtcgaacggctcggcatttccttcgccttcatcgatctcgcgtggccggcggcttgccgtctgcgtcgatgcacggaatggcgctgcgggctgctattgggttgctctgcgtgctgtccgtagtgagtgtcagctcctggcttcgcctcagaatgcacactcccctgtgggtagcccaggagattgtgcctgatcgagaccctcgcctctctctagttcagcgcggagatcagatcgctgtgcacggtagcctgccgacagaggccgctcgacgtcgcatctggagctctttggtctcgctctatggcgggcgcaacgttcactgtcacattgtgttggatccaggcgtgcgcgaagcgcgttggctgcatgccttgatcaagttgctgccgaaactgcggaagaatggcttggtgcttggctttgagggaacgaggctgcggatcgactcttccgccctgagtgagtcagaacggttctcggtatctcaagttcttcgccagaacttcagttccttgtccatcatggatggcctttgggggccaggtctgtcggcgctgtcggctttgccaaaggatgcaccgctttcggatcgcatcgctgctatgaatttgacgacgcttaggttcaggcctgggaccagtgaactcacgcaagattctggacaaacggtggcggcggttgcggacgcgctacggtccgtctctcgtgatactcgtgtacaggtcggcgcgcataccgatagcagtgtcggcccggcggagagtctgggacttagccagcaacgtgcggagcaggtggtgcttgcgctgcagcgtcaaggtgttccgcgaactctgctcgtggcaaagggacacgggcaggatcagctggtggctgacaatcgcagcgaagtggggcgggcgcagaatcagaggattgcctatcagctgatggatggatcgttgtag

SEQ ID NO: 531391 - DNA, 954 bp, Stenotrophomonas maltophilia
atgggcaacccaacgacacggcagaagtcgtcggccaacacaatgaatggcaacagcacaggtgagcagggacaggatcctgtgcctggcggagaatcggtgccccattgcggcatcatcatgccgatctcgaccattgatggatgcgaacccgcgcactggaagcgagttgctagaattctcgatgaagcaatttccggtgctggctacaagcccagaatcgtaagcgactctgatgccgttgccatcattcagaagacgatcgtccagaacatctacaacgacgaaatcattgtctgcgacataagttgccgcaatgcgaacgtcatgttcgaactaggcctcaggctggcgttcgacaagccagttgtgatcgtcaaagacgagatgacgccatacccctttgacaccggcagcatcgaacatcttacgtatccaagatctctttcctactgggagatccttgactttcaagcactccttacgagcaagctgaaatcaacggcagcagcagcacgtaatgccggctactctcccttcctcaagcactacggagatataaaggcaacctctcttccaaccacggaggtgagtacgattgagtactttgaaaagaggtttgatgagctttcagcacgcatcgaatcaagtagctcccagcgggcgattgaatcactaaagctacagactcccagcggccattccttccggaattttgagttgagtgtccgtttcaatcctggctctcctgtagcatccactgtagagaaatatctactggggactccaggaattaagattgacaagctcgagtttggcgcagcgaagcttgtcgctaaaggctctggcgctccctcttctataaaacgccttacagccatttttgaagatctcgacgtggaagcaacctttgcgttcggtcaaatggatggcgtctccgtaagcttatcttga

SEQ ID NO: 531392 - DNA, 519 bp, Stenotrophomonas maltophilia
atgaggtttgattcgacactgtacgacccgcgctatcccgatgactgtccggacacgtttgccgcgtgcttgaacgcgcgcggactgtatgaaagtcagcggtttgccctgcggctaagtcctgtagttcatgggcttgtcgaaagcttgcttgcaaagtccgaagctggacgagcggactacactggcgatgaactgcaggcgtactcgacattcgtgcatgagacagtccactggtggcagcacaagggatccaccagcgggttcattcgaagcatcctctatccggttcagactcattcaaatctgaacggcctcaaaagtgtattgaggaacttcggagcaaagaagtgtgtcaaggatctggccgttagtggggagttgggcttgctctctccagacaaggccaaggcttgcttgactgccaatcatgtcgtcaatggattcatggacaccgagttctacctggcgttgacctttgatccaaagaaggacgttgaatcgcccagggttccgtag

SEQ ID NO: 531393 - DNA, 843 bp, Stenotrophomonas maltophilia
atggactggattagttttttgacccgcgatgttgcgattgggtccatcctaggcatctcggcagcggcacttataatctgctggcgtgtcggctcgttccatccggtcaacgttcgcctactgcgattctttatcgcaaaggatgagatcgaagatcccatcatcaagaagagcattgcagatcaaacggcgctggtcagctttagaatgacacacggcgtgaaagcaaggacgattcgcgacgcgcaaaacctgtcgcaattctctgacagaaccaacattccgctcgatctgataggaagatctggctgggcattcaatttaaaaactctctccctaaatcccagccgggtgcctcacggagcatggctcgctcttccagggatactcttgtttgttctgatactctcgaccgctggcttctcggcagtggcagcgagcagcaagctgctcgtctcgttgaaagccactgacacttggctgtggctctcccaagaggacgctcgcgcagttcgacctttcggcgacagagccgtaatcaacaaagcctcttgcgataaagagcaagacgctgccgagcctccagttggctttcataaagatgaccgcaaaattctttgcgaactttggtctgatccagcgcttgaaaagcacttctccaaagaactacctgagcaacgaatcacatttcttgtagcagcagccatctttgcgtggtacgcatttatgagcttttcacttcttcgtgagtggcttgcccagagagaacttcgagacctcttggaagaagtcaaaaaagacacgatagagtccgacccaaagcctattgaaaagaacaagtga

SEQ ID NO: 531394 - DNA, 1557 bp, Stenotrophomonas maltophilia
atgatttctggaatgcggatttgcaacattcgatccttaagggattccgggaaagtgccggtaagaaagataaatgtgctcgttggtatgaatagttccgggaaaagcacatttcttcgaatgttccctctgcttagacaaagtgtcgaggttagaacaaaagggccgctgctctggtatggccgtctcgtcgatttcggtgactttaaagaagcgaagtcatccaactccggtgatgagcccatatccatttcgttcgatctaactatcaggcgaatgttgtccgcgaagccaagtaagctggtgatgtctgaacttaggacgtatcaccttccacctgtcatcggggtggagcttagaatcgatcagcatgaaggggatgacgttggttttatatcttccattcgtctgacaattgcctcagacgtcgtagaggtttattttgattctgcttgggtgtcgcagatcgtgatcaatggtgtcacccataggcctgcagctggacagtattggtttgcgggaagagatgctaagttgcctggtgtcacctatcttctggagaagtctgatgaagataacgagacatacttcgttgaggatcaggattggctcgttgaagctatagcgcaagtcctacatagggttgctcatggcaacacgtccatggataggcttaaattggttgccaagcaactaatctatgctccggagcgagacttcgcccatcagttctcacagcttacgacggcgccagatggagtgcggcatgcactgaccacgcatgcaaatgcggcgtcttcttatctactcaatagtctcagaggactgatgcttctgaaggtgttgccttcagtgcttcgggatgtatcgggcgcatttgaagatctgggtgcaggtgttcgttatatcgaacctattcgtgcgtcagtcgatagatactatcgtttgcaagaccttgctgttgacgaaatcgaatcgagcggagccaatactgcaatgtatcttcgttcgcttgatagtgctgaacttcgggctctcggaaattggatggatgaaaatctaggatttcgtgcgtatccagagcggagttctggaaatgtcgcagttaaagttagggctaaaggagagtcggttggcaggaatgtgacagatcttggatttggatactcccaggtcttaccagtgatacttcagctttggcactcttgtataaagggcggtcgcggagcgaagcgcgcatcggtaattgcaattgaacagcctgaactgcaccttcacccccggttccagtcaaggctcgcggatgttttcgtaaacgtggcgaaatcaataccagcaaagggtggggccattccattttttattgaaactcacagcgagcacatcgtgaatcgcatcggtgcgctcgtggcggaaggcagggtttctagggatgacgtccaagttctgctgttcgataataatggacaggagaccagcatcacaccggtaacatttgataatgatggggttctttcagaggcatggcctctcggcttctttcttccggaggtctga

SEQ ID NO: 531395 - DNA, 249 bp, Stenotrophomonas maltophilia
atgcataacgagagcccgctgcagacctgtagagtcgagccatgctcgactgacgaaaagcagccgagcatggctcggctctacaacaacgaagcgcagccgaccagcggtcggctctacgagaccgaagcccaacgccagagcatcgaactgcaacgccaacgcgccaggcgcaccgcgctctgggtcggcgccatcgccgtgctggtctacgtcggcttcatcctcagcggggtgatcggccgatga

SEQ ID NO: 531396 - DNA, 1836 bp, Stenotrophomonas maltophilia
atgctgcttcacgtagggcgtgacagctacatgggcagggcccacatcgtgtcagcgtcgacgcaggaggtcagcgccacgctacgcgcgcgaagctatttctcaacgtcatttcgcgaaagtggtgttgctcgacccatcgtcggcgacatggagcggcagtgggcaaaggtctacgggcacttccatccggagaagagtgcagtcgcgttcgctcggaatattgctgcgattgatgccgcagcaacggcaggcgccatcgctccggaagagaaatcccgctggcgcgcccacgtcgagcagctgtctccttccgatctcgacgcctcagccgccgcgttcactgacctggcagtggagcggctgacattctccagttcctacactgatatcgcgcgacacagatcaggcgaaaaatacgttgttctgatcgatctcacggatctgacaggcgctccttcgcagacgctgctctggtatgcagagaaacgccaagagcaacgccgcaccaaatggaaggcctttgcatccatcccgggggttacggctattccctacccgcactgggaaaccgagctgatcactgagagggaccccagcaagaaattctcagcagaggtgcaggcgctggcggcaaacttcccagcgggctctgaaactacattggatgtcatctcgcatctgttcgatctacgtgatgaggcgccggttccgcttattgtcccccgactacccgtggacggtgcgatgccgatgttgcagtggcacgccatccaggaaattcagcctggctgcggctctggtcagattcgttcattgccccatgaccagttccatatcacgtcagacaacgacagttcatacggttacatcgccgcgaagaaggttgggaccgttacggcgcggcagatgggcggcgatcagcgggtcactgagacgaaggtggaccgaaagggacgcctatgggcgctgacagcagccgagccgagcccgacgcagcagattctcacgtcctgtccagtacagatcagcggtgattccaccggggcgatacggggcgaccactgcatacagagcatcatgcctccccggtggcagcttgatatcgatggcaactcctatctccacgcggagtctcatatggcggcggaggaccgctttcctgagcggatcatggacgcagggtcgggaaaggccatcgaaatgaaggagctctgggaagatagaaccaacttgagacagcgcgtattcggctacatgcaatcctgccacccaggcccggcaccggatctgggtgacggacttttctggttcacaagttgcggcctggttggtgttgagcctgcatcaggcgatgtggccaagagctttccagtcacgtccggaggcagtggacgcctggtattgggaagcgccgcgggtgactgggtcgccgaagaggctcgtgattcaacagagcaaagggacgttcttcgcgttcatcgtctttccaccggggaagcggcatttgaggtggaacgaaaagccggtccccaggcactggcacgcacggcgcatggcaggctgctcgcgatgacggctacaggcgcttcaccgggccgttacgtcgatgtctggcgcatggattccggcaagcacgtttcacgtctcgccgttcctgaaggaatcgcaccgaaatcaattgcattcaatcgagcggggactgagctatggatttacgcgcatcgactcgaaggggagcaagccggcgtactgatctggatggtgccggcatcattgcaggacggtgccgacgaccactggatccctgacgaggccgtactgaaagaacactag

SEQ ID NO: 531397 - DNA, 177 bp, Stenotrophomonas maltophilia
atgcgccgtgatccgctgacaaagaagtcccaggtggccaccgtcctgaaggacggtggccgtatcgtgcctggcgtgcgcgaagggctgctgcagttgctggaccatgcgggccaggaagtgcctgcatggcagaccgccctccgggccgttcagggcgcaaggagcaaggcatga

SEQ ID NO: 531398 - DNA, 1164 bp, Stenotrophomonas maltophilia
atgatcaaagatttctcgcatctggacaccattggtcaagcgctcgcgggcttgaactttggcaactcctttactgcagcatcggcgcaggctgcccgaatcaatcagatcattaaccgctctggcgtcaatcaactgggccgaatgatggagcgttcgagtgtcattgacgtggccaatgccctgcagagatctcgaccggcctatctggatgccctcgatcagattggctctaggactgccttgcttcaaagtttcctgccaaagtcagatctttctcgtcttgactcattcgttaatatccagagcctgattgggcagcacgcctccagcgacgccattggctcgttgatgaggaccatccaaggttcgtctgtggccacttggatcgcagataccgaggcacgccgatcgatggacatcggcaagatcatgcgtaccattctgggcaagcccccagtgtggtcaaacgcagcggcagaagccgccgatagggcacatgctgaactgtcgacatcgaccttggttgagcgctggatggatctcgcctctgccaacgatcaggccggcgaacaatctccggaccttgcacagtccacgattgaatctttactcgcgtccaatgatcttgctcccgagaagatcggccgcgatgttgcactgattgccgatgccatcgaagcgctcccggctatcccatggtccgcgtctagtcaaacgaagatggagctcaagagcgagatcctcttctaccttgcgattcttaacttccttctcaccttttttcaggtgtatcaacagcatctggacaggcgtgaacaaggagcgcagcacagtgtgcaggagcagcgacatatcgagtcaatggccgtccagaagtcgatcgcgcagtccatggacaagatcgccgagcgcctttctccgaccatcaatggcgccatagttggtactcaaggactgagggttcgctcgtctccgggaaagggtttcgtcgtggataccgtctatccaaatcagttggtcgccgtcaccgggaagcacagccgttggttaaaggtgagctacaggaatcatgtggacgaacgcgaggttgaaggctggattctcaagcagtacgtaaagaccaaggacgcctcagcggaatctgcatcctctttgaattga

SEQ ID NO: 531399 - DNA, 342 bp, Stenotrophomonas maltophilia; identical to SEQ ID NO: 517294

SEQ ID NO: 531400 - DNA, 1269 bp, Stenotrophomonas maltophilia
atgagcgatccgatcaccgccatccttgatgcgcacgatacggcgcacacgcgcaatgacagcctggccatgctgttgaccctggccagcgaagaccgcccccagcttggcgcgttgctgctgcaggcgctggttcgccgctcgcccagctctaccttcctcgatacggcgctggatctgttgccggatgaggccgtcgtgccggtctgcagcgaggcctggcgtcgctatcgtgatggcgagcgcggcgagctgctggccagcgtgatcgaattcaccagcaatcaggcgccgcaggtgctgcaggacgactgggaggccttgctggtgctggccactgaagacgagctgcagctggcttcgcaggtatggcagggcctgccctctgccatttccgcgcagtgggcgcggatcctggccgaagccgatgacgatcgcgaaatggcgcgggccaaggcgctgctgctcgccgcccagcccgagacctacgccgttgcccgcggctacctcgctgactggggcgcgctggatgctgaggtctgggcgcattgggccggcgtggccgatgggtcgctgccgcgccgcctccatgggaagcggtcgctgcacatccgcttcggccgagagcaacaccgcgcgcagcaggcggacgaaccgagctggcgcaagcgcacctggcgcctgcacccgacctggaatggtgggcaggtacaccatgctgggcagatgggagggccgctggaagcgctgtgtagcagctgccatgcgccgctgcagcgcctgctgcagaccgatgccgccgcgctgcagccgggcgcgtcgggcgagatcacgctggggctgtgcctggactgctgcggctgggaagacccgcccgtgcgtttctatcgccatgatgcggccggcctgcccagctgccaccccagccagcaccgtgaggtaccgaacacacccaccgacagtggcgacctgatgcaggccgaggtgggtctggtcgccatggacagtgcgcgctggcaacaacaggactggggccagtccaatcatcggcagaacctgtcgcgcgtgggcggcgcgccgagctgggtgcagagtgcctggtacccggcgtgcatcgattgcggcgaagagatgccgttcgtgatgcagctggattcgacactgccgaccacgggtgagggcacgctgctgtggggcagcggcggcatgctctatacgttctggtgtgcaaagtgccgggtgagcgggcacttctggcagtgcacctga

SEQ ID NO: 531401 - DNA, 819 bp, Stenotrophomonas maltophilia
atgtcaggaaagtggacttctattgccgggttggcgctagcgatgctaggcatccttgttccattggttctttggatggcagattccgattcaagggagatcgaggttaggattctgtccaaggcgaacctgaacccttcactgccaaccggagtggacggtgagatggagttcgcaatcggtggtaggcgagtcgtcaagccatactatgtggtggtacaggtgacgaacgcaggaaatcgttctatcgctgctgcggatgttgaaaggcctttaactcttgcgatgggcaatgtggcaattgcgcaggcgcaggtccttacatcccagcctgcggcactgaagccagagcttgaaaggcaagagcgacagctcgttgtaaagccattgctcctcaatccgggggatagctttcagattggatttctcacgagcggcgcggaaccaagtgtgactgcgcaggcgagaattgcggggatcagcgacgtccgagtagttagctcgcttagcgacgacaccgttgtgggaaagtcgttcaggcttgtggttgcgtcagccctcatgtgcatgtatgcctccctgctgctagtgggattcggtcaatggagtaatggtcggcgcagactcgtacttaggagatgggcgacaattccaatggccttcttctgcggacttgggggcagtgttctgtttacctccgagcttggcgtgttaccactaaaggattggcgaaccgtcgtgttcatcatcggattggtggtcttggctgttgtgctgggtcgagttcccttaaagtgggtctatcatcaacccgtatga

SEQ ID NO: 531402 - DNA, 258 bp, Stenotrophomonas maltophilia
atgaggacggtgctgctggtgggtctggtcctgcttgcggggccggtactggccacacctccagcgccgccctcggtgtggctggaacgccagcaggcagccggtgccgatgaagcgaatgctgcgggggcgaaagcttcgccggtacccgaggcgaaggagcgctgccgggtaacgaaggaatggaaggtcggtgagacggtggtgcagcacaggatctgcgacgatgcaccgaggaagcccgctggaaaggtgtag

SEQ ID NO: 531403 - DNA, 963 bp, Stenotrophomonas maltophilia
atggccgcatcgatacttacttctccagccgaaatcctcaccgcgatcagacgagccatcgccaagtcccctgcccgcatcgctgtcccgttctggggtcaacgcgcaccgagctctctggggctggacaagctcaatccatcctcggccaagatcctttgcaacctgtcagctggcggctgcaacccagacgtaatccgtgagctgttaaagctcggatttccggtgcgcgccctttcctccctccatgcaaaggtgtacatgggtgcgaccgctgcggtcctggggtccgccaatgcctccgtcgacggcctcggcctgaatgacgatgattccggctggaacgaggcttgcacacggatcgccgatcccgattcgatcaaaaaactgaatagatggttcgattcgctatgggagaaggcagcagacctatcttcgcctgagatcgcccggatcctgctcgagcgagccgatcgggccccaccagcccttcgcgttgacccattcgatctgctcagcgcactgaaggagaacccgaacgccttcaagagcaagagcctcttcattactttggactatcaaccctacagtgcatgcgtcaccaagagggtggaggaactcaataacggcttagggcacgacattgatgcatgggaggattggactgacatgccgtcggcagcagaactcctttcgttctattttgaccgtcgttcgggcaagatttccttcgaggggatctaccaaagccccaatgatccaaaagagtcaatggatccaaagacaaagggcatatacgtacaccgaatccggcgagccctcggaacttacgagattggtgaccccgaggtctggaacgaagctgtaaagcgctggaagagcgccgtcttcgtcaatggacatgcaaaggatgaagacctagtcttgccgctttccaaatttgcagcgacctacttaccgtag

SEQ ID NO: 531404 - DNA, 2322 bp, Stenotrophomonas maltophilia
atgccgcgcgagacgaagacgacgaggctgcccaagccccaagcaaataacccgttcttccatgtggccttctcgccaagtgacgtttttggcgtggaggtgacgggtgggggttcccgggagttctgcgaagtcgatgggccctatcgagcacgactaaaccagacagttcgtgctgcgggcgagctcgttgccgccaatgcccgcaactatccgggaattcccacggtcttggcggttcgactccgaccagaggcgattgccaagagccatcggccactggctttggctgcggtcgccgacttgagtgtgatcggccatgcagaaatccacgagatgcttgtggaggcgactccacgcgagatcgagcttctcagcgaagccatcttcacccgcgacaccaaggctatccgcgccaatctaagtgcgattagcgaggtcgctgcgtggaccgctcaagctaagctgcctggcgttctgagagaggcgccgcagccaatggtccggtccgctcttcgtgcgaccggccgaatctggatcaagctcttcaagtacagggatgcccaggttcaatccgcggcgattggggcacttgaggcagttcttgcggcaggtagtgccacgggttttgtgctgcctcagttcaaggggccgccggtgtatgtggtcgatgcgggtgcgactctatctgatggaactctcgatgctgtaatcgcgtttcccggagttcggtccgttcagcctgaacctcaggcgtcggtagccccgggtgaatcagtagttgtgcccccatccggtagcacgttcgagcggcagccacctgcagatgctccaatcgtcgcggtcttcgatactggcgtgcatcctggtgcaacgcttctgaccccctgggtcagctccaccgaaacctttgtcaccaatgtagacacaaactacgagcacggcacgatggtcgcatcgttgatagccgacgccaaggggctcaacgaacagcatgctcatattccgtctactggctgtcgcgtgcatgacgtctgcggcctagagtccacgaccgccaatgtcggtgatctgattcagcgactgagacaagcgctgatcaatcaacctgacatccgggtgtggaacctgtcgctgggcggaagggtgggtgttggcgacaccggtttcagcgagtttgcccaagagcttgacgccctgagcgacaagcacaacgttctattcgtcgttgctgcaggcaactaccttgacatgccccggcgtggttggccttgtcctggcggtctggccgatcgtatctcaagtccggcagattcaatccgatcccttaccgttggtgcagtgacgcatcttgatagtccgtcatcgtttgttgctatcggggagccagccaactacagccgccgcgggccggggccagtgttcacgccaaagccggatctcgtccacgtcgggggaggactggaacgtccctgggaagcaagcgcgttgggcatcaaggttctggcgccaaacaacggtgtactgcgaaatgtagggacaagctttgcggccccgatcgtttcagcaatggcggcgcaaacctggcgcgccctgggtcatggtggtcgccagcacggacttgtaccgtcccccgcgatggtcaaagcacttctgattcatagcgcagagctggcctcgccagttcgccctccagagcatcgtcgatactttggtgcaggactgcccagcgatccgatggcagtcctctatgacagttcaaacagctttacgcttgtgtttgaagtcgacctggtgactgggacgaagtggcggaaggctcagtatccgattccggcgtcaatgctggttgggggaaagctgcgcggcgaggtgatcctcacggctgtgtactcaccaccagttgatggcgctgcaggtgctgagtacgtcagggcaaaccttgaggttggcttcggcaagttggagccggatagcaacggagtaatgcagttccatgggcgggccccgatgaagtgggagcagggcagcgatggacttgagagcgcccaggtggaacatggtggtaaatggtctccagtgaagatccatcgaaaggtcttctcggggacggctggttcagactgggcacttcaagccagcatgatgcgacgtgcaaatgagccaccagcacaggaaccgatgcgtgcggtgatcatcgtcactcttcgttcgctcgatgaggatggggacatctacaacgaaggtgctcgcgcgctcgcatcagccaactgggtggctcagacgctgcccctcaccgtaccgatcaatgtttcgacctga

SEQ ID NO: 531405 - DNA, 1119 bp, Stenotrophomonas maltophilia
atggctactagctatgcggggcttctggctgagaagctggagtccgccggcgagcgggagcaggccagcttggttcgccagcgcctcatccgggctcccagggccttggctagtgcgcaggatgcgtcttcacccaatggcacagggcaattgcccgtggatggtgagagtcgcctccacacggtcgattacagcaggccttccctctcagatatcttcttggcattaccaagtggtgttgaacgccgggtcgaggacctgttggatgctgcgcggcactacgacctcctcgcaaaggcgggggctgcagtgccgccccgtatgttgatctacggtccgcctggaaccgggaagactcaaaccgcgcactgggtggctgccaagctgggactgcctttgctcactgtgcgttgcgatacgctgatcagcagcttgctcggacagaccagcaagaatctgcgtcgtgtgtttgagtatgcacagagtggtccggccgtgcttttccttgacgaggtggacgccctagcatctgcgcgtggaaatgagcgagatgtgggcgaactgcagcgagtggtggtctcgctactgcagaacattgatgcactggagccaagcacggtggtggttgcggccaccaatcatgatggtttgcttgacccggccgtctggagacgattcgcatttcaacttccgatgccgttgccagattcctcgctgcgtgaagagttgtggcggcgatacttggccaacttcagtgcttctacacttgattaccctggattggcagaacgatccgccggtgctacgggctcattgattgaacaagtgagccaggacgcgaagcggcatgcggtgcttgctcgccagtccgtggtagatgaaggagaaacccatcgccggctggcattggccatggcgttgatgcaaggtaaaagcctgacatcagtagatgatgaggtgcgttggcttcgcctctgggatgcccgtcggttctcagtgcgcgaactggctcgcctctatggcgtaactactcgcaaaatcaacaatatgatcaaggagctcaaggaagatgccgcgcgagacgaagacgacgaggctgcccaagccccaagcaaataa

SEQ ID NO: 531406 - DNA, 882 bp, Stenotrophomonas maltophilia
atgtccagcttggtgcaggaaatccagcgcgatgcgcttgatccaaaggtcggtgtaagtgaccttcttcggaaggctttggttgtttccaccaagcttaaaattggcgaggacactgcttggatcaaggccgagctgtcggggtacagtggcgaagcaacgctccctgactacagagaattgcgaggactacctcaggtccataatccgcgtaatggctatattcccttccgcatgcccgcggaaatggagttggagttctgccggctgccgatggggttcagcgtggctgaggtggaggcgctcctgcggaaggaggatgaagggctccgcttcagctttccgccagtagtcacagctcacttcctgaagcatatggaggtgcagatgcagccttcactattcatttctggaagtgtcttccatggtgttctcgacgcgattcgaaaccgagttcttcagtgggcgcttgatcttgagatggcaggggtggtcggtgacggcatgagctttagccctaccgacgtgaaggcggcgcagcatgtaacgaacatcacgaacaacatcggatcgatgcacaattcgcagcttcaacagctctctgcgggacagcagtcctaccagatgatggagaggcgtgatgagcttgtagctctgttgaaggagatcaagaacgttgccaattcgcaaggcggccccggtcaagtgaccgtggacgtggacacagtactggtccagcttcagtccgaagctccaaagcgcggaattgtggaagagtcccttaagtcgctgcgaaccgtgctggaaggcgcgacgggtggcgcactttctagctatgttccgcagcttgttgcactcatgggggcaataggagttggctga

SEQ ID NO: 531407 - DNA, 1641 bp, Stenotrophomonas maltophilia
atggcctatccgtccttggagcagtacaacgaggcgttacagtcgccgcagctcgtgcttctggatcccgagctcaagcgcggaacattgaagacctctggtttgggattgcccttggcattgtgcggagggtttgctcttacctatgcggtgacagtgggagccaagaagtacgcgctgcgctgcttccacaaggaatcgcgtgagctggagcgccggtatcaggcgatatctgcccgcctgaggcagctcaatagtccatatttcctgcactttgagttcaatcctgcaggcatccgaattcagggcagtgtgtatcccactgtcaagatggcatgggccaacggaagcaccttggccgagttccttgaggccaaacacgccgacaatgtggcacttcaaaggctccggggggctttgacgaagttggccgcctacctagagcagaacaatcttgcccatggagatatccagcctgagaacctgatggtcagtcctgacgggggcacggtgcagctgatcgattacgatggtctttatgtggagtcgctcaagggcgccagcgcgaccgagctggggcagctcaacttccaacatcctctgcgctcggctagtgatttcggtcccacattggaccgcttctcgttccttacgctggacgttgcgctccaggtccttatcgcatccccgcgaatgtgggcctcgtcccgctccgaacccagtgccgtagtatttcggcgtaatgactttctggatcctactcagtccacgtctttccaaggtgctgttgccattcctggcgtcaaagcgcacgtggagaatctggctaaggtagcagcgggcccgttcacagcagtcccctcattggcagagttcctgctgggtaaaggtattcccccggggccgctcagcattccggcgccccccaaggtactggtatatcaaggcccctatgctgtcgcggatgcttccaactacgggcaagtacttcagatggttggcagtcgtgttgagcttgtgggttgcatccatgaggtcacacgtcgccgtgctaagaatggcaagccctacatcttcgtgaactttgccgattggcgtgggttggcggtaaaactctcgatttggtcagacggaatggacgccatccgccccaatctcccggatgagtcgtgggttgggcgttgggtatcggtgatggggttggtcgatccgccctatagcaaccgcattcggtcgataagctatacacaccttgcgattaccatctcttcttccggacaaatacagacgttgaccgagacggatgctgcattccgccttcagcgggccggccagctcccgggcactgccccagtccagagaggtagtcggaacgcgagtatcctcgtgggcatggggggcggtgcatctaagccaggtgggcccttcgctccattgcctccatcagcgccgccgcagacccgaaaccagtccatcttgggcggcatgcaacggcagtctccgggtcggtactctatgccgcctaagcagcatatgccgaatagcgcgcctcccgcagcactctcatccaacaaaggatgttggccgattgttctggtcgggttcttccttttgctggctttgagggcctgtgctgggtag

SEQ ID NO: 531408 - DNA, 723 bp, Stenotrophomonas maltophilia
atggcattgtccgttctattcgaagggacggtggcaaagcacgctgagtcacccgatgacaatgaggatgcgtaccgacttgcccctgagaagggccggctggtgctctccgatggagcttccgagtctttcgacgcgcgcaactgggcgcgtcttctagttgaccggatgatcgatgaggacctttcagttggcgctgtgttggcatgcgctcaggcctatgaagagctgcatgacccaagtgaactctcttggtccaaggcggccgcataccagagaggtagcttcgccacgcttctgatggttcaggatctcccaaactccaactcgatccggatttcttctgtaggggacagcttggcgatatgggtggatggcgatgatctggtggcttcagcaccctatgagaactcgactcagttccaagagaagccgtcattgctgtcgactcgattggatctgaacgacttcgacgagccgcatcggatggttcgagaatggggatatgaggctctggggcaccggttcttgctctgcatgacagacgcacttggtgcctggcttctgtcttaccaggaacggggcgataggtccgcgttggaagccctgctaagcatacgagagcctcgggagctaatcgacctcgtggctggggagcgcgcagctggtcgcatgcgtcgagatgactccacgctgatcattgtgtcggtcactaagtcttaa

SEQ ID NO: 531409 - DNA, 996 bp, Stenotrophomonas maltophilia
atgccaagccgcaccggccaacttggggctttgaagcgtggacaccctatggacatcatctatcttgatcagaatcactggatcgatctttcaagggttcatgccggcaaagtcaccaaaggaccgcgagcggacctttatgacgagctcctggcggccgtggagcgcggcgcggccttgttcccgctttcggcctctcacatcctagagacctccaagcgcaatgaccaagcgagcagatcgaatctagctgcgacgcaggtgaagctgagcaggggatacgtctaccgtagccgacccggacgactcaaggccgaggtgcgcactgctctgcgtcgcctatttggcctgacgcgaccatcgcaggcggaggaattggccatagttcctggctttctgcaagcattcccccccttcgactcttccatcgcctcacctgaggcactccttcttcttgaacgaatcaatcgaaatttcgcgcctgccgggcagtactgggatttcatggcaaaccaggatgatgatcgaaggagatctacccaccttctgcttgaggccatggctggaactgccatctcggacatccagcgacaaagaaaccttctcaaagggagttctgtcgaccttcagcgccgcgcttatgcgacccaactgtttttggcacacagaccgctatacctagagctactgagcgaactagagaggtctttcgaagagctggtttcgctcggagatgaagctctacgagcacttgtgtgggaggtgcccacactagatatcgaggccgaactaagcgctcgcattggggcggagaccagagaactagactctcatgatctgtttgatatgcaagccatgtacaccgccattccctactcacaacacgtgatcgcagaaaaggcatctgtgtcgcgtgcgcggcaggcaagactggacaagaagtacaacgccactttgtcctcctcacttgacgtactccagggcgtgtacggctga

SEQ ID NO: 531410 - DNA, 600 bp, Stenotrophomonas maltophilia
atgattcctgtgggggcgcagccagagccggctgactttgacgcgaaggtccgggtgcgcggtgcaaggtcgatgagaactaagggcatcgacccagatcagccactgccagtggataagaagctcagtccgttctggcgtgactgcctggatgatctttatcgcgagtacagccagacgtgcgcatacctagctgtctacatcgagcgggctgttggtggtgtgacagccgaccactttgtggctaagtcgaagatgccggggcaggcctatgaatgggcaaattttcggctggcaagctccattgtaaatgcgcggaaatgtgattttgatgacgtcctggacccatttgtcctgctgccagggtggttccggctggatttggttactggacaaatctatccaaattcggacctcgatccggctgacatagaacgggtcgccgacacgattgaacgagtgggtctcgataatgagacgaatcggaagatgcgggctcggcactttcagtactactgtgagggagatatcaccgagaagttcttgcgaggatattcgcctttcgtatgctatgaagcagagcgacagggactgctgtag

SEQ ID NO: 531411 - DNA, 1293 bp, Stenotrophomonas maltophilia
atgatcgaacagctctcactgcgcaatgttggcccctctccatcgatggagctcaattttggtcgccgcctgaacctattgactggcgacaatggcttgggcaagagcttcctgctggacatcgcctggtggtcgctgacgcgcaaatggcccggtgagctcaatcgtcgtctgccgatggggctgccggccaggcctcacgctgataagcccgcgtcaatcacgttctcggtaaccggacagtccaagtccgttacgtacgaaagcaagtttgaccgcaaagcccaagcatggaccggagcggcggggcgaccggtcaatccgggcttggtgctgtacgcgcaggctgacggtagctttgctgcctgggacccggcgcgcaactattggcgtaagaaggggaatgtggacgtgcaggatcgtccacccgcttacgtcttctccactcaggagatctgggatggcttgagggactctgaaggccgagtcctgtgcaatgggctgatcgccgattgggcgagttggcagaaggagcgcggagatgccttcgcgcgccttgaggctgtgctttcttctctgtcgccagcggaaacggatcgcattcagccgggcaatcttgcgcgtatcagtctggatgacgcccgggacatcccgacggtaagaatgccctatggccaagatgtgccggtgctgcatgcttctgctggacttcgccgaatcctggcccttgcctatctgttggtctggacctgggaagagcatctgaaggcgacggcgctgatcggtggaaagcctgcccatcaagtgaccttcctcgtcgacgaaatcgaatcccatctgcaccctaagtggcagaggcgaatcgttgctgcgcttctgaaggtaacgaagtcactggctgagaatgccagtgtccaggtcatcgccgcgacgcactctccattggtcatggcatcggtggagcctatcttcgatgcagatgaggatgcttggtttgatctggactttgaggcaactggaaaacaccagtccgtagtcgtgcggcagcgcaagtttgtgatgcgcggtgaggctgggaactggctgaccagtgaggcctttgatcttcgctcctctcgttcaattgaagccgagcaggccatcgaacgtgctgcattagcaatgaggagcccgaacttcagcaacttagacgcgaaagcgattcaccttgatctgcagaaggtacttggtgacaccgacccattctgggtgcgctggcgctttgtaggtgagaagaagggatggtggccatga

SEQ ID NO: 531412 - DNA, 402 bp, Stenotrophomonas maltophilia
atgaaaataggtaggttcacaagcatcctagcgatctccggcctcttaaccggctgttcgagcggcacaccaggctgcgcggactcagacaccctggcggtcatcgatgaggccatcaagaacgaagtagccaagtacgcggcccacacccgcctgagcacgcaacagcagttcctggagatcggagagagctacaagatctcgagcatccgcacactcgaacatgacaagaccgtcgacagctaccaatgcgacgcacgggtcacctaccaactcaagggccgcgagcaatcagcggacttctcctacagagtcgacaccgatcaaagcgacggcaatgtccttgttcagtatcagaagaagatgctcgctccgatcatgagcttcttcatgagtggctga

SEQ ID NO: 531413 - DNA, 378 bp, Stenotrophomonas maltophilia
atgtctgccagagagttgagttccgcggtttccgctgagatcccgctacttcgacagaagtttgaagagcttgagggtgagttcaacaagatctggagtgacatggtccatggtgggatccatctcgtgcgattgcatgacgcagagcgggaatacgaatcaaccgcgggctctggcatcgtgatcgaactgatctatcgggtggcgatggtgaccaccatcaccacgtcctacatcgctatgcaggcctcgaatgaggagaactcagcgagagcggcggcgttcaaggcgcttgacgctgaggtgacagaactgcttagggactgtcataagcgggctgcagacccgaacctcttgctgcgggccgcatctgcatag

SEQ ID NO: 531414 - DNA, 2352 bp, Stenotrophomonas maltophilia
atgggagtcttggcggatcggcccgcgttggcgattgaggggaaggaattacatgccctctacaatgatcgtgatgtccacggagaacttgagtctccaaattccgtgcttgcattgagtgagctcagcgtctgggagcaggattggcttggtctctgggccgatgcgaacaggcttatggccacccgggagatggctacttcccgaagcttcttggaccgcgtcgagagcgatccgctgacggaagagcaggcaatggccgtgttctgcttcgacaaccgtgttcaggtagttgcgtcagcaggttccgggaagacatcgaccatggttgcgaaggcggcgtacgctattgagcggggcttcatggcacctgagcgcattgtaatgcttgcgttcaatgccgacgctgcaaaggagttgcgcgagcgagcggaagagtctcttgaccggcttggaatgccagagatcaccatcgatgcctgcaccttccattcgctaggtttgtccatcattcgaaaggccagtggtcgcaagctggacgtccctgaatgggcaagagagtccgacaagagcttcgcgaagctggtggaactggtcgatcagcttaaggatcgttccactcacttccggagccagtgggacatctttcgccttgtgttcggtcgagaccttccgcgctcggcgcccgagggactcgccgatgggtatgattccaacggcaggccctacttcaatgccctgaatggatctcgggtgcagaccatggaggagcgggtcattgctgactggctcttctacaacggggtagtttttgagtacaagctcttctacgagtttgatgccgtgcgggacgttcatcgtcagagccagccgcacttctattacccagatatcgatgctcaccatgagcacacaggttgccgcgccggcctgacgggttccgggcgccaggcaagccatgccgaggacctggcatggcggcgtggccagcatgtccacactggtcgagttttcatcgagacgacgtcgatcgagcttcgaagtggacaggctctgatggatcttgctcagcgtctgactgagctagggatcgaacttgatccgaaccccgatcgtcgtttgccggagaggtcgactccgcctatgtccgagaaggatctggtggggcttatgcgcacattcattgcacacgcgaagagcaactgcatgtccttggatcagatctctgatcgtctgcggcgtctgccagatgatcactacaaggagcgcctgcgtcgattcctggagcttgcaacgtacgtctaccaggcatgggatgaggccctttccgcggaagggggaattgactatgaggatatgctcaacatggcatccgtcttcgttgagcaagggcggttcgagccgcagtatgacctggtcatggcggacgagttccaagactcctcgcgggcgcgcgcccggctctgtgccgccctggctaggggacccgggaagcatctctacgcggttggcgatgactggcaggccatcaaccgatttgctggtgcggacatctcggtgatgactgagttctgcaagtggaatgggcaagggcaggtgttgaagttggagcagaccttccgcttcccacaggagctgtgtgatgtatcgggacgcttcgtcactcggaacccgaaccagatcaagaagacggtccgttcttcaacggaaccggtaggccctgtgcttcaggcgttccaagtcaatagcagggattctgtggtggatggtgtgcggcaatacttggcacagctccatgagcaacttctctccggctcgcttcccagggggaaggatgggcatgtctccgtcttggtacttggtcgctatcgatcggagcgcgacaaggtgcctgcggattgggaggagctcttcggtaagaccatcaaggtggagtacctcaccattcatagatccaaggggaaatccgccgattacgtcgtcctgcccgggatggttcggcggagcttcccgagtgtcaaacaggatgattcagtgctatcgctggtgatgccagaaggagacacctatcccgatagcgaggagcgtcgactgttctacgtggcaatgacccgcgcgcgccgttcggtggtcatgtttaccgtacgcggtagggtgtcgccctttctgggagaactcctgcaggagcgtgcggtcgagctcaggacccttgggggtgtgccaattcaggatgagcaatgcccggtctgtaaggtcggtgtcttcgtcgacaggatgggcagcaagggtccatttaggtcgtgctcaagctatccggattgtgagaacaagccaaagcggcgacggtcctag

SEQ ID NO: 531415 - DNA, 408 bp, Stenotrophomonas maltophilia
atgcagaacgaacttcgctcctacatcgcaagcaattcaatgaacttggcgatcctgctcagttcggccaacaggctgggagtggaactctacgtggaggttcacagggaattcccgagtgtgtttatcgatacgctgcccctgctggcaagaatgtgcactgacctgtcgatctcggtgtgcgagcttgatcggctctgccaagagttctgcgaatctgaccagtcgacactgcaccgcttgaatggagttggcgaatcaagagtgccctacaaggccactgccagctttctcttgatgctggtagttgcccgacgcaatcgggatcgcctcactaccgccgatcttgaggcctacggttggtccactgagcttgccgggattgtgctagaacatcgcgatccttag

SEQ ID NO: 531416 - DNA, 1113 bp, Stenotrophomonas maltophilia
atgctgaagcttcaagagaacatcctggatcagtggtccgaccgggccgtcgagtgcgacgatgacagctaccggattcatctgagcactgaccatcccaaggagatcgttcagatcgaccaggctatgcgagccctggtgaagtcacagggcgagctgttcaaagagcgaaaggatggtcgcagacgttctgtggatattgaccccgttgcagaagcggtgcggagatgtgcatcaatcgactaccgagcgattgagaagttctactgcaagcacaagctcagcccttacttcagaatgctggcggatgagttcaggacaacccgggccagcgccattactgcgcgatacatcgatgtcgagcaggctaatgcatgggttgaggccatgcgtgagagggcccgggccagcgacttcactgatcttcttgctgcgcaggagcgaagcgcccgcaagaacgcggtctccgcgctgggttacatccgtggacttcatcggctcgtcgcgaggctatgcgtcgtgcgagtcgatctggcgtatagctctgatttccgtgtcggtttgaacggaaccgacgttgattctgcgcgaatcaagcaggatctgaacaggcttcttcgggtcctgcgagctaggtaccctgcactggtaggctacgtctggaagctggagtatgggcaaagcaagtcgtatcacatccatttgatgactatcttcaacggaagtttgatacgccaggacgtggctgtaggtaaggcgatcggcgagatctggcgctacgagatcacacgaggcgatggtggctactggaactgcaatgcacacaaggacttctacgaacggcgcaatggtgtcggcattggaacggtggcttactatgatgccgagaagcgaaagcgactggagcaggcactgctttatctcaccaaggtggactactacgttcgtttgaatgatcctgaggtgggtcggacttttggcaaggggcagcttccagctgcatctgcccgcgtatcaggccgcccaagagctcgcagtaagaaaaatgcgggagcttgggggactggggagcaggcagtctcctcatgtggcgatctacgcctgattctctaa

SEQ ID NO: 531417 - DNA, 546 bp, Stenotrophomonas maltophilia
gtggccctgaccaccctcaaatcgctcgacgcagaaatcaagctgcttgaagcccagaagaagctggtagaaaaacgtgatggcgaggtgcctaaggcactcgcggtgatccagaagtacgccaaggtgctaactgcggctcagcgccggcagctggcaaagcttgttggagaagatgcttccatcgtcccggctgcaggacccaaggctgcaaggacctcattgaagggccgcaagcttggtaaggttgcccccaagtaccgcctgcccagtggtgagacctggacgggcagagggctgatgcctaaggtcttcgctgcctggctgaagtcccctgagggtaaagcctgggccgggaatggctccggcgagcgcttcccgcccgcatcggcgggtcaggctcaggccaagactctcaaaagagttaagggcaaagtcggagataagccgacgaagacggcccggaagaaggccgctggcaaagtcgccaaaaaggtggttaagaaggccgctcgaaagccagctggtcggacgaagaaggcctga

SEQ ID NO: 531418 - DNA, 201 bp, Stenotrophomonas maltophilia
atgatggcgcaggttcaaatggacgagatcgttgatcatttgagctcagagatgcggaaggcacttgcagacgcggtgcgtgaggttgcccctgaggctaagatcgactcctaccagctcttccgggcattcaagcgcgcagtgcggcgtaagtgcggcacctgggagacggttccggacggagccgttcaggcaaagtag

SEQ ID NO: 531419 - DNA, 348 bp, Stenotrophomonas maltophilia
atgggagtcattctctacaacctcgtaatgaccttcttcctcatccctctgacgatcagggcctacctgagtctgaagaagggccggctaccgctgcctcacttccagaacaacgtggtggtcaaccgcatcaagctgcagaaggcgatcgggatctggtccccaatcatcttctgggtgttccacgtcggatgggtgatgtggaatgcatcgatcgatgcttggctgggagtagcggcaacgatcgcctacatggtttccagtgcgatgctctcgggccaggtcaaggccaagcgaattggtgtcatgtcagagcgtgcggcggaatcgaaagaaaccgaaagctga

SEQ ID NO: 531420 - DNA, 228 bp, Stenotrophomonas maltophilia
gtggcggccacacgcatcaaccgttacgaacgtggtgtccacgaccccgacagtgccaccgctcagcagcttgccgatcgactgggcatgccgctggcttacttctacagcgacaacgatgctttggcggaggccatcttgatgtttgcggggttgtcgcccgaccagcagaaggaagcgcttgaagctctaaaactggtcgccagcagagcatctactggcgactga

SEQ ID NO: 531421 - DNA, 663 bp, Stenotrophomonas maltophilia
atgagcttgactaagacggtagatgcggaagggccggttgtcctggcggagctgggagctagtgcggacagtttggggcgatcgcgtcaatgcgagccgcaggaaaagggcgggagccatgtcactgcagcaggcgcagcgaaaggccagcctgccctgaactcggaagcgatgtctttgggggggatcgaacctggtggtcagcctgatgaggcgctcaagagaagggaagatcgggcaattgagcgtgcgttgagcattcttgaggcacgggcgaagaagcctggccggaagatgagcagtgtctcgctgtctggcgcattcttccgtctgcggctaggtagtgagatccgggagcactttgaagtggcatttctggattcccagtacacgctgctcactgtggagcgattgttctcaggaacgatcaatggcgcgtatgtctctccgaggatcgtggttcagcgtgctctagcgctgaacgcggccgcgattatcctggcccacaatcacccgagcgggaatgtcgaggcatcttcggcggatctggcgatcacgtcccagatcaagagcgttctcgacatggtggatgtgaagctattggaccacttcgtggtaactgcggatcaggctctgtcgatggcgggtaagggactgctttag

SEQ ID NO: 531422 - DNA, 126 bp, Stenotrophomonas maltophilia
atgacgaaaagcaagatggagctgatctactgcgtgatggtggtcgccaccgccgtggtagccgggatagtcaagtactcagggggcgcagtctgcatcagctgcggtgatcacctcgatccgtag

SEQ ID NO: 531423 - DNA, 798 bp, Stenotrophomonas maltophilia
atgttcggacaaggcatataccgctcctacgatgaaacgccagagctggatgagtgtctgcagcgcgctcaagaggacatcagaatcgcctacaacgtcagggccaagcaggcgaaccccttgtgctcattcgttgacgaatggaacctcctgtgcgaggacatcattggcggcaaggacaccgccagcaggcttgacctcatcgccaatgacatgcggattcatggggcacttcctgaagtccacatccttatacgagtgccgattgtcctctggctcgaagcaaagcgtgccttcgatacgggagacagggatagatcatgggccgccctggttcgctgcaactactacattggcatgtgctactcccatgagacgcatatcgagcgtgcatcccgaggtgggaagaagtcctcccagtacgtcccctatctgcgcagcatgctgctggagcgtttgaaggggatggaggacaaatcccgagccacgaaacaggaggtctggaaagagctggttccgctgatggcctccttccgagctcccacttccgaagatatcaacacgacgtcagctgctcacaggaaagaggctgggcagggcagcaactcaactgcgagcgctgctgcatcggggaagagcgctgccggcaggagccagaatcctgaacagctcatccgccgctggaccaatagtgacaaggagatccgcagcgagttcgaacgcgtggtcgtagcagacctcaacacccgcgccaagcgatcgacccaggcaaagactcccagcgggaaaacaccctaa

SEQ ID NO: 531424 - DNA, 3309 bp, Stenotrophomonas maltophilia
atggattcggaattggacctatctggaatcgagatctatgtaggcgctccagttgaggtggcctcggagcgcgagatcttccttgccttggtgaagatgattggtgaagcacgcatgcaggccatcgtcttcgcgaatttcaacgtaggacgccgtcagctagacttcctggtggcaacggattctcagactctggtgatcgaggcgaagcacttcgccaggcgtgtccggggtggagtgaacggaacctgggagatggatttgccgggtggggcgtccaagggagtgggaaatccatacctgcaggccctggaagcaaagaacgcccttagagatgctctgagagagcgtggcttcgagctggaaggctacccaaacgcctgcgtcgcaatcgctcccggtatcccgaagaactcccttctgccgccctctgacttcaaggttgcaatcaccgatacgcaagggctacttccagtcctcggacacgcttccagtctggtgctctcccagcagctatggcggagattcgcacagacgattcagctacgacgcgtcgcaacactggacgaggcattggacccggctctgacacggtgggaagacctcgtcaaaggctaccgcgcggagttcgatcgactgtacgcgacagatgccgcgttactgaagaacgacacctacctgcttggagatgatcgtgtcggcgcgcgcgaggttgccatgcgcgccggtgtgaacggtgatgatttattgatagtcgggccatcgggttgcggcaagtcactgttagctaagagcatcgcagttcaagggctgtgtcagggccaggtgcctgtcttcctgcaggccaagtacttcactggaaggcttcaggaactgatccagcgggaggttggattgcttggggactgctccgcaaaggatctaatcagaggagcacaagcgactggccgacagttgcttctcatacttgacggatacaacgaatgcagcgtcgatgcacagctggcccttactcgaagcctcgctgcggctgcccggcggctgggctgtcgcctggctatcaccactcaactggggattaagagaccagaccttatcaccgttgttcccgttaccgtgagcaggccaagcgaagagctgaaagctgcgatctcaggggccagttgcggggaaggaacggagcacctgagggaccttctcgcttcggtgtcgagtggattcgaagcggacctcgtcgggcaggttggtgagtcacttgctgagggagctggccgctttgcattgttcgacgcgtatgccaggcaacggttgggtgccgacgagttcgacggagtacgcctgctggcagctgtcgcaaagcatctaattgatcgggtctcgtttagcctctcggttcgcgaactggatcgattggcggcgacggaggggctctcaggagaagtgctccgtagagtccttgccacggacatgatggtgaggcggaccgacagggtcagtttccggcatgaactgatccaatgcgcattcgtcgcagagttcgttgctagaagcagctatggcgatgtggacaaggcgcttggactcctcgatgcgccgatttacaggaatgcgcgctctctgatcctgggcgcctatgacaatgacgagtttgttgagcgcatcctgtcggcgactgctgatgcggatcttctagagagggccgcaacgggcgagtgtgggcgtgcagcacgagcttgggtaagcagtcggtgcggagagatagtcgagaagttggccgtagaggcgtcgaagctggagttctcaataggggaaggcaggtggggaccggcaggagcgtgcgaggaaagcgcccttcactgggcgccctctgagagagccacgatgccatcgatctgtgacgagttgcggcgaggagctcgcatcgacgatgttctgaaggctgtagcgacgatggactgctctctcgagcgggcgttcagagcgctggaggttgttcccgggattagcagaggtaggcttcgtgacggactgttcgcggacgcttacgtattcggacgcaacatcgggatggctcatctgtttcggtccgtgtccaacggcatccgaacattcagagggagcgatgtagagcctgatgaggatgcggcatgcagatgggcgtcagcgaagacgccaggtcagttgtacctcatgctgacgctagcccggttctctggcgacagcgtggcatttgttcctctcgtcctccctctaatggcagaagggtggtcaagtcttccctaccacctgcagctggaagtactgaacttcgcaagcttggttagaccaagcagcgaggttgagcgacaggaacttgcttgcgctctggacgccttgttgcccagcctgaatccagttttctcggggatggtgctggaggcacttgagcgcttggggctgctcgaggagcagtcgttccagcatgcggaagcggtgaaggcggaagttcaagctcttctatgcgcacccgaaagcgctgagaattgccagcttgcctggagtgtctatctggggcagttcgatcacccgttctcctccaggtactgcgaggttgttggcgacttgagtcgcgacgacagtaagaggcttctggagatggcctgccttggagccggcagagcagacctctttcttgcgcctttgatccaggaactagcgaagttcaatgatcgttcggttgctccggccatagccaagtggctggggcttcctgagatcgatagcctaatgcctcaggaggcggtttcggcgttcgtctggtcgcatgcagccatgggaatgcttggcgtcgagagacctgaaaacccaacgaccgcgcattcaaacgcgggcattgcgctggcgtccttgggagacctgtactactggattcatcgcgaggatctggggccccaggagatcgaagacaaatgcaggccagcgcttgaggcgcttttggatctgaatcagaccggcgcggcctctgccttgtgcatggtggttcactccatgtcgtacgaggctgatacgagagagtcggttctacgccgattccctcgagaaatggcggctatatgtcggagatgtctgctaaggcccgctcagcaggttggctactttccgcacttccagcatgacagacttggtgtcttgcgattctcgatcaatcttcttggatacggtggtgatgtgcaggacttgcgcctcctgcgtgagctgagccgagatgtggagcttggggaatcggcgatcagcgctatcaggttgatcgagagcgtggcggtgcagtga

SEQ ID NO: 531425 - DNA, 471 bp, Stenotrophomonas maltophilia
atgagcgtcgaccttccgctgctgaagcagttcgtccatcaacagccctatatccaattggccgttgaggcgatggagtctcttcaacctcactttgagggccactctcacctgaccgctcagcctgagggtgcaacgaactcctcacacttcaagctgaccctgtatgcccaccccgtggccgggggtacccccatgcctattctgattctgaagttttccccggggcgcgtcgatatcccgaacatgatccttccgccagatctacatcgtcgcggcgcaatgatcggcgcgctgggacgcatgacggaagctgcggtgccaatgaagtacgaggtcaatgtggttgacctggtaggcagccaacgcctgcgcctgatcagacggggagctcatcagctccctcagcgggatgaagttcagctccatgtagggatgaacttcactccctcctccaaacccaattcctga

SEQ ID NO: 531426 - DNA, 369 bp, Stenotrophomonas maltophilia
atgctgtttttgctgtgcttctccctcagcgcatgcagtactcaggttgcaatttatcatcgtgtgttcatcacgaacgtttgcgatcgcaacttgcaggtgagcactctgaacaccctcaactcaagcatcaagaccactgaatttctcgcagcaccgtacgatgaagtcatcgttgccagctacatttcgcacggcagaccgatcatcgacctggttgacggctacttcgagctactgatcgtagacaaccaccactccaggtcgatcaggcgcgaagagttccggcgctatctgggcaccgcccccatgactagaagtggggacctgcgcacttggcacatagtggatagagacatctgcccctag

SEQ ID NO: 531427 - DNA, 576 bp, Stenotrophomonas maltophilia
atgaagaatcatctttctgagctggagatcttcaagaatcacgtcgatggcaatgatcaggccatgaagcttgtgtctgagcacgcggcgttcaagttcgaccccgacagtgtgcctctgagacttctgacgggcgagttcctttcattcttgaaagaccgcttggatagccccgaatttttctgttgggcgggatactggctcaacagggacgatggtggttctccgcggcgcctctggctcgcacatcagtcgctcttctctgacagggccgacagtgatgcgttgttcccacggatgcatccagatcgagaggaaagccaagttcacgagactttcaacaacttctacatcgggatgattctgtacagcttgactaagcagtgggtgctgaacaacggtgaatttgatcgagacttcttctggcttacggatcagagtggtgatgctagctttcaggatcgagtgaacgatatattccgtggtcagtttggtgtgagcctggatgagttcgagatccttgatcacgaggccatatggaagcaggtggaacagttcagtggaagtctgccgtag

SEQ ID NO: 531428 - DNA, 441 bp, Stenotrophomonas maltophilia
gtggctaagcaggccgtcacccatgagcgggccgatcagctgcttgaacgcctgcaggcgattcaggctgacccgccatatcaatgctggcttggcggcgacgacaccgatcagggaatgtcctactgccgcgactgcgcccagaaagaagtggatgcgcgaagggccgagttcgttgacggcggatggccgcaggacagcgacggcccggtcttctgtgaatcctgccgtacgctgctgcagcacgatctcaccgagtacggtatcgcccagcagctggaaggcatgctgcagtcccacctgcgttcaccagttacggttgatggcgcgtacgaaatcgcccaggtgctaaccaaccaccgagagcacccggaagtgctggcacttgttccgaaggtcgagcggctgatgtccgacagcaaggcggtgggcaatggctga

SEQ ID NO: 531429 - DNA, 426 bp, Stenotrophomonas maltophilia
atgagccccatcacgttcaagaagatcgccgccgacggttccgagctgccggacactgccaccgaccacgtcgccgtgctgctgtccgactacggactcaccttcaccgccaccaacatcgtggacagcgacgttccgcacgccgagtgcgaggccgccgccaaagccctggacctgctcggccacaccgactgggatctgccgaccatcgaggagtatcagctgctgatcgatcgcagccgctactcgcctgccatcaacacggacttcttcaaggacatccagaacgactggtactggtcgaagaccccggccgcctggtcctcggcgtccgcgtggggcgtcaatttcagcctcggcctcgtctactacagcctccgcagcaacctcgggttcgcgttggccgtgcgtcgtgccggtcagtga

SEQ ID NO: 531430 - DNA, 552 bp, Stenotrophomonas maltophilia
atgaacgccatcaccatccgtaccacgggtaacgcggagatctccatctccaacgaaaccatccagcctagccgcctgagcgatctcgccgccagcgaattcatccagcgccaagaggcaacaggacataccaaactctttgccaacggtgatagcgccgacggcagcgacccgcgcaccgatcacgtggcggttatcgaccacgccactggcctgatgtggacggccaaatcgatgggcgacgaggacggcgagccacttccccatgacgccatcaccgaccgcattacgaagctggatcttttcggctacgacgactggcgcccgcccacccgcgccgaactggccgccctggtcgatgacacccgccatgagccggccatcgatacctctctgtttcccggcgtgctgccccgctggcactggaccagcacgccctgcgcctggtcctcggcgtccgcgtggttcgtccatttctacgacggcggcgtctacggcctccgccgcggctacttcgggttcgcgttggccgtgcgtcgtgccggtcagtaa

SEQ ID NO: 531431 - DNA, 273 bp, Stenotrophomonas maltophilia
atgaccgccgcactcaagccgaaagaacgcgccgcgctgctggcagcgcatgccgcttcggaccacgcactgcaccgcacccgcgccggtttcgcgcccacgaaccgaccggagagggtcttcacccgccgcgtcatgaactggctggatgagcgcgtgctgatccggtacgacgacccgcagctgccgcgcaaggcgaccttgaccgccaccggcatcgccgccgccgaggcagagatcgccaaggcacgcgacctggcgctcacggcatga

SEQ ID NO: 531432 - DNA, 321 bp, Stenotrophomonas maltophilia
atgcgccagacctcccgcccgctgcctgcatcggttccctcctgcggccacggccatcgcccgcagatcgtcaccaccagaggcgcacctaccggccatcgcctggggacggcctgccccgacctggtccacatcgagtgccaccgctgcggcatcgcgacccggccggttccctacgaccgtgccgcgttggccgagctgcgctggaccgacagcaccttggcccaccaccgcattccgatctcccacctcgcccgccaccgcggcgaagtgctggccgaactcgcctcagccgccccttccacctccatcgcagcctga

SEQ ID NO: 531433 - DNA, 273 bp, Stenotrophomonas maltophilia
atgagcgcgctcactgcagccgcgatcctgcgccgccttgatcgcgaggcgttcagccagctctgcgctgaggccgcccggctggcggtcgagaacgaggaactgcggcaccagctttggctggcggaagacgccgcacgcgcttggcaagaagacgcgatgaacctccagcaggatctttgcgaagcaactggccggcaccctggactcaccgtcgatggctcgctcgtcgtcgtaccgaactgcgaatcgtcggccgaggtgcgcgcatga

SEQ ID NO: 531434 - DNA, 231 bp, Stenotrophomonas maltophilia
atggcagagatcatcagctttccgcagcgcatgcacttcaccgcgatccgcacgtacgccgccgcttcgggttacggcggcgtggtcgcggtgttgttcgcaccggcgagcctggctcctgcaggccggcgacttcataccgtttcagccggccagatgtcagggcggattgctgccagtgccagcggctcgcatcccaacgaactgccgatctcaaccgacgccagctga

SEQ ID NO: 531435 - DNA, 204 bp, Stenotrophomonas maltophilia
atgagcgacgaaaccttagtgaacggcagattcgttggcgacgacgctgcgtcaacgctgacccttactgtggccggcgacgttcaagtgaccgtgattctgaacaagcccggaaatcaaggcagccagcgtgagatccgacgcgaggcagcgatcaaggccatcgaattgctgctgttcgaagcgaatcgcggactcgtttga

SEQ ID NO: 531436 - DNA, 582 bp, Stenotrophomonas maltophilia
atggatctcgattggaaggtcatcatctcaacgctggttggcggcgcgataacgttcgcagcgaccactgggcaggagatgcttagaaaccgacgggtaagtagggcggcaatgttgtccgtcggagcagagatcgtggctgggatcgatatcgcgcgggcgcgaggctgggcaaaggacatcgaagactgcatagagcaggccatgcagggaagggttgtgcggctcaccattctattgccgaaggatacgatcccttcgtgccgtgctgctctcggacaagggaccttgggggacggtgagctaactgggctggtgacgtgctttgtaattgctgtcgacggcctgaaagctgacctggatcgcctgtttgagtacgatttcgatagtcccagatgcttggtctctgcggatgacccagagcacgcggtgaagttatatgcggagatgcttgggttgctggttgcgatcgagaacttcggagcggacgccatcgctcttgcggccaaacggctgggtcgaaagggcaagtggctgcgacgaaagttcgagcgtttggccgcgcctgaaacgttaaggtag

SEQ ID NO: 531437 - DNA, 426 bp, Stenotrophomonas maltophilia
atgacgaaacgaaatcgctacgacgagcacggcacgtcacgcgcgattacgccggcgatccgtctcatgttgggaatcttgctgatctggcaaatttcgtcgctagcaacctcattgggcttctcggtcgggattctgcgcaccgcctttctgccgttcgctggagaatcagaatcgttgccgccagccgtgggcgagtttgcgcaccttctgcgcatccagacgaaggcgccggtgtcctgttcgctcagtgaagaggtggcgtcggacagcctgctgatgcagcggagtcatgaggccgtctaccccgtgaggattgattcgagcagcaccagctgcgtactgagtacgggcgcaactgcggctgcgtctgcctgcaggctaaagtcggagggcgaccatgcgcgcatcttcaattgtggttaa

SEQ ID NO: 531438 - DNA, 1191 bp, Stenotrophomonas maltophilia
atgcgcgcatcttcaattgtggttaatgcacgcagctatcctgcaacctggcttggtgcatcactgcttcttgtctacctgttctatgcagcgggtgtgggcgggatgctgctcacggccttggtaatagcgtgccttggcatattcgtgactgtcgcgtcgacgcagctgttctcccgacagaatcttctggtagtcctgtttgttcttgcgttgtgcgtcatcgcactggccacgccatcgccggcatgggatgcgcgctcgatctggttgtttcatggaaagcggattttctatgacgcttcgctttacgcgcagttggataactatgcggtctggagccataacgactacccgtcattcgttccagcgctgatggcctcggttgcacatgtgctcggtcattggaacgacgtatttcccaaagttgttgtcccgttggcgatgctcccccctctgctggttatccttcgccggcttccccgactggagtggcgcatggcgttcctggtcgcgctggtcgcattcggtgggactcacctcgttgacggctacgttgacgctttacttgcgttggcgttcgttgcggtgttccttctgatcaatgagatcacggcgaccgacgcgcctgggctcgagcagtatctgcagctggtcgtgatggcagcgctgttggcactggtgaagaatgaaggcgccgcattgcttctgtgcgcaactctggcggggattgccggcctgcttgtccgcaggcgcagagtgaattttgcgatggtggtcagccttgctacggcattgttgcccttgctggcttggaagctgagcgtctccaatgcaggcctgtccaacgatcttgccgggtctgacctgatgggccagatatccggtcggctcaggagcgttcagtcctactggctgctgatcgatgcattgctgttccgcctgccgagcctgatactgctgccgcccctgttgctgttcgcctttaccgctcgcagggacagtatttcgctctatgcgatgtctgcatgcgtgagctatctcgcagttctttttgtggtctacatgagcactccgaacgatcttgcctggcatctttctaccagcgctgaccgcacgttgctcccagtgtggcttttggcggcctgcgcgttgctcgttgacctgacccgcaacagtgagagggagtag

SEQ ID NO: 531439 - DNA, 393 bp, Stenotrophomonas maltophilia
gtgctgcgcagcgttgatcttcgccagttcgcccgatttgtagtgaatgggttggctgcgaccgcggttcacttcgggacactgacctttctggttgaagtagtaaacgtaggatccaaaggggtggctaactccatcgcagcggtgcttggcatctttgcatcatttctgggcaatcgcttcttcgtatttgcctcgaagacaggcagcctgcgcagggagctgctcaggttttccgcgttgtatgcgacattggcgctcttgagtggcgcgctgatggcactatgggctgacgtgcttgctttcgactaccgaatcggcttcgtcgtcatcagcggtattcagctcgtcctctctttcctgggtaatcgcatgttggtattcaaagtatga

SEQ ID NO: 531440 - DNA, 1359 bp, Stenotrophomonas maltophilia
atgaaagtagctatttttggtgcgggctatgttggcctggtaacggccgcttgtttggccgaggtgggccatgacgtgatctgcgtcgataccgatgcgcgcaaggttgagcggctggagcaagggatcatacccatctacgagcctggcctggatttgatgatcacggccaatgttgctgcaaagagattgtcattcacaacccatgctgaggtcgcagttcgacacggcaacatcatcttcattgccgtcggcacacctcctggggaagatggaagcgctgacctcacctatgttcttgccgtggctgacaccattggccgacacctggatcatgacgcggtcatcgttgacaagtcgacggtacccgtgggtactgcggcgcgggtcgagacacagatcagtcaggcgctggctgacaccggccgggaaattgccttccatgtcgtttcgaatccggagttcctcaaggaaggcgacgcaatccgagacttcatgcgtccggaccgaatcattgtgggcaccgcggattcgtcggctgctgaacggatgcgggagctctatctaccgttcaatcgaaaccatgaccgccttatcgtgatggacgtaccttcggccgaactgaccaagtacgcggcaaacgcgatgctggccaccaagatcagcttcatgaatgaaatcgccaacatcgctgaacgcgttggcgctgatattgaacaggtgcgcaaaggcattggatccgatagccggattggctattcctttatttatcctggcgcaggatatggcggttcgtgcttccccaaggatgttcaagcactggccagaacatcggattcggtcggctaccaggccgagctgctcagttccgtcgaagcggtcaattaccgccagaagcagaaactctcgcaactgatctctcgccactacgctgatgatgtagccggcagaaccttcgccgtgtggggattgtcattcaagcccaacactgacgatatgcgcgaggcacccgcgcttgttctcattgcagacctggtagctcgcggcgcaaagattcgttgctacgacccgcaagcaatgaccgaggcgcgccacctgctttcccctctcggcgacaacgtttcgtttgccagctctgccgaagaagcgatcacaggcgcggatgcacttgtggtggtcacggagtggaagcagtttctgctttccagcttcgaatcgctgctgcagctccgtgatcgggtcgtattcgatggccgcaacatgtatgaccccgcaaaaattgaatctaccggaatcgcctactacggcattggcaggggtcgctcagtaaccagtgatcgcaacgggaatttaaaatga

SEQ ID NO: 531441 - DNA, 903 bp, Stenotrophomonas maltophilia
atgcaccggtatattggcggagggtacacgggagccctgatgattgccggctgcaatgggaaggtggcgaccaatcaacatcaggatgcagacacgcatggtgcagcaaccgatgtgcttcttctggtcagcgaaagcgctgatgtcacccaaagatggcggccaagcaagaccgacctcgcctggtcggcagcatctaccaccagcgaccagttcctgatccaattcgactctggaatccatctctggtctgcggacggcacaccacctcagcggatcagtgaacctacgatcatgtcgtcccctttccttgccgcatccaacgggcatgcatcgtggcattccggcgagcagatcacggtaatgaggctcgcggaccgagagagcatccttcaattcgctcgcaagcccacgttggtaggaggccattcccggcagatggtgtgcgcgctctctccggacgcagcgacgctttcctgctgttccaggccgggcgaaatcgagttcatcaatgtcgcacaggcggagaccgtgcgccgacatcagggtgattttgaaatgatcaccaagatggcgtggagcgcggatgggtgctggctattggccttggagcagtatggacgatggcgcctgatgtgtatggacacggcaacaggcgaatcccgccaagggtggccggagttcattgacatgacgcggactgacttcgcactggacagcaatagcagtcgattggccgtcatacaccgcggtcatgttgccctttatgactttgcggacatgagggaaattcaacgtttccccgtggatcatctagtccgtactgcacacattgcatggacaggagaaaacaacatttcggtacggaccgactatggatgcctttccacgtatgtagtttga

SEQ ID NO: 531442 - DNA, 2196 bp, Stenotrophomonas maltophilia
atgcgtggccgggccttggccgtgttgttgctggctgcatcgtcggccagcgctgcggtgcccgacggcgtggcccccgcgttcctggtgccggtcatcggcggcaaggccaaggcggatccgctcacgttctggcagcaaggcggtcagtggttcgccgagccggccacgtggcgcgaggtcgggctccaacttcccccgggtcaaacggaggcgatgagcgcccaagcgttgggtgtgggctttgctgtggacgaggccaccgcgacggtagccctggagctgccggccgatcggctcaaggcccaacgcgtggcccgtgatcgcaccgagcgcggacccatcgcgccacccgctcccggggtgctggtgaactacagcgtggccggcatggcctccgagcaacagcaggcgctctcgttgggccacgaggtccgcaaggcggggcgttggggggtgatcagcaccagcgggcaggtcaacaccgacgcgtcgggcaccggctacgttcgcggcgtgacgcgctggcagaaagacgatcccaaccgcttggtgacttaccaggccggcgatgtgttcgccggtccctcgtcctctccggtcaacctgggaggggtgcgcgtggccaaggacccgcgggcgttggacccgttgacgcccacgtatccggtcccgatgctcggcggcgtggcgctcgatccggccacggtcgaagtcctggccaaccgcgcccgcgtgctgcaaggccgggtggggagagggccgttcacggccgatggcagcgccttgggcaccggtgcgcagcaaacccaagtggtggtgcgagacccttacggccgcgaaaccgtggtgaacgatcagcgcttctacgtcgcccccacgttgctccgccaagggctcaccacctgggaggtcgcggccggccgggtgcgccaaggggagagcgattacgggaccttgggcgcgaccgggtcggtggcttggggcctcaacgaccggtggaccctgcacggcaccgcccaaacctcagcggacgggaaggccagcgtggcgttgggggccacgacggtgcttgggacctacggcacgctggacatggaactaggcacctccacgcaaggcggccaacgccaggccttggcctacgactaccgcggcccgaggtttggcgtgcgcctggagcacgagcgccaacaggactactggcgcctgcgcgcgcccggtgcgctggacgtggaacagcgcacccggggctcggtcttctggcggcccacgccccagtggtcccttcgggccagctattcgaacgtgcgcacgccacgctttcgcaccgcctacgccgacgccgggctgacctggcgtggcgacgggcacaccgtggccgtctccgcgttgcgcgatctggagcgcaaggaaacccgggtggaggtgggctacagctacgatttcggccggggcaagggcgtgagcgttagggcccggcaagccccggatgccacggcctgggccgtccaaggacgcgcccgccccacggtctttggaaccccggtgggcttgtccttgtcggtagacgagggagcggctggccagacggcccgggccaacgccaactggaccacccgggcagggtgggctcagatcaacgccgagcacgggcccagcggcacctggacttccggttcgatggccggtgccgttcacctggaccgccagggcgtgacgttcctaggtccggccgaatccttcgccgtggtggacgtgcccggccaagccggggtgccggtgagggtgggcggccgattggtggggaagaccaacgcccagggccgcctggtggtgggcgaggtgaccccaatggtgcccaccgaggtccgcgtagacgatcgggcgctgccactgggcacccagttggccgagatcgagcaaaccgccaccgcgggccgccaagccggcatgcacctcaccttcccggtcctgaccgagaccgcacgcaccttccgcctcacgggcccggccatcgaagcgggcacggtggccaagacagcgaccgagaccacccaggtgggctatgacggggtgctctacctggagcagccgcgccccggccagacggtggacgtggaaggggtctgcaaggcccagctgcctgcggaccttggggctgcgcaaacggtggccgaggtggcttgccgctga

SEQ ID NO: 531443 - DNA, 960 bp, Stenotrophomonas maltophilia
atgcgtaaggatgaacgcgacgtctatttctttgacgcgatctcggacacttggaaccggaaatttgaggggctcgctccgtttccgcacaagaagcttgttcagtcgatcttgaaattttatcaggccgacaaggccagcgtggtgaactcaaaaaagcaggcgatctacatcgctgacatgaaggttcatgccgatcgatgcgaaatgctggttgggttttccgacactcttgccgcagatccaactttctccgaccacggaaagaagtcgcggcgagtagctaaaaaggttggcgacgaagggctggaacattcagcgcacatcatctggaaatacaaggacgccgcaaacaccgctaactgtaatttcttgttggagagcgcgacgggaattccgtcctccaagatcgttgccttctttaatcgtctcctgagaatctattcagacgtgaccactgacttttgggtggacgatcctgaggcaaagaaggacgcggatgggaattttctccagatcaagacccggcccaaaattgatctggtcggtcatccttcagccgaattcttgaaggatctgaagctcggaacattgcaggaggttgagcttttcactgaacgcaccaagggtaacccttgggacgcgcagggtcgagttatggaggacagaacttcggtgaccatcaagcccaacccggcgaaaattctgccaaaggcaaaggctctgttggacgggttcgtgccaaattctcataggaagtacgaatttgcccgcatcaagttcaagacccgctcggacgtgccaaggacggtaagtgtgatgtcccaaaactacagcctgctgactggtgcgctgtatgtacgcaaggaacgccttgaggatctcggtgatgatttgccaaccgctttcgaaaaaatcaacgaaaagatcatgggaaagatgcgggcgcttattccgtag

SEQ ID NO: 531444 - DNA, 564 bp, Stenotrophomonas maltophilia
atgtttgaactcatattttcgccgttagcctacttgcgcatacggcacgcgacgaaatggatgttcgactggctctatccgctcggattcgcactgttaaccgcggcggctttgtggaaatttggacggcctggcatgatcgccggggcgtccggtcttttggacagactaaccttggtcttttcggtactgccgggcttctacattgcagctctggctgcaattgccacttttaaccgacctgacattgatgcggtaatgccggatcccactcctcggctaaaggtcgagatccgcgggcggccaaacgtcatcgatctgacgcggcgccgtttcttggcctacctgttcgcattcatgtgctgggagagcctagctcttctagtcgtttgcgtgttcgctggcttgactgccaacggggtgatgggatggcttgggagtgcggcaatttacgctaagtgggtcttcctgtgcggtctcctaacacttttctggcagcttgtatttgcaacgttcttgggcctgtactacttgggtgaccgattaaaccgaccagcctattga

SEQ ID NO: 531445 - DNA, 174 bp, Stenotrophomonas maltophilia
atgatcggcgaggttcttcagttccgcgacctgcatgaactgtgtcgcctggcaagtgaccgcgcttggccgccgtggaacgctggtctcgcacgcgcggggtgcgaatccaataccacgaagaggccggtgtatggacattcatctccgccctcaacgaagcactggggctaa

SEQ ID NO: 531446 - DNA, 1287 bp, Stenotrophomonas maltophilia
atgcaaaagctggatgaacttttggcaatttttatgagggtgaaggcgcatccttcacttcagaacgctgcttggacgattcttgagaaggtcgttgcggggtttggagtgctgttggtcactgcgtatgttgctaggtacatcggaccgtcgctggtggggcagttaactatggcagcggcagtgttccaagtggtgctggttgcagctcagcttggaagtgatagtgtgcttttcaaacgtgtttcgaggaacgctgtatctggtgcgcgccttctctctgccacaacgggattgcgccttggggtgtatctggcgatctctgttcctgtacttgcgttctttctcgacgggcagggacgcgttgagtcagttttctttgtggcaacttgtgttgctgggttcttcgcagcttgggacgtttattctatttacaacaacgcaagactctggtcgcgcgtgaatgcgatagccaacttgatcggtttggtgtgcgggcttggatctcgttacatcattggtgcgttcaagatcgatccggtttttttggcttttccaatcgttgtgactgcatttgtcccgttcttaattcggtactggatttttaggggcgaggccggggcgaagatttcatcgtttcatgttcgtcgatattcgcgccatcttcttggtgctggcggtgctgttatgatctcggcagttgctgttgctctgtacacaaagataggtcagttcgtagttttcgcggtcgagggggatcgcgtaatgggcgtctactcggctgcacttaccatagcaacttcatgggcgtttgtgaatgtcgcactaataaactctttcttcccgcaaattttcgccgagcgagatgaaaatcgcgcgctcaatatggccgctaggctcggtcgctacattgcgataatttgtatctgtgtaacattgctattttatttatttggagaatttgcaatctctcttctctttgggcctgatttttcgggtgcatacgccccgggggttgttttgtgtctgtccgttatgttttccgctctagggactatttcaagtaggtacgtagtcagattgtctggttaccgatatcttctagtaaaaaccttggctgtcctttgtttctctttgcttgtctattatccgctcgttcatttttttggggggcttggaggtgcgattggagttttgcttgtcgaacttgtctcacttacgttgatgaactactttttccgggaagggattgttcttaggctccatcgaagaattgtcggcgtttga

SEQ ID NO: 531447 - DNA, 1032 bp, Stenotrophomonas maltophilia
gtgaaagattgtattgtgatatttggtggttccggatttatcggctgtttttttgctgagtttgtcttaaggagtgggcattgcgctaaggtctatctttacgatctgaactcttatagtgacaagccattcccctatcgcgccaagctgctggatgaatatggcgatgcggtggaatgtgttcgcggcgacgttcggagcgtgatcgaatgggttcctcgcgagcgggttgcattgatagcgaactttgcagcggttcatcgtgagcctggtcatgaggatgctgaatattttgaaacgaatgtggttggcgcagagaacgtaacccattgggcttcccgtattggttgctcttcgatactgtttacttcatcgatatctccttatggaattggggaggaggtcaaggacgagacgactcttcctgtgcctgttacgccttacggtgcgtccaagctagttgccgagaagatacatcttgcttggcacgctgcaagccctaatgcgcgccacttggtcatcgtgcgacctggtgtggtttttgggccgggtgagggtggcaatgttacaaggttgataaaagctgttaagggtggttatttcgcctacatggcaaatcgtgaaacccgtaaggcaggtatctatgtaaaagagctatgcaatgcgctttggtgggtttatcggctgcgagtggagtctgggggcggtgtaaccctgtttaatgcttctatgaatcctgggccgtctattgaggactatgtggaggctgtttcgagcgttgctgaatgcagatctcgctcgccgaatttcccctactttcttttgctcggtgtcgctttcgtgctggatgtgctggcgaggccgttgggtgtttcgcatccttttagtcccgtccgtatcagaaagctggtgagatccaataatgttcttccagcttatcttgtttcgaaaggatacaccttcaagtacacattagaaactgcgatgcttgattggaaggagtgttgccctcaggaatggggcgagaagtga

SEQ ID NO: 531448 - DNA, 915 bp, Stenotrophomonas maltophilia
gtgagtagagttctggtgcttcttgcttcctacaatggcgaagcgtggatccgggagcagattgagagcgtcctggcacagaaggatgtggaagttgcagtgctcgtcggtgacgattgttctcaagacaatacgatgcatatcgtcaaagagatggcgtgcgatcctcgaatatcgatactgaaatcccagggtaggtcaggtggagcagggcaaaatttccttagactgctcgagaactctgatcttagtggttttgattttgtggcgttctgcgatcaggatgacatctggttggagcataagctggcgcgtgcgatcacggaaatggataaggcaggggtcgatggctactcggcgcctgtgctcgcattctggcccgacgggcgggagcagttgctacttcagaatcgagtagtaacggatttggactatatcttcgaaggcgcgggtcaaggctgcacttttaccttgaggcaggatttcgcgctcagggtccgtgatttcttgaaagaaaataggatgcagctaaaatccgttcattatcatgattggcttgtctactctctcgcgcgcgcgtgggtgagggggtggatcttcgacgatatggttggcgtacggtatcggcagcacggaaataatgatacgggggcccggcgaggtttttcgggcattcttaaacgacttggcttgctgagaagcgggtggtattgcaatcaggtcgactccatcgtcggatgtctaaatgcggcattcccgatcgccgcgctacccgtggactttcaatctgtatggttcagtaggccaggaatatctcgtcgagttcgattgtctcacatgctgcttgttagggggcgaaggcgatccagtgacaggttgattttgttcgcaagtgcgctcgcgggttggatctag

SEQ ID NO: 531449 - DNA, 855 bp, Stenotrophomonas maltophilia
atgaagcttttgatgaatctgtcgatggtcggcgtaaggccgacgggacttggggtgtattcagttgcttgttctcgaatcgtcgagaaaattcgatctgttgtgatatcgagccggccattggtttctgctgaagagcgaatcagttcgccaatttcaatcggaattggcggggggaagttggcggcaattaagaggaacatctggcttcgacgtctccgttttgatgatgaatttcttgtgtattcgcctacacatcatggagtgcctgggcattcaaaccagatcataaccatccacgatctaatctcgttgcgattcccgcggcaacattttcttcagtacgcttatttcaaatggtttgttcctaggcttttgaggcagtgccgcgccgtatttacagtgtctgaaacgtcgaaggcagacatagttcaggcctatggatttccagagggcaagatctacgttgttccgaacagtatagatccagcgcgtttttcgccattgggaactccacctgagccgttcttacttatggttggtgcgcgattcagtcataagaatgtaagcgaggttctactgaaccacagtgcttggtcctttaggtatcgattgatcgtaacttcgtgctcaggaccgtatcgagaagagttggagtcattaattgcttcgctcgacctaaccgcttgtgttgaatttctcgactacgtggatcctgatgagctcctgtcgctgtatagacgttgttcggctctgatctatccttccagatgggaaggcttcgggatccctcccctagaggttttggcctgtggacgtccagtaatcgcgtctgaatcgcccagggttttctag

SEQ ID NO: 531450 - DNA, 204 bp, Stenotrophomonas maltophilia
atgcattattgccagaagaccgaggagcctcagaataacctttcgattccgcagaactgcagccagaagtggcaacgctacaatgtccattcggataatcgtaccaaccccttcgaaaacagccgcctggcgcgcaacaagataaccgccagccagaaacccggtaagcgccaccgcaatctgaataagctgcgcagcaagtga

SEQ ID NO: 531451 - DNA, 1152 bp, Stenotrophomonas maltophilia
atgaaaattctgtttatcagtcataccgcgatgggtggggcattcgtagtgggttctcaccatctcgctagagagatggcgcgccaaggacacgatgtagttcatgtgagttcgccaataacaattgcgcatattggattccttcgatcaaagttcaatcgagagaagatgcgccggtgcgccattggcggggaggtgatagacggtgttcgcgatgtggttccgttctcaattcttccttgggcaattgctaggagaagtggatggctgcgccgaaagttgtattcaccttttatctatctgcggcatgtcctgggaaagcgccgtctgaatgaattcgatattgtttttctggacgagccgcggctttttgatctagccgaaagctgcggttctcgctatcgggtgtatagacctacggatctttatgccgagatgagagaggatccgtctatcggtcagcttgagggtgaaatagctcggcaggggtataaggttgtggccatgtcacggccgatcgccaaacacatggaggcggttggggcgccagcgattcatctaatgcagaatggcgtagagtattcgttgttctctgcaccagcagaactacctgtggaaattgaacttccagcggggctgctagccgtttatgtaggtgccttggatgaacggttctcaattgaatctgttgtaaaagccgccaaatctgagccagacgtttcattcctgatctttgggccatggcatagtggaatcatggagctggctaatgatttgccaaatataattttcaaggggccggttagttatcgtcatctgcctgctctcctgcaacggtgcgacattgccttgctgccgctctcctctcatccttcgaacgctggtagaagtcccatgaagatatttgagtacggcgcggcgggactgcaggttatctccagtttcacgcctgaactggctgccagaaatttgcctttcgttctccttgctgaagattctgacgattttgcgagccaggttgggctggcaatttgtaatctgaagaaagggcgctattcgccagagatcgggcgcgcggcatctgcaactcaagcatggtccaagaaggcatctcagctcatcgatcttgcaacatccagtggggggatttga

SEQ ID NO: 531452 - DNA, 657 bp, Stenotrophomonas maltophilia
atgaagggagcgcccccatcatcatcccgaaaccatgcatgcgcgccgatgggtgccaaccatgcatgcgcatcggcgggcgccaaccatgcacccgcttcggtaggtgccaaccttggttggcacaagagcgcagaccaaggtcggcatctaccaacgcattccccggccagcctcatccaccccggcaaaacgccgcgtaatcgatataccccgggaacgacacgcccggcgcgcacaccgggcaatgcgggtccggccggatgccggattccggattccggattccgaaaccatgcatgcgcgtcgatgggtgccaaccatgcacccgcttcggtaggtgccaaccttggttggcacaagagcgccgaccaaggtcggcatctaccaatccactccccggccagcctcacccgccccggcaaaacgcggcgtaatcgatataccccgggaacggcacgcctggcgcgcacaccgggcaatgcgggaccggccggatgccggattccgaaaccatgcatgcgcgtcgatggatgccaaccatgcacccgcttcggtaggtgccaaccttggttggcacaagagcgccgaccaaggtcggcatctaccaatccactccccggccagcctcacccgccccggcaaaacgcggcgtaa

SEQ ID NO: 531453 - DNA, 1389 bp, Stenotrophomonas maltophilia
atgagctttccccgttatcctgcatacaaggattctggcgttgagtggctgggcgaggtgccgcagaattggtcggtttactcacttaagcgtacggtggatgggtgtgtaaacggcttgtggggcgatgagcccgatggcgaaaatgatattgcagtcatccgggttgccgacttcgagcgatctttttcgactattggactcgataagctgacctacagaagtatcacgcctaaagaaagacaatcgcgattgatcaagtcaggtgatttgctgatcgagaagtctggggggggagaaaaaacgctggtcggctgtgtcgttttgttcaagcatgagtttgacgctatcacatcaaacttcgtggcgagaatgcgcccgctcgcggagttcgatagtcagtttctttgttatgccttcggcaatctttaccgcggccgggttaactacccttcggtgaagcaggttaccggtatccagaatcttgatgctgagtcctatttgcaggagcggttttgctttcctgcgcgagtcgaacaagcccaaatcgcccgcttcctcgaccacgaaaccgccagcatcgacgcgctgatcgaagagcagcagcgcctgatcgaactgcttaaggaaaagcgccaggccgtgatctcccacgccgttaccaaaggcctcgaccccagggtgccgatgaaagactccggcgtggagtggctcggtgaggtgccggcacattggaagcagattcgtatcaagcacatattgaacgcaatgattgatgctgagcataaaactgctgaatatagtgatgatggtgagtacttggtttgtcgcacgacaaatgttcgaaatggcttgcttagtcttgacggggcaaaatatgccgacagaaatacttacattgactggactaggagaggggtgccagagccattagatatacttttcacgagggaggcgccggcaggtgaggcatgtttggtgccagaaaaccttgaggtatgcctgggtcaacgcatggtgctttttaagcttgacaagactaggattgatcctgccttcactgtccactcaatatatgccgggctggcttcagacttcgttaaaaagttgtctcaaggaagtactgtcagtcatttcaatatggcggatatcggaaatattccactttttgagccgcctctgtctgagcagaaggggatttctgatttcttagccaagcgctgtgactcttatgacctactaatcaacgaggcacagtcttcggtgaagctaatctccgaacgccgctccgccctaatctccgccgccgtcaccgggaaaatcgatgtgcgcggctggcagccaccgacccgcgcgtcattccccgaattagaagaagaggccgtgtaa

SEQ ID NO: 531454 - DNA, 1338 bp, Stenotrophomonas maltophilia
atgccaatcccagtcgtccacgcgcatcgctacgtctatcacttctctcacattgacaatttgcccggcttgctggagcacgggtttctgtcagttaatcatcctcagttccctgagaggcaccgctcgatcgccgctgcgggcatacagaaacgccgtgccgagatgaaagttacctgtccgcccggcgggtgtgttcatgattatgtgccgttctacttcggctcggtcagcccgatgctcctcggcgtgatcaacgcaaagaatgtcgatcagtacgacattctctatttcgagtttccgatcacactggccgatcagccttgcgcggtgttttcggacagctctgctaacacgatggttccgcccaccttctacagcgatcctgcagacctcgacaagcttgactggatggcgatcgactgccgcaagtggggcagtattgacgaaaattttcggcatcggcgcatggctgaactgctgattctgggccaccttccagtcaccgctgccactcgctgcgtcgtttggaacaacgacgtgaagcagcgtgttcaagagatcgtcggtgcggcgccgtttcccgccatcgagtttcaggatacatggggaaggccgcattggttcaccgatttcgccagcggtggcagttcaagtgtggtcaaggggccgggtgaaatcgcgatgaggttcgaagacgcttgtgctctcgttgacaagcattcgggctcgcatgccggcaccgcgaagttcaaaagcctgcgggacctgcgaggcgggctgcgcacggacttcggctgtcttccccagaccgctgaacttgttgggctcaaatccgcgaacggcgtgcacaagcggacggtcgacgtccataccgaggaggtggtcgacaagctccggtcgttgagagaattcgccgcactagacgagaagtcgcagctcttagtggagattgccgcttacctccacgacattggcaaggggccgcgggcgcgctgggatgagaatggcgggttacagaaggtcgatcccaatcatccggttggtgcaatgccgatgatggtggagatcctcaccaagcatatcggtaaggttggccaagcatcggccaggacgctgatgaaattggtctgttaccatgacctagtcggtgacgtgcttgggaaggggcgcgacgagcagcagattgtcgacgttgttgatagcgaggaagagatggacatgctctttgcccttggcaaggctgacgctactgtgcttgttgagcactggtgggacgaaccggcagcgaaggcgctctatgctcgctgcctcgaagcgatcgaggaggcggcgtaa

SEQ ID NO: 531455 - DNA, 1434 bp, Stenotrophomonas maltophilia
atgctggaattcacgcaaggcgacatgttcgagactccggcggatattcgcgtcaacacagtgaattgtgtcggcgtgatgggcgctggcgtcgctctagcgttcaagcagcgctatccggagatgttcaaggattatcagcgcgcctgcaaagatggccgggtgcgccccgggaggatgcacgtttggaagtctctagaaggcgactggatcgtgaacttcccaaccaagcgagactggcgtgatccgtcgtgttacgaggatatcgacgctggcctcgacgatcttcgtgcctatcttgagagcgtcgggcaggtgacggtcgcgctacctgctctgggatgcggacatggcgggctcgactgggaccgggtctccggaatgatccagaacaagctcggcgacatagatgcgcgtgtgttggtgtttccaccatcagcatcgcggcaggccggacgctcggctagtgaagtgccaacgagcgatgagcgcgcaaacgctgtgaaactaggctatcggctggtggagcccggtgcggtgccagcactgcagttgcaaagcccggtttacctgattggtgaggagcagttgctgtctcgcaggtggatcgcgcttctgccctctcgcgaaccgggggggcgagagattcaggcgcttcataccattgcagctgagctcgcacgttctgccggcgtagcgacagtggcgctggtccacggcgggaaggtgagtgagacagttgctcaagtattcgtcgaccaaggtatcaacacgctgttgctgctcccatttggtgtgctcactcgcaaggcgatcgcgaggcaacctgcgattgacctcaggcaagcgccggcgctggcttctgtagcgcccgctagcgcgaaatggtcgcgccagctgttcgctcaggcgcaggatctgctccgtgccaacgccgccgcattgctgatctcggatccggaaccggactggttgaccgccaagggcctcggcaaatgggtaaagaccccgatttcgtatatccgctacgagaccacccctgtgcacatgcatgaggcacttgcgagtgtaggtgctcgccggatttcccggcgccgagaggatggggcgcctgacatccactatcttgtcggcgctttggacgcggcccggttggcgcaaccggattcagtgaatgcgtacgattctaactcggatgcgaacatcgtagatcagccatcgacaacccgggtgctggaaaaagcgggggggggtgtcaatgtcgtcacaatcgcgtgggacaagctttcgcaagagtcgcgtagggagtggcttgagttgctgagcgggctggatgttgccgacgttactgtctcgcttaaacttccgaccaccctgtccaaggtcgaccgtgagcgcctcgcacatctgctccctgccggagacgaaaggtaa

SEQ ID NO: 531456 - DNA, 612 bp, Stenotrophomonas maltophilia
atgattcttagcgatgctgatgcaaaagcaattcttatggccaaggggcggtggccagtaaggacaaatacttggcctattcctggatacaaaggctactggatcaagacctgtcccagcaacgcaccgcgtcctttcatccatccagcaggcgccaaagtcggtaggacttggccggatggcatgtacgtctacgtacatgccgagagtggctttgcggacatcattgccattgaggtttgctgtaataatcaaaatttcaatgacaaaaggtcgcgctacacgccaacttcgggcaatgtccagatgaccttgcccatggaatggctggattcagatctcacaattcagaaagggcgaaagcgaaaagcttgggaagcgtccggatggtttgcaaaaaagcccacagctgacttgacgcttacaattcgccaccttcgtgcattgtttgtgctaaccgatgcagattacagccgcttcggagcagaccacttgcccgccgggcacgaatatttctgcaggcatcgagacctcaaccagataacgcgccaggaaatgcaggcctttgttaaatccatggcgctcatgcaccatttccgagtgcgcccctaa

SEQ ID NO: 531457 - DNA, 1278 bp, Stenotrophomonas maltophilia
atggctggggttgcttacgctcaactgccgttccaggagcagatcgagttcttccgtcgcaagaagaacgtgctcaccgagagctacctggacgtatgggaggccgagcacgacaccagcttcatggtggccggtgccaaccgtgacgcactgctggccgacttccagcagtccatcgaccgtgtcatcgccgagggccgcacgctggagcagttccgcgaagacttcgaccgcatcgtggccacgcatggctgggattacaacggcggccggaactggcgctcgcgggtgatctacgaaaccaacctgcgtcagagctacaacgccgggcgctgggcccagctgcagcagctgatcaaggtacggccgttctggcgctacaaccacaacgatgccgtcgaacacccccggccactgcacgtgtcctggaatggcatggtgctgcgccatgatgatccctggtggcgctatcactatccggccaacggctggggctgccagtgctacgtcgatgcgctcaacgaacgcgatctgcgccgcttgggcaaggacggccccgacacggcccctgaggttgtgatgcagtcggtgacggtcgggcagcgcagtcccggtggaccgcgcacggtgctgacgccggcaggcgtcgatcctggcttcggctacgcgcctggagcaacggcggaccactggcccggcgggcgtggtggtccggtcacaccgccctcgctgacaggccaactgacctccgctctgcaaagtgcactggagacgggcgcgcggctgccagcggcacccgctgccgccagtgccgcccaggccttggcgcggccgcgtgccagggacgccctgcaggccggctacgccagctggctggccagcattgacgctgatgccgcgcacgctgctcgctacctggccggcgcactgtctcccggtctggtgtcgcagctgcagcgcgctgccgttcgaccagcgacggcggcctttgcagtgttggctgagcagctccccatcactcggcctggcgcggtcgccatcgccgcagccgagctgcctatccgcctgctcgatgcggtggccatcctattggacgtggccgcaggccacctgcggtatgtccttgcggtggggcgcccggccttcatggtggtcgacgtggccatctcggaaacgggcgtcagcaccatccagccccagctgcagatgctgaggccttctgatctcaagcgcagcgtcgccgatggcacgctgcagctgctgcagggagcactctga

SEQ ID NO: 531458 - DNA, 492 bp, Stenotrophomonas maltophilia
atggccaagccccgcactgcgccgcccagcgcacccaagcccgtccaggacggcaagccggccgatgtgccggccgtcacggaagagaaggctgccgacgcgtcgccggcgcagggcggctcggttccggaggaaggccgcggcgaacttcagcccgccgagacggtcgcctcggaggtcgatggcgctgccgtcgaccaaccgccgggcgatcagtctgtagcggaccaggatgccggcgccgaggcgggtacgccttcgggtgacgcctctacctctttcgatgctgttgcaacgggcgaccattcgacggacgcgttgtccaacggtctctggctgtctgcctgcttcgaagtgctcagcccgttcaagcacaacgacgtcgtcgtcaagccgccggcgtggatcgagatgacgtgggaagaggcgcaggcctaccaggatgctggcgtcctcggtgacgaaccggccaccccggaagagctggagtaa

SEQ ID NO: 531459 - DNA, 786 bp, Stenotrophomonas maltophilia
atggccggtcgagatcacagcggcgtcgaaggctcgcagctgcttgtagccctgcagcgcggcaaagccaacaacacccagtccggcggccacaccgcccaggacgaccaccgcgggattgagcgcactggtgagcgcgcgcgcggccgggaccacgccgccgaaggaatccttcagctggccaccctgttgaatggccaccatccagatcggcatgccgctgacgatgctggtggtgatatcggtgatctgcgccggcagttggcgcatggccatctggtactggccggccgagatcgccccggcgcccaggctgcgactggtcgcttcggcaaccttgacggcgttgcgttggacattgatgcccgccagggctcggttgtactgctcgcggctgatgcggccggcatccaccgccgccttgagctcctgctcgtcccgttccagcttctgcagctttaccgatgcactgtcatagcgccccagggcgccctcaacagcacgctggcgctgttgctccgaccgagccaggcctgcttcctgcttatccagcgccttgagcgcgctgttgtagtcctcggtagtgatcaggccgcgcgccatcacccgatcaagcatcgcctcggtgtcggccagatcggacatgctcgccgcgccgcgctccagacgtgcatcgagctcggagatgaggcggatctcatcggccactgttttctgaaccgccgcgccggacgttcggacgcgatctgcggcggtggccacatccgccgacatggccttggctga

SEQ ID NO: 531460 - DNA, 1218 bp, Stenotrophomonas maltophilia
atgagcatcaacccgcccgccttgctgacgcatttagccttggcggctgcaagccggtttcctagggtgactggccagatagctgagacattattcgtgccctccccgcaccagattcccgtcgtactgcaatggcctccgggagcgctcgaattccctggcgacctgcttcttcccagcggcccccagaactatgtgggcgcggtgatgtgcctgcgcctcaccctgtacttcaagaatgcacatactgccgcgaccagaaaaaatctttgtctctgctttgccgcattctgcgagctggctggagacgccctgtcatggctgtggcgcgagaagccgaatcgcgggatgccaaagcaacgcgtcaagaactgcaagcccttgtgcgacatgatcgaaactatgtcggaagatgaccacctgagcttctgctataccagcggtgccaaggccgaggatgcgggtgcctggaagttcctgatctttggcgcccgcgcctgggaagcccgtatcggccgcgatatgagcgtgctcgaactgtcagtccccatcagctgcctgccaacgcagcgagaggacttcattgaattggcggcaaaatgtgcgcgctggctgagtgccgagcatgggcatgcgggatacgccgtgaatctgagcgaggttcgccgccagcgcaatgaacccgttgaggccgtactggcatcgcgctatcccggtctggacgcgggatgcgctcccctcttggccgaccggccgcaactggcgcacctcaagatcaagacggtcagttggctgaccctggtggatcgtgcccggctggcagcggctggagggcttgaccagctccgcagcgctcttcccgagcggcatttcacccttcacgactacggtaacggcgtcatggtccaagctgggccaaggccccttgcctgtactgacgcagccgatcctcgaccacctgcctatgtgctgctcgaccatctactccggggtatccgacccgcatcggttggcaatctccatttcaaccagaaatccgcagagcccaggcttgtcggccagctcgccgatcagtgggtgtgtcgttttgaggtggatgcttcagagatttcgacccacgaagaaagacttgcccagcagcatgcactcacagatggggacatccggaacgagacccccttcgctaaccagttgattgcacaagcgaagccacaatga

SEQ ID NO: 531461 - DNA, 507 bp, Stenotrophomonas maltophilia
atgattcgcgccctgatcgcaacggtcgccctgctgctggtgctcctgctggttgccattgccgcagcacttctctaccgcggcaatgccctggatgcgcaggctcgtgacgccacggcgcagcagcgcgtgaccacgctccaatcgcagttggacagcgagcgcagcgctcgcgacaccgagcacacccaggccaaggcgatggcccagatcggagatgaacatgaagatgatcggggcgcgtccgcgtccatccctgctgctgttgtggctgacctgcgtgctggcaatctcaggccgcgcaacgaccttgccacctgccacaccgaccgcttgtccgaagccgtctctggcgccgtcgaacgtgatgcgagcgcccaactacgagcagaggttgcgggcgatcttgttcgagtcgggcgcgacgccgacaaccacgtccgggccggccagcgctccatcagcgccctcactggacagcgactctccgacgagatcagcccatga

SEQ ID NO: 531462 - DNA, 600 bp, Stenotrophomonas maltophilia
gtgctggcagtggcgatcgccgaccaggctgcgcgtgcgaacgtggagatccatgctccgtccattgagctggacggcgtgcgcggctacgactcgacttgcggctctgtaagcgggccagttcgcggcagcgtccaactggccttgcagtacatcgaggcccgaggcgacgggtttccctggcgactgaagcgccacatttcgcagccgaccctgctgttcttcgaggagcgtaccgacgttgaggtggccacctccggcccgcgcaacgcgtgcgtcaactgcgacatgcccaccggcttggcggaatcgccgatgtgcggtccgtgcgcccagcgggcggtaggtgcgatggcgtctaccacggctgacgcgatccggcgcatggacgggctcgacttcgtgtgtggcctgcgcgacccgcagacgaagcggaacgtggccacggccattgctcgccaggttgggcatggcatggccgagaagtgcgaagcccaagccgaagcggccctcaacgccattctcgagctgctgctccacccgccggtgctggtcttgcagcgcagtggcccaatcaacctcctgggggtgcactcgtga

SEQ ID NO: 531463 - DNA, 714 bp, Stenotrophomonas maltophilia
atgacccgtgatcaagctttgcggaagatccaggcatgtctccgcctggcggcctcatccaatgccaccgaggcggcgacggcactgcgccaggctcgggcgctgatggaccgctatggcctcaccgagtcggacgcggccaccagtgaaatcggcgataccgaggccgcaaccggctttcgtggtggtgatctgccccagtcgttgattgccctggccgccttggttgccgatggctataggtgccgcgtgatcggcaatcgccagcgtgggatgtccttcaaggaagagcagttcatctggcagggccgtaccacgctccgcttcttcggtgctggtgccgatcctcagatcgccgcatatgccttcaccgtgctgcgccgccagttgcagcgcgacaaggcccgtcacgttgcacgcgttcgtaagttggcgaatcgccagcgccgcgcagaagagtttgcactcggctgggtggctgcgatctaccgactgttcccgcgtgcagagctgccggaagggcgccgtgagtctatcgacgcagcggtgagccttcgttgcggcgaagttgaggtcagcaccggcaagcaaatcaaaggtgggcggtccaaagccgacgattacgccagcggctatgacgcagggcggcaggccaagctcaaccaaggcctggaggaaggtcagaagaagctggagacgaccggtggctactga

SEQ ID NO: 531464 - DNA, 357 bp, Stenotrophomonas maltophilia
atgaggtcgatggaggcccgccgtaacgcgctgttggacaatgctgctgaggcggcggccaaagctgcgcggaagttcggcctcgatgacgatgcagccgagcatatcggagcggtagtggccgatatgttggccgagaactggggtggccaaacgatctactttcctcaggatgcagcctttaagctcacccctcgcgagcgtgagatactcgaggcccaacgaacgggcacaacgatccctgccctggcgaagcagtacaggatgtccgaacagggcattcgcaaattgctggctagagccatccttcgggatcggaacctgaaccagatgaacctgttcctcaactccccttga

SEQ ID NO: 531465 - DNA, 342 bp, Stenotrophomonas maltophilia
atgcccagaccgcccaaaatggccacgttgccacctgaaattctggccgaggcacacgaaaggttgcggaagaacgggtattcccagtctgtcgagctttccaaatggctggccgacctcggattctcgatcagcaagacggctatcaatgactactcccagcaacttcgtacgcttgatgctgagggtgggggtgtcatcgccacgatgatgcagcgccgccgacaatccggggctttgaacagcagcaagatcggtctactggtcgaacttggccagctgagggtccgtgagcatcagatcctcgccgagctcgcggccttggaacgagcaggcgactga

SEQ ID NO: 531466 - DNA, 303 bp, Stenotrophomonas maltophilia
atggccgttccgacgctcaaacgctgccacgggcaggtgcgcaaccggaagagccacagcgcccaccccaagcgccatcggcccgtagggatggtggcgagcaagccgcccttcctggaggactcagcggtggccacgctgtacatcctggacatgcagaccggcggcgagtacgggatcgatcttctgcccagctatggcattcaggtcacgtcttccagcaccagcaagcgctggtacctggatgcggacgcaatcgtcgacctggccgtcgccgccggcattgatcggagggccgactga

SEQ ID NO: 531467 - DNA, 339 bp, Stenotrophomonas maltophilia
gtgatcctgatcggccagcccgagctgggcgtgaagctctccgaacacaacccggaggtgcgcgaagtcgtgcagcgcatcgaaatcatcacgcttccgccactggataacgagctgggagcgtacctttcgcaccgcttcaagcgtgcccaggtgcctctggacaaggtcgtggaacagggggccatcgatgccctgcgcgccaagctggtcccttcgcgcggcgcagggtcgctgctgtacccgctggccgtccagaacgcgctgaccgcggcgatgaaccgcgccgctgacctgggcgtgccaaccgtcaccgctgatgtcgtgcggggggtgtga

SEQ ID NO: 531468 - DNA, 591 bp, Stenotrophomonas maltophilia
gtggcgcaggtagtacttgcccggcgtcgggttccccggcgaatcgggcatgaagatggaggcgctgatcttcttgaagcggccgttgttgaccagctccgcgaaggcaggatctacctcgtgcggttcggccatcaggaggccgtccttggcctgaagcactttgctccagccataggccgggtcgtcggttttgggatggcccaccacaatgggcgcttcgtgcagcgccggatcgtagctatcggcgatctgctgcacatccgcctcgctgaaggtcagcgtgcggccgtcttcggcaacgtgcgtgccggctttgaagatctgcagggtggcggcgggctggttcatgccgccagttttcccgcgccagaggtcgctgtctttgaaactggtttccaactttcgagggcggcagcggactggctcatgccctcctttttcccgcagtaccgtctcacgtcttgggacggtgcattgcagagaatttcaaccgcagatgcacgatgcgcgtgcggtgatcgtcctgcgtggaaacaagtgccagtatcggccgcacaggtgtgtcagacaccaagccggtgtgggtga

SEQ ID NO: 531469 - DNA, 480 bp, Stenotrophomonas maltophilia
atgagcgccatccccagcatcgcaatgcagcacgctatcgccctgtcactgggcgccagcgtggtccgttctgcggatctgatcgatcgggtgatggagcacggcttccattaccgcggctatgtgtccaacgcggtcgccaaggcggtgcggtgcggaatgatcctgcgcgtcggcgaagggctggcccgcaactaccgcctcaaccccgactggaagatcgacccgacggcgttggcggccgcgcaggcgcagcgtgtgcgtggtacccggccgggtatgacaggggcgcagaaggcccgatctgctgccgggggctacgaaggtcccgccttcgacaaaggcccgctgacgccctccatcggcaccgtgtgccagtcccaggaggatctggaaggcgagctgccgccttacctcggtggtcgcctggtcgattcgctgcataaccacttcgatcgcatcttcggcggggtggagtga

SEQ ID NO: 531470 - DNA, 228 bp, Stenotrophomonas maltophilia
atggctgagcgcggccagttcctggtggtccctgctgagtgggtgggtggcgacaccttcaccgactcggacaaggcgatcgaagacgcccaggcccgcagcaaggtcgacggcaagcaccgcgcggtggtttgcgtggtcgctcgcactacgcccagccctgcaccggtcatcgtgctgacgcgtacggaagccggcatcacgcagccgcaggttgttcagccatga

SEQ ID NO: 531471 - DNA, 177 bp, Stenotrophomonas maltophilia
atgcgtctgaagcctctgctggaggctgcgggttcggcctggacggctgaccactatgcccgcaccgcccagcgctggcctgaaggtttgccggtggatcaggtcgaatcctgggcacaggccttggcgacgcctgagcgtggcggcctgcgccttgtggaaggaggtgctgcatga

SEQ ID NO: 531472 - DNA, 318 bp, Stenotrophomonas maltophilia
atggtggctgcgcagggtcttgcccacggcatcgctgccttcgctggccagcacgtagggttggatcacgatgacggcctgttcctcgcgctggatgcgatcgaccagatcttcgcgcagcgtgctcttgccagcaccgctctcgccgatcaccgcagcaaagccgccgtggcgggctacctggtacatgctctcgcggacatagcgaatgtccggcgacaggaacacctcttcggcgctggccggatcggcgaaaggattgctggtgaggccgaagtgacgcttggcctgtggagtcaaagcctgaaaacgcagtag

SEQ ID NO: 531473 - DNA, 1230 bp, Stenotrophomonas maltophilia
atggcattcgctctgtcgggactggcgttacctgcccacgcggagaccgaaacgggccttgaattcagtgacggcttcctcgtgggtgggcgaaccatcgatatgcgtcgctatgtgcgcggcaaccccatgcccgcaggcgactaccgcgttgatgtgctggtcaacggccagtacctgcagacacgcgacatcaccttcgtagcgggcgacgaccctgaccgggcgggtgcctgcctgtctgcggatctgctgcgggagctggaactgcaggccacctatcgaatggcgctggagcgggcaacgggttgtatcgacctgccgtccgtgatcgcgggggcaacagtgacattcgacagcggcacgctgcagctgctgatctccgtgccgcaggctgcacaggcgagggcggcacgaggcctggtgccggttgagctacgtgatccaggcatcaacgccctgttcgtggactacagcgccagccatggccgtagtgcaggcgtcgatcgcagccacctcggcctgcgcatgggtgcgaacatcgggagctggcgcttccgccatcgcaccgccttcaaccatgcgcgggggcaggtgcgccgtaccaccatcaacagttacgcccagcgtgacattcccgggtggaacagccagctgttgctgggtgagggcaacaccagtgggcagctgtttgacagtgtgccgttcacgggggtgcgtatcgccagtgatgaacggatgctgcctgattcactgcgcggatatgcaccggtggtacgtggcattgccgacagcagtgcagtggtgcgcatcgagcaggacggtgttgtcatccatgaagtaaacgtcgctccagggccgttcgcgatagacgatctgtatcccaccaactttggtggtgacctgcaggtgatcgtagtggaagccgatggccggcagcagcagttcaccgtcagcttctcggcggtgccacaggcgctgcgcgcgggtacgtcccgctcaagcgtgaccgccggtgcactaagaggccgtcacgtcctgcagcggctgggcttcgccgaggccacccatgcacatggactgaacaatcgactgacagctctcggggattgcagctggctgaaggatacggtgccggcctgctgggggtggcggtcaacactcctgtcggcgcgctgggcatggacgtcacccattcgcgcgcccgccaggcggacgggcggcccctga

SEQ ID NO: 531474 - DNA, 276 bp, Stenotrophomonas maltophilia
atgacaaccgaaatcacggaaatcctcgatcgcctccactgctgcgaagccgcgatcgaggtccaccgtggctacctaaaagccatggagtacgcgcttcgggtctctgtgctgacccacccggagcctgagcggctgacagaaagctggctgcgactgctgccgagcatcgcggcaaagcacagagaggatggaggcgaccttttcgctgccgcctttcaacaatcgctcacggttcttacggagcaaataggtgtagggaacatgcctccttag

SEQ ID NO: 531475 - DNA, 267 bp, Stenotrophomonas maltophilia
atgcccgatacaggccttttctacgttctggatctcgatgcgtcacgcaaccgcgatggcaaactcgaccgcgtgaccgctatcagtgtccgttgcaactactgcaagcacatcacccatgccaaggcgcctgagctggagacaatgccaggcggcacgctgttggcgtgcgccgcatgtggcgagcggcaggccgtcagtaacgcccgcctggttgagtacgaccacgtgctggggcacacgttaccccaggcgatgccggtctga

SEQ ID NO: 531476 - DNA, 474 bp, Stenotrophomonas maltophilia
atgaagcactttgccattgctgcagcgaacgagttcgtccgactgggtcggaaggatgacgtgcttgtaaccaacatgaagctacagaagctcttgtacttcttgcaggggcacgggctggcgcttgctggtgaaaaccttctggatgagcagccccaggcttggcagtacgggcccgtttacccgagcgtctatcacgagttcaaagactacggcgcaagccccatcctcaaggaagttcccttccccttcgatgaggatggcgaaccttggcgaatgagcgaggatgacccgaaggcccggtcaatccttcacgccgtatggcgagcctacaaggatatgcctgcgacgaagttgtcgcagatcacgcatgtacctggtggcccctgggagcaggctgcgagcaagggccgctcgtcggtgatttcggaagactcgatgcgggagtacttcaccaagaccggggcaaactga

SEQ ID NO: 531477 - DNA, 432 bp, Stenotrophomonas maltophilia
atggcggacgaacagcctgagttgcctggagtcgagtccatcgatgagcggatccggattttccagattaaggcggaggcacagataccggaggggtctgacaaaggcgcagtgactggtgaagctgctgcctgggaagcgcgagttgatcgcatcaaagcgaagaacgacgcgcggcgcgccgatacagagatgcgtggcaagtacgccgagcaggcgtttgaattggcaaggctggctgtgtggttttggatcgtgttgttcggcgccacggccataactaacgctgcgatgggaaagcctgcactcagtgacaaggctctgatcgctcttacaagtggcgcaacgatcaacgtcattgctgtttgtctggtggtagtgcgggggctgttccctgcgcgacagaagcgagaaaggaaaggcggctcctag

SEQ ID NO: 531478 - DNA, 264 bp, Stenotrophomonas maltophilia
atggttttggctggcgtattggctttgggcgtcgttgtcctgctgtttgcgggcctatcgccacggccgggtgagacaagccaggaggcctcccagcgcagggccgaaatgaggagcgcgaaggctgcaatcgcatactgcgacaagcgctatgcagaaatgaacgacgataggcagtacggcccgtcagagcttcggcttcatgccgatacttgcaagatgctcaagaggcagtaccgcgagaagtggggccgggagccttaa

SEQ ID NO: 531479 - DNA, 2766 bp, Stenotrophomonas maltophilia
atgactgaccagtccattggtgccgcgcgcattgacctggtggtcgatacgcagcagttcgacagcgccatcacagcggcgaagcgtggtgttgccgacatgtcgagcagtgcacaacagcagtatcagcagctgtcccgtgcggaacgtggtcggatcgatacgctagtacgccaagccgacaccctgggcatgacccggtcccagcagctggcttacaacgcggcgctgaagaccagtggacccgtactggatgagatcgtgcagaagctcgcgcgcgccgaagcggcggcgaagcgctcgggcaaggagctgaacgcctatggcgtcagtgctgcccagcaggcggccgcgatgcgtggcgtgccagctcagatcacggacattgccgtcagcctgcagggtggccaaaacccattgacggtattcctgcagcagggtggccagctcaaggacatgttcggtggcattcgacccgcagcggctgctcttgcgtctcagctgctggccatgatcaatcccatcaccgtcgcggctgcagcggtcgcagggctgggtttcgcctggtatcaggccggcgagcaacaaggggagttcgagagggcgctgattctgagcggaaaccgtgcgggatatacggtggagcagctgaatcagctggctcaggcgctggacggtctcgatggcgtaacaagaggcaaggcggccggtgctttggcagaggttgctgctggtggtcgctttgcaggcgagcagttcgagatcgtcactcggtctgcactcaagatgaatgttgctgcaggggacgcaattgaggcgaccgctgccaagttcgaaacattcaagaaagacccggtaaaggctctgttggaactgaatcgggctgagaacttcctgtaccaggcacagctcgatcgcgtagttgcgttgcaggccgaaggcaaggagcaggaagccgtcacagaggcgatgcgcatttacggtcgcgtcgttgatgaacgatcggcagagatcctcaagtcgttgagcctgatcagctcggcttggaaggagatcaaagaccgagggggagaggcttgggacgcgattgtagaaggggtcggtagggccgacatcagcctgaagggcttcgctgatcgcgtggccaacatgccacaggtgggaaaggaccttacgacctatgcattggcgatgatcaacctgccgctcgctgcggcagtgaggctgggaggaaatcgctttggaggagtaactggatcggttgattcctcggcacccttcgccggaaccattgactccgaccaggctgagaaggagatcaaggagcgcaagaaggcgcaagaggagtgggaccgactttcaggtcagaacctgtccaagcgtcagaagcagctcgccgaagaggcgcagatcgtcgccctgggtaagaagctcggcaaggatcaggccgatatcgaccgggaagtcgccgcttcgcggaagcagttcgctgaggcagaagctcgccgcggtggtggctccaaaaccaacccggccacgtcgatcgttgcgaggatccagcagcaggtagctctgaacaaggaacagtcgggcagcgaggaaaagctcaccgtcagtcagcgtctgcgggtgcaggtgctggaggagctggaccggttggggttgaagatccccgaggccgatcgcaagcgcatcaggacgatgctggaggagctgaagacgactggcgatctggtggaggccaaggacaagcagaagaagaccttggaggcgctcacccgtcaacaggcgatcttcgatcagcaggccgagtcacggcggcggggcaacgagctggatctgatgagctacggtcgcggccaagacaccgttgcgcagctacgccggcagatggacgtacagcgggagtacgaggacgagctgaagcggctgggcgaccgacaggtggccactgaccaggaccagtgggaccagctcgctgcgaacgcggccaggcacagggatgagcagctgcaactggagaaggactaccaagcccgtcggctggcggcgatgggagactggcgcaatggcacccgcgcagcctttgaggactacgccatggaggccaacaatgcggccggccaggcgcactcggcgctgacgaacgcgttccagggtgcagaggacgcactggttcagttcgcgatgaccgggaagctgtcgttccgcgacctggccaactcgatcatcgccgacctcgcgcgcattgccgcgaagcaggcgatcgtcggcattgccggaatgatcgccagtgcctggggcggcggggtcactgctgcggggaacgcggcagctaccagtggaacgcagcagatcaactccgaccttctggcgaacattggccgtaatgcaaacgggggtgtctacacatcgccgagcctgtcggcctactccggcggtgtttacaactcaccgcagctgtttgcgttcgcgaagggcgcgggggtcttcggtgaggcggggccggaggcaatcatgccgcttcagcgtggtccggacggtcgcttgggtgttgccgctcatggcggtggctccggagcgtctcaggtgaatgtcaacgtggtggtgaataccgatggctccaccgacgtttctgcggacacacctgtgtggcagcgattcggcaaggaaatcgggcagctcatcgacatgaagatcaacgatgcgcagatccgatcaatgaaggatggcggcgcaatgagggtgatggggaacggccgatga

SEQ ID NO: 531480 - DNA, 2664 bp, Stenotrophomonas maltophilia
atggagcggattgagcagagggctgcggtggccacgcggcaggctgccaccgccacggaggcgcacgaactgaacctgcagaagctgctggggcagatcaatccgacggtcgctgcactgaacaagctggcggagcaggaggatcgcctagcccgcgcgcgtgatctaggcctgctaaaaccgcaggtgtggcagcagtaccagagccagctggagggcacgcgggccggcgtcctggccacgtccaacaccttcgggaagctcaacctgcaggccgtggagacccagcagtccctggcaatgctgatgcgtgcgctggcgaccggcaacttcgcacaggcgcagtcctcaatcgcgtcgctgacggccaggacaggcgtgttggcaacggtcttcagtggcgccgggctcgcggtggccggcttcactgcggtggtcgtggctggcatcgcctcctggaagcagggcaacgacgagctgttcgggtttcagaagaatctgatcctgaccgggcgctctgccgacatcacgttcggacagcttcagcagatggttgaccagctggatcgaatccgtggcgtgagccgtggcggggccttggactcgctcaacgcggttgcgaagtcgggccagttcgtcgggcagcagtttgacctcgtcgcagcgtcagcagcacgcatggaagcatcgctgggggtatctgcggacaagacggtagcgtcattcgagaagatcgctggcgaccccgtgagggggctcctggagctgaacaagcagtatcggttcctgacccaggcccagatcgattacgtctaccaactccagcagcagggcgatgaggttggggcggtcactgaagcgcttcgcctcgctgacgatgcaactaagaacttggcgaatacggcagaggccaatctgccggcgctcaccgagtactggcgcgacatgaagggcgacgtgtcgggcacgtggagtgccatcgtcaacgtaacgaacgccattgccgacctgggacgggagtatggcgtgctggctcgcctcccgagcctgtccgacattctggggttcggcctggtcggcggcgtcgttgccaagaacctgccggagcagttcaggcccccttcctttgcagacctgatgaaccgggcagcatccaggcttcggaaccccaatgggctgcccgcgaacattgaggggatcggcgcgccgaatggcgacgtggccgatccgaacgacgcaaagaaggcctcggaccagtggaaccgccggctggaaatgtatgacaagcagctgaagatgggtgccgaggtcgagcgcatcgaggctgagggcatcgcagccggcaggacccgcgctgagatcgaggcggccatcgccaactacatgaagtcacaggaggagtcggcgaagcgcacaaccggcaccggcaagacggcgcgctcgggcgtggaacagctgctggcgagggtgcagcaacagatctcggccaacgatgagctggcccgcagtgggcagcgggtttcgcagtcgcagcggttgatcgaagagatcgatatccgtctggcggacggaaagggcacgctcacacacgccgagcgccgcctgctggagacggagcgcgagcgcctggccatatcgcatgacatcgccaccgtggcccagcagaacgaacgggatatggctgcgcaggcggccctgatcgaacgactgacacagctggagaagcagcggcggcagcaggcagaaatcgatctgataggcctaagtcgaagtgcagatgccaccgggatgttgaagaggcagctggacatccagcggaagtacctggatgagcaaaaagcactggatagagagaagttgcgaggcactctgagcgccgccgagtaccaggcagaggtggcacttctgcaggccagccttgaccgatctttggagatcgagcggggctatcaagagcagcgcctggcgatgctgggcgactggcgtgcaggcgcgcgacgcgcatgggaggactacgcgttcgccgccagcaacgcgctggagcaggccaacggtttgatgaacagcgcgctcggtggctgggaggatgcctgggtgcggttcgctcagaccggaaagctgtcgttccgtgacatggctaacgccatcatcgcggacctggcacgcatcgctgcaaagcaggcggccgtgggcgtcatcaatgcggtggccggcgcctggggcggcggcgtgaccgcagcgggtaatgcagcagcgaccagcggcacgcagagcatcaatgccggcctgctggccagctacggcggtggtcgcgcagccggtggccctgtggcagcggactcgttctaccaggtgggcgagggcggcaagccagagctattccggcagaacggcaggacgtacctcattcctggcgacaacggagcggtgatccctgcggccccgaccgccggcactggaagcgcatcagctggcagcggctctgtggtgaacgtgcgtgtggtcgtcaacagcgacgggtccaccgacgtttccgcagaaaccccggtgtggcagcggttcggaaaggaaatcgggcagttgatcgacatgaagatcaatgaggcgcaggtcaggtcgatgaaggacggtggcgcgatgcgggtgatgggagcagggcgatga

SEQ ID NO: 531481 - DNA, 234 bp, Stenotrophomonas maltophilia
atgaccggtaagcctaaagcgctgctctaccaatattccgcagacatggttgccctgcggttcgaatcaaatgccgatttcatggctgctgtcgaagagaataggaatagcaacaacctcccgattctctttgaagggggagacttgttgaaacccgaaatcgtgttcgcagattcggtcgacgaggcgaccgttgtccggcactttggtcagagcttcgacattcacaaatga

SEQ ID NO: 531482 - DNA, 339 bp, Stenotrophomonas maltophilia
atgaattacctcatgacctggcgcttccttgagggaaacgacccgcacagcgacgccttcatctctctcacggctgatctcatcagtcccccctcggcgttggagtcgtgggtgggcttttctgggcgctactccgatgggtactcccaggctgaggcgtctgtaagcctcagccgggacgaagatggccgcttggtgctgtctggcgacaacgactttggtccgtacatcattcgcggtccgaaggtgctggccgaaggtgagcacgttgtgctcgaccatgccacgaaaggcgtttcctacgagtacgaaattactcaggtcaagccattgaagtaa

SEQ ID NO: 531483 - DNA, 459 bp, Stenotrophomonas maltophilia
atgaatccttttctttcccaaatcaatggcgttgcaattcagcacgttctcgagggtgatgcggccaatctcaagcgggtgagggcagccatctgcaagtggattgagtttgagatccagaagagccaaccaaatgccgtgggcggtgctaccgctgccgcaatttctttcgccattcaaaagttcattgcagcggtccatgcagctcagcgttttgccgaggcggcgcaagcggtcgatgtgatcgaacctgagttcaataggctgaacccactgtatgaaagagacgctttggatgcagcagagaaggtgaggtttgaggtgcttcgcggtcagcttattaaggcggacactgaggtcgaggaatcgaaatcgcaattcaatgacgcgtttggtgtcatctcgaatgtactgccctcgcagtggtggccggcgggcagccagtggaagcataaatga

SEQ ID NO: 531484 - DNA, 357 bp, Stenotrophomonas maltophilia
atgagccgcttctatgaccgcatgcaggcgacggccgagaagctgatcgagcgctatggctacggcacgcagctggagcgcgatggcccgccgaccgggccgccgcataactcgcagcccggaccagtcacccggcacgactgcaaggtggtggagctggaatacagcctcacggaccgcgacaccaccctggtgctgaagggagacaagctgggtctgatctccaccgcggtggacgtcgagcccggcaaggatgaccgcctgcagctgggtggccagctgtaccacctcatcgacctgcagccgctgtcccctggcgggcaggtgctgctctacgagttccacgcccgacgctga

SEQ ID NO: 531485 - DNA, 837 bp, Stenotrophomonas maltophilia
atgggagtggtcggtccttggggggtctttctaaaggtcatcttggacccctacacctttttgcttatcgtggttggcgccgtgttgggctggttcggccccaaggctgttggagacaactacaacgcattgcttcagatcgtcgttgcagtcgtgaccggagtagttggggctaggatttctaccgctatggcggccatcaatcaggacggcaagctatacgctagtgggaggatggctgtgcgcggtttgcgcctcattctgaccaaaacgctagccctagagcggagagtcgccacctttgtcgcgcagtctcaggaggaaaagtccgcagagactagagctgatgtggctaagcggaacctcgatgaggtgctggagtcaatcagaatgctgcaatcggaggtggttggctcaatcgagaattgggtggacgtcgtccctgacgctgatgtttcaaagatatttatggcggtcggcgagctacgagaccaactcacgcaaaaggatgagcagctgcgcgaggcggttaaaagcaaggagcgcctggaaagcaagggcgaaacggacacccaggcactccagcaagcgaacggccgtatccaggaactggagcgggacaagaccggccttaaaagtcagataagcgcgcttaaacaagctgcagcccaaggttcaaacatcactagtttgaagcctttgatgacctttgccgactacgtgcagcatatggaagaggaacgggtgaaggacatgtcttcttggacgtatcagcagtggaaagctgatgcctcggctggcggaaaggccggcagcagctccaacgggcaacaatga

SEQ ID NO: 531486 - DNA, 585 bp, Stenotrophomonas maltophilia
atgaagcagggacggacggacagggattgggcggtagtcgcggtgatgacgttctgcgcgggcgcactcattacttgggcgcttatcagtgatccaactgctgccaagcacgccaaggatattgaatggccagcgtgggtccaggccgtcggaagcgtgttcgcaatcgtttttgcggtgctcgttcccaagtggacgcgaaaagcggaagcgacagatcgtcaactcaaagaggaagccgaggcacttgctcttgcgaccttgatggttcgtgaaatggaggcattcagatttagaatctatctcgatctgatgaaggccgagcgcgcaaaaccacaggacacaatccaaatcaactcgaagttgattccacaggcgctttggagcaacgctctggaccttcctcgcctcggtgcagcagggaaaagtgcactgcgagccatctacttcatccaccgagcccgcgactaccaaaccgacaacagagtggtgcgcgaagacatccacagctatgcggtctacgcgcgaaaagccatgaagcatgctgacgaagcactcactggcctgagagaaatgcttgactaa

SEQ ID NO: 531487 - DNA, 261 bp, Stenotrophomonas maltophilia
atggaaggggtgaacttcactgcagagcagcagctgatctttcggcttatcggcgaagtggaactgctgaagggctgcgtcctcgatctgatggcttcccagagggacccttctggtgccgtcgcatcgatcgagcgggcgaaccgcaatgccatggcggtcatcaacgagatgctccagaacgacccaccaccgcggatggcttgccttgggcatgcggattcactggcccgcacatggtcggaggcgctgaagccttga

SEQ ID NO: 531488 - DNA, 330 bp, Stenotrophomonas maltophilia
atggaaatcaccaggatcggcaatggcctgtacaaggccacgctggatgacaagaacgtgtttcttgtcgtcggcatctcgtccgcacaaggcaagaaagagatcattgccgcggcaaaccgcctcgcgcagccagccgcgtcgcagttgaagattcaagatgattggactctcggggtgattaagcccgcgaaacccgcagctattcagagggagctccgggaagcactcgacggaaacccagatcagtccatcgtcgccatcctctgccaagacgtcagcatccacagggcagccatccgtctgatagagagtgatcagtcgatctag

SEQ ID NO: 531489 - DNA, 246 bp, Stenotrophomonas maltophilia
atgccgaccaacagccaccaatcgttaggcagcatctgccacctcctgctcgtcgttggcagccggagggccgaacacgtccggccgcagcagatggcgggacacgcctgtcgctgcctcgatggcgaggacgtgctcggcaggaaccttgccgcgcttacgccagttgctgaccacgttctgggcaacgccaatggcggcagcgagctttccgacgccgcctgctacttcgactgcttgcgttag

SEQ ID NO: 531490 - DNA, 366 bp, Stenotrophomonas maltophilia
atggaccacgccgcccacaattcagccttccgcaacgcccagcgcagcctggacagccaggaggaccctggcttcgaggccgagtacgccgaagagcgtattgccgcctgggccgtcagctaccgcggcaatccggacatgtgccgagaagcggccaactggaccgccggaacgctcggcggccggtactacaccgacctgcagctggtcctgcaccgcctccaccacacccaccccgccgacctcatgggcacggagctgtcgacccagctgtaccggctggcacgcgtcgagggcgaagcgctggacgcgcaactggtggaactggcccgcgtcgcgatggctgagcagagggtggcggcatga

SEQ ID NO: 531491 - DNA, 222 bp, Stenotrophomonas maltophilia
atgaccagcattcacgtgaaacccgtcttcagcggcgccaccgatcgcgaaaaggagcaggaccggcagaggctggccagcgacatcgcgcgcttcaaggccggcggcggcaaggtccagatcctgcgcaacagcggcatcgacaagagcacgatcagccgccggcaggtggttgaaggtagtcacggtcgtcgcggcgggaagaagggatcgcaagcatga

SEQ ID NO: 531492 - DNA, 723 bp, Stenotrophomonas maltophilia
atggcaatagagttctgtccgctggaggcggattggggaaactgggcggattgggtatcggtgcttgtttccgtgcttgccttggccattacgacccttgtcggcgtaggtacggccgtaggaaccatcggtgttgcggttctggcttacagaaccggcaaccgcgcagcaagaattgcggaggaagcaaaacaaatatccgagcgtcagcaccttgattctgtggatgccaagttgggaacggcccgtatcctcggaagcttgcttgaaatcgaaatttctagcttgccgttgaagctggctgatgggctggttaggtacaaccgatccgtaaatttcgagagtcttgtggttgcagatatccctgagttcgagcaagtcgttcgcgaactgggaaatggctttatgcccgcttctgaaggtgtaaaagggcagctctacaacttgcccgacaagctcggagaggatgttgcgacattgcttggaatgactcgagaacttgctaatacaacgcagctggtagatagccgtattgttaaaacgcaggatgattacggcgaaatcgtatttgccggatacttggggtcggccgatgatatgaaacatcttcaggggcagatgcaggcaatgcttgcatttgccattcgcgccgctatggatttcaatatgtatgcgagtggaaagactagggattacgcacccgaacgcgcattgcttgtttga

SEQ ID NO: 531493 - DNA, 1932 bp, Stenotrophomonas maltophilia
atggctgacggctcccgctccttcaacttcccaccgccgcagctttcccgcctgcgccctggcgaaatcgtggttgacctgttcgctggaggcggaggcgccagcgaggccatcaaacaggccactggcgtcgatccgcacctggcgtacaaccacgacgagctggccatcggcatgcacgcagccaaccacccgctgacccagcaccaccgcgaggacatctggcacgcagacccgcgcgtggacgtcgccggccgccccatcggctggttccatgcatctccggactgcacgcacttcagccaggccaagggcggccagccgcgcagccggaagacccgcgccttgtcttgggtggtgctgaagtgggttggtcagctgctgcgcgctgatcgcgtgtacggcaccaacaccgcgccgcgcatcctctccatggagaacgtctggcagatcctgacctggggtccgctggtggcgaagcgctgcaagaccaccggccgcgtcatcaagatggacgggactgttgcagcgcgcggcgagcgcgttccggtggagaaccagcagctcgtgcccgacaagcggcacagcggccgcacgtggcggcagttcgtggcggcgctgcgtgccttgggctatgcggtcgagtggcgcaagctggttgctagcgactacggcgccggcacgagccgcgagcgcctgttcctgctcggccggcgcgatggcgagcccatcgtatggcccgaagccactcatggtcccgggccaggccagaagccgcgcgtgaccgccgccgactgcctggacttcacgatcccatgtccgtccatcttcacccgtccccgccccctggccgacgccaccatgcgtcgcatcgccaagggcgtcatgcgtcacgtcatcaactctgcagcccccttcattgtccccggcacctgcagttcggtcagcgtgcactgcgactccggcgggtaccgcgggaatgtgtggcccttcattgccgagcatgcgaacgccagcagccagcgcacgatggccgccgacgagccgctgcgcacggtctgtgccggggtaaagggtggccacttctcggtggtgtcgcccatcctagccggcgtcggcggccgggccggccagtcggaaccgcgttcaggcggcgaaccgctctacaccatgaccactaaggcagataccgcgctggtggccccgcacctagtcaagttccgaggcgacagcatcggaacccctgccaccgagcctgtgcccacgatcacctctggtgctggcgccgcgcgtccggccggcgccgcgcacgccctcggcgtagcagctgcctcgctggtgaccctgcggcggaacatggtcggtgccgacgcacgcacgccgctcacgacggtggccgcccaggccgagcaccacgcgctggcgactgccttcctggagcaggccaacggcggttattacgaaggcgcgggcaatgatgcgcgcgacccggtcagcaccatcaccgccagcggcagtcagcaacggctggtgagcgccgggctcgccgagctgtcgcccgatcaggaggctggtgcgctgcgcgtcgccgccttcctggtgaagtactacggcagcggcatcgcggtcgatctgcacgacccggtggacaccatcaccaccaaggaccgcttggccttggtcaccgtccacattcagggcgtgccgtacgtgatcgtggatatcggcctgcgcatgctcaaaccgcatgagttgttccgagcccagggcttcccggcgacctacatcatcgaccgcactgctgacggcacagtgctgaagatcacggcgcaggtccgcatgtgcggcaacagcgtcagcccaccgccgttttatgccttgatcgacgccaacctggacccggtggctttgccgctcgcggaggccgcatga

SEQ ID NO: 531494 - DNA, 732 bp, Stenotrophomonas maltophilia
atgagaaatcagagactacgcagtggtttgcgctctgtgccacttatctctttccactcccgcatttcccatcagggccatgccaagcagcaacgcattctcagacgcatcctccagttcgacattgagccaagtcgagagctccacacgcaatgcaaaaaggctcacacagactgccttgtaccagtctatttcgcctcccaagttgcacgtctcaccaggctgaattggtacgacgaatacgcgtctttgccgagcagccgcgagcatcgcaatacatcgagccagtgccgcctcgacatctttaggcaggaattcactgtaaggaatcaggtctgcaacggtttgcggcgagaccatcgacgaacacctcgcacattctgcgtactcccaactatccacagactcgacgttggcggcaggtataagcatggccgcgcgaaggtggacttcctgaatatagagatcatccaccaccaccttcgccagcagtctcatctgcgtcctgcgcgcatcgcgcgcaagccgaatgggaagcgcgcccacaagcaaagcgacaacgaccgcagcgcctgttgctacggccgaccaggccgtccaatcaatcgcgcaggttttgctcaaccaccagcactgagtaaccccatccaacacgctcattctctgatccgactccgaactggccggcattctgccacgccatcgccacggacggaggcagcccatggctga

SEQ ID NO: 531495 - DNA, 294 bp, Stenotrophomonas maltophilia
atgctgaatcagtcaatgaagccttacaagggcgaagcagtggactggacgcaagatgagagcgctctggatgtcgactactgcgaagtcggccgggtgctggccagcctgtcgggagtggacctcgccaaggccagcaaggccaccgtgcgcgcgtgggaggcccgtggcctagcgctgatcgcactctcccgtggggaccgggccgaagccggccggatcatggaacccgtatcgaaacgccgccgcggcaccagtctggccgccgacagggcgccgaaggaggaagcatga

SEQ ID NO: 531496 - DNA, 960 bp, Stenotrophomonas maltophilia
gtgaaggtggacgacgccaaggcgcaggcgatgggcgtgaacccgcaggacgtcaatgacaccttgaacgcggcgttgggcggcgacttcgtcaacaacttcatctacaagggccgcatcaagaaggtgttcatccagggcaccgccgaagcacgcatgcagccgcaggacatcgagcgctggagcgtgcgcaaccaggccgggcagatggtgccgctgtcgtcgctgatcagcacgcattggaccagtgcgccggccgcactgcagcgctacaacggcatctcggcgatggaaatcaccggccagccggcaccgggcgtcagctccggcgaggcgatggccgagatcgcgcgcctggccgacacgctgccggaaggcttcagtcacgcctggtcggacatggcctaccaggaacagctgtcgggcaaccaggcgccgatgctgtacgccatctcgctgctgttcgtgttcctgtgcctggccgcgctgtatgaaagctgggcggtgccgttcgcggtgatgctggcggtgccggtgggcgtgttcggcgccgtgctgatgatgaacctgcgtggcctcaacaacgacgtgtacttccaggtcggcctgctgaccacgattggtctggcagcgaagaacggcatcctgatcgtcgagttcgcgcgcatcctcgaacagcagggcaggagtacccgcgacgcaatcctgcaggcggtctacctgcggctgcggccgatcgtgatgacttcgctggcgttcctgatgggcgtgttgccgctggtatttgccaccggcgccggttcggctgcgcgccgttcgctgggcacgggcgtggccggcggtacggtggcctcgatggtgctgggcatgttcttcgtgcccttgttctacctgctggtgcgccgcctgttcccgggccgcgcgccggccgacgccactgccccggaggcaagcccatga

SEQ ID NO: 531497 - DNA, 714 bp, Stenotrophomonas maltophilia
atggaagcgcgtctggctagcggatcggacattgagaaggccagggtgtatcgggagcttgcggcccattacggacgtacgcccaaggcgtgggagtaccgcatgcagaacatttctcatgtcctcgtgcaggccggcgagccctggctgccaggacttcgccctgccgcgaatgtcggtgcgaatgttgagcagcagttggcgaggcttctcgcacttccgggcgcggtgcccgcatcggcttctagacctacaagggaattgctggaacaggagaccagagcggcagaggagtccggcgaattctccccaacagatgaggttggtgagcggcaacgcgtgctagcagctatcgttcggcgccgcgggcagccggcttttcgtcaagcactgctggaggcatacggcggccgctgtgcaataacgggatgcaatgtaccggatgcactggaagctgcccatattcgcccctattccagtcgaccaaccaatgcgatttcgaacggcatactgctccgagcagatatccacacgctttttgatctgtatctaatcggagttgatccgatctcctaccgagtcacgattgcaccttcattgcgtgcatccgcgtacgggcaacttgaaggaactcgcgtcgccgatacgcgcaatccagatcaatcgattagcagcacttcgcttgcttggcataaggctcgctgtccttggtga

SEQ ID NO: 531498 - DNA, 1035 bp, Stenotrophomonas maltophilia
atgagtcccgcgccttcatttgagagatttgattatcttttgaggacgaataagcacatcgaacgtcggatagtttttgacgtgattgcttcgtctcgccagaaactcggagtaattggcggttggtatctcggctttggctcgatgtggttcggtgatttcaggattgctcacaggcaactccgaatagatgacttggtgtccattgagcatgaggactacgctaaaagagcggaattcaaccgcccttttgctggcgttagagttaagtctggatcgagcgaggatgtgctcccaagaatttccccggaagaatggaatagtcctgtaattgcttggcttgattatgatggatacttgaattctgcagttgtatcggatgttgatttaatattggatgccgcggctgttaattccgtcgtaataatcaccgtgaacgcagataggcgcacctataggccgagaagttcatcgggccctcgcgagcgagaggaaacagctgtaggcgttgtagagggatttcttggccgaaacgtaacccctccaaagtacgagccatgcgaaaacgaagttggtgtctatcaagagccaccggaatctgtatttcctgagtatttgtgtgaagcggtgatttcatacatggcgcaccgcgtcgcagcctctggtaggactgcaccggatgggcaggtaattagcttcacgccgctttttaagctgcatcataaggatggtgctgacatggtgacaattggcggcgcaattaccacggagcacactgctaactcttggagcgctagcgtggccgaaatgtcagtcatttcggatgaaagcggattcccttcatactgcaagcttgatcttattccttttactgtaaaggagaagataattttggatgagtgccttcctggtgagagcgacggtgatatgctggaaggagcgagaaaattaggaattcagctggccgagaaaaatataactgactacagaaagttctatagatacttccctgtatttgtcgaatccggtatctag

SEQ ID NO: 531499 - DNA, 1338 bp, Stenotrophomonas maltophilia
atggtaacaggggaagtggcgggcgctggctctgcgtccaaggtggtgcatgccgacgctacgaaagacttttttgtcaccatgattactagggatatttccctgcgagattgcatattcgatcttttggataatgcaatagatggcgcgaggaggaaattgtctgctaatgagaagcggccattcgatggttatattattaacgtcgattttgataaatcttcattcattattcgcgataactgcggcggcatcaagctgagtgacgcgattgattacgcgttccattttggaaggaggcccgacagtcccgcggatgtaaagggaggaatcggcctttatggaattggaatgaagcgcgcgatctttaagatcggtaaaaaagcggatgttgttagtcacgcagatgacgcctctttcagagtggtcattgacgttgctatgtgggagaagagtgctcattgggactttgaatatgaggacgttccgaggtcgggagaccttgggacggaaattaaaatttccagcatcaatgacggcgtggttcaacagctgggggacgccgttttcaagaatgacctttcccgatccattgctcgggattatgcgttcttcatcaatcaggggttggtgattaaggtttgtggcgatcccataccctcatataagtatcagctccgtcaaagtgaaagtatgtctccatccgtagagtcttacgaagacgatggggtgaaggtgaggattctggcgggcttggttgatgatcttccagacgacattccggatgatctgaggccagataaggttgatcgatttggctggtttgtggtgtgcaatggaagagtagtcttagctgcagacaaaggtgacgaaacaatttggggagttgatggattcaatgtctggcatccgcaatacaatggatttgccggattcgtcttctttgatgctcaagatcagaggaagctcccctggacaaccactaagcgcgatctcgacgcatcaagcccgctctataggcgcacaatatcgagaatgaagtcggcaactgttccattcattcaatataccaacaagagaaaggtcgatatcccatcggcaaagattgcagaggcgccggttaatcatcttgaagtttatggtctgagcaagcctcagccgctgaagcttcctgcaatcgccgatgtgacgcgtccagtgatgtcgacgatcagctatcagagagagcgtgcggaagttgaagcggtaaaggtccatttgggctcaataggaatgacgctgaaagaggtgggtatacgaacctttgagtactatttgaaggcggagatgggtaaatga

SEQ ID NO: 531500 - DNA, 1128 bp, Stenotrophomonas maltophilia
atggataaacagaaaaaaattattgacctattcgccggagtcggtggtctcagtcttggagcagcacgtgctggattcaaagttgctgctgctgttgaacttgattcgcgagctgtcgcttaccatgctctcaatttccctgagtccacacatctgcaggaagatgtcgcaaggctatctggtgcaaagctactgaagcaggcgggtatagaaaaaggacaactgtctggtctaatcggtgggccgccttgtcagggattcagctctattgggcttagatccgaatcggacccgagaaatgagctgttcacacacttctttagactcgtttctgagacaaggccggcattctttgtggctgagaatgtgcccggacttatccagtccaggaataaacctattgtcgaacgagctctggcaatggtacccaggaactatgtgctactggagcctcttctcctgcaggcaagtgactatggggcgccgacaaagagaaagcgggtgttctttgttggttacgatcctgagaaattttctcccggtctagataacgacttcattgctgcgtccaaggaagagtttgacgccgtaaatgtcgcgagggctcttgccgggctacctgtgcttcgaaagaactggttgaccgaaggtcaaagctggaggaaagttaaggtttgcgctgatcaaggggcatttgagcagagacttcatgggcatgttcccaagggtgttggtgatccaagttctttagcgcgactggccttgtcaggggaagtgtccgggttcctagcaacagtgcatacacctcaaacgcaaggtcgctttcaaaaactcaaagcaggaaaatccgattcggtttcaaagtgtgtgaggttggatccgctgggctactgtccgactttgcgagcggggacaggtccagagcgcggaagctatcaagcaatcagacccgtgcatccaaccgcgccgcgagtaatctgtccccgagaggctgcgaggctacaagggtttccggactggttccaatttcatccaaccaagtggcattccttcaggcagattgggaatagcgtgagtccaattctgtccgagcatctgatgtcaagaattttttctaagttgtactga

SEQ ID NO: 531501 - DNA, 486 bp, Stenotrophomonas maltophilia
gtgctggtactggtctgcgataccggcaacaagtacctgtcgaagatgtacaacgactactggatgctggacaacggcttcctggagcgcccgcagcacggtgacctgcgcgacctgatcctgcgcccgtacggccagcgcgacaccgtggtgatcggcccgaacgacctgctcaccaccgcctaccagcgcatgaagctgtacgacgtgtcgcagctgccggtgatggacggtgaccagctggtcggcatcgtcgacgaaagcgacgtgctgctgcacgtctatggtgacgaagcgcgcttccgcgacaccgtcgccacggcgatggtcagcaagctggaccggctggacgtgaagtcaccgatcgaggcgctgctgccggtgttcgaccgcggccaggtggcgatcgtgatggacggcaacgctttcctgggcctgatcacccgtatcgacctgctgaactatctgcgccgtcgcgtgcagtaa

SEQ ID NO: 531502 - DNA, 1050 bp, Stenotrophomonas maltophilia
atgctcggcgctgtactgcgcgaccaagccgtccacacggttccccaccgcggtgaccttgccgtcgatctccgtaacgtccagctccagctggtcgattcgcccaaccaacgcaccggcctcggccacagcatcgcccacactcttccacttcgtgcccggcggttcctcattgccggggggggcgtcggtccacaaccagatcttgccgttgcgcaccaccgtctggcccgcctcatacgtggcatctgcgtcccagatcaacgggacgatgctgctgatgctctcgatttccgacagcagttcctgcctcagcgcgctcttgttgatgaggccggagaaatacgcgtcgtactcggccacgtcggtgctcgactcgcccaccacgcctgcaccggccggataccacggcccaatgttgccgctgcgatccaccagccggccccagaagtagaacttcgcgccggcggccaagccatcgagccggtgccggttctggggataggcgaaatcgcccagcttcgtcgcgctttccagactcggtcccgggctgcgccagatctcggtgcgttcggtgtcggttgccccgggcgggaacgcccaggccaactggataccgaacaccatcgacgcggccgtcagcgacgtcacccaaggcagttccttcagcagctgctgcagcgtctgcgggttgaactcgggcttgctaccgtggaaggtcagctcaccctgccactcccagccacccaccgaggcagccagcatgccgatgcggctggcttcgagctgctcagcactcaccttgccgcggtggctgatgcggtcgttgatcgacttgcgggctgcggccttcacctgcagatggctgtcgggcagcagaaccagcaccaggcccaccggctcctgggttgccgggtggaggagttccagacggcgctcggccgccacgatgttggacagttcggtcatggtcgggtctccgaaaaagaaagagcccgcacatggcgggctccttattgggtaagtcagggaatatcagctaacttatga

SEQ ID NO: 531503 - DNA, 630 bp, Stenotrophomonas maltophilia
atgcagcagcgcgctgcagatcctggtgcactgccgcgcgggcagctccctaccgttgaagtcagcgacagtggtgagctcgaattcgaccgtctcgtcgtcctcgcccaccttgcgctcgatgtaccagatctcgtcctcaaaatgctcgcccggatcggccagcgggtttccctcggggaagttggcagcgtccaggtactttaccagcgtctggcggcggatcactttcgcgccggccaggtcctggaacatgcgacacatagagccgatcacaccgttgatgttgctgaccttcagacgcgggttcggctgctgctcgctggtacgctgaaagccggtcgcggtgatcggccaagcgccgtattcctgcccttgccaccagatcggtcccgactgcaggtgcgcgtggaagaacagctgatcggcaccgaagctggtgcagtccagctcatagaccgtgacccgtccgcccggttcgagctgttgggcatcggcggtgatcatgtcgatggctccaatgctttgagccgcgcagccaaccccgcgagcgtggcgagcatttcgttgcgctcattttccaaggccgcaattcgatggtcgtgctcgatccaacccgcatggaggtag

SEQ ID NO: 531504 - DNA, 960 bp, Stenotrophomonas maltophilia; identical to SEQ ID NO: 531496

SEQ ID NO: 531505 - DNA, 1074 bp, Stenotrophomonas maltophilia
atgctcaggagtctcgtgggctcggagatgtgtataagagacagtccgtgggccgtggctctgttgcagttgctgctcttcctgcaggcgctgcacatcgcgctgcggcgggttctgctgcaactgcgcgacccgttcgaacgaggcctccaccggtgcctgcgctgcaacctccgcgggcatgctggcgcgctggtgtgccgggtcactgcggtccccctgcacgatgaacagcttcggcgcggtatcgccgcgctgctcgcccagcaccacttcgtccacacgcgagacctgctgctccttcgacagcgcaagcaggctggcactgacattgccgttgcgtgcaccgaaagcgccgaggtcggccacctgctggtggatctggttgaggcgggcatgatcgtcgtgcgccgggtctgcgggcgacccgcttgccgcgagggtgctgttgccgcgccactgctcgccgttctcggtgaacatccactcgcggaacgtctgcttcggcatcgggttccactgcaccctgtccagctcgctgcccttcacctgctgcggaatggcattgacggcgcggatgttgtccaggaccctggtggcgccctcgtagttggtgatctccccggccagcccgaccggtcgcaggcctgcgtggttcagggcaccccatgcgaaatcggtgcaggcgttggcgaagaagtcgtagttcatgtcgaagccgtgcttcttcgggtccgccgagaactcgaggatgcggtcgtactgctccttgctgatctcgatcgtgcgctcgaagcggggcttgtcgtagaccgacacgtccatgtcatcgactttgcccctgttcggctcgtccttggtgcctgcgtgggtgaaaccaatgctctccggcaagggttcacccgaacggcgcagcgacaggaacatgtgccccgcgaacgaaggctccagcaggaacctgtttccctcggcatcacggccgtagcgcggcgtgccgggggccgccagatggatggttacgctgtagcgttcggcatcgtccttgtgcatgtctactttcctagtgattggtag

SEQ ID NO: 531506 - DNA, 276 bp, Stenotrophomonas maltophilia
atggacgaaaccacccagcagaatgccgcgctggtggaagaagcgactgctgccgcgcgtgcgatggaagaacaggctggtcagctcagcgaagcggtgtcgatcttcgtggtggacgaagccgagaccgtggttgccccgcgcatcgccgctgccccggtcccgcgtgctgccgcaccggccgcaccggccccggtcgcgccgccggcccgccgcaccgccggtggtcgtccgatggccaccgaactggccgacggagactggcaggaattctga

SEQ ID NO: 531507 - DNA, 363 bp, Stenotrophomonas maltophilia; identical to SEQ ID NO: 498918

SEQ ID NO: 531508 - DNA, 450 bp, Stenotrophomonas maltophilia
atgcgcctgaccttgcgccagctgcaggttttcgtcgccatcgccgaccatggcagcaccaccgctgccggccaggccattgcgctctcgcagtcggccagcagcgccgcgctgcaggagctggaggcgcacttcggcaccccgctgtttgaccgcatcggccgccgcctggcgctgaacgggcatggccgcgcactgctggagccggcgcgcaccttgctggtcaacgccgccgacctggagcgtcagctggccgccggcggcgacccgtcgcagggggcaccgctgcggctggtgctggccgccagtaccaccatcggcaactacctgctgccgccacgcatcgccgaatgctgcggcaggcgccgcaggccgaggtcgacctgcgcatcggcaacagtgccggcgtggtcgctgccgtgcagcgcctggacgtggacgccggcctga

SEQ ID NO: 531509 - DNA, 1596 bp, Stenotrophomonas maltophilia
atgcgcctactcgagagccgcttaacaagattccgtcgctttttcaatctaactattcgagatattccagccagcgccaagttggtagttctggctggacccaacgggtctggcaagtcgtcgttcttcgacgcacttttgctgaaatatcgaatggacaatggatatgggtggaacggagattccaagtactacaatcggccactggactcatccaatgattttcacgcgagaatcttagtaaccactgatgcgggagaccgtttcaatcgtgggaatctctacgtcaggaccgcttatagaaacgatcatgagttcagtatcagatcgctatcgcggcaaggagagattctggacaacgtcagcctaaaccgactgattgagcccgacgccactgtcagcaccaattaccagcgtctcgccgcccaagcaatggaagacgtcttcgtcaacgagattgcgagtaccactatgggtgaatatcgtgagaagctgatgggtgaagtccgatcacctctcagccgattgttccctgacctgaacttcgtgggcattggcaacccgcttgatcaaggctcgtttcagttcgaaaaaggtgcgtcgaaaggttttgactacaaaaacttatccggtggagagaaggcttgcttcgacctcatccttgatctcgtggtgaaacggcgcagctatgtagatgcaatctactgtattgatgagccggaaattcacatgaatacgcgaatacaaggggcgctcctaggtgagctcgtcgaccttgttccgggggaatctcaactatggatagcatcgcactcaatcgggatgatgcggaaggcacgtgaaatttatgatgccgacccgaactcagtggccttcatagacttcagcggtcacgactttgacaagacagttacgctatcgcccagcaaaccgacacgcgccttctgggagggagtgatgcatgtcgccgtaggcgatctagccgcattgatcgcgcccaagcaagtggtgatctgtgaaggaaacccgtcgggtctagtgccgggaaagaacagtgaacacgacgctcgaatctacgaggccatctttggcgaagatatgcctgatacgacctttgtatctgccggcaactcgaaggaggtgcagagcgacttcatcggcctggcgacagtactgccaaagctcgccaccggtatggagatcatccgtctgattgatttggatgatcacacgcccgcagatgtagccgacttcaagagcaaaggaatacgagttctgagccgccgtcaccttgaagcctacctctatgacgacgcggtcctgagcgccctctgcgctttggaggggaagtcggataaggaagcggatttgctcgcagccaagaaggaagcgattgcgaattcgatccgacagggccattcagcagacgacatcaagaaagtttcaggctccatctacatcgcggccaagcgaatcctgtcgctctctcaggtaggcaacgacgcccctgcgttcgcacggaacacgctatcgaaactgatcaagcccggcatggacgtctacgaggagctgcgtcgagatgtgtttcagacttga

SEQ ID NO: 531510 - DNA, 558 bp, Stenotrophomonas maltophilia
gtgcgtaccggcaactattcggccttctacgtggccgagcctttcaacgctggccccttggcggcacatgctacgaaggatttcgtctactacaacaccttgaggatgtggaaaggtgcggatccggcatttccgttttcggactctcacgccacgacgtacaacgtacgcgatggaagcgattgggagaccacgctgaagccgcggctgcgggaacggctgcgcaactctaagaacgtcctcctgtttcttagcgccgaaacagtgaactcaagggcgattcgtgaagagatcgagtacggcattcaggttcagaggttgcccttcattgtcgtgtatcccgactacaagacgcgagccgaattgcttcgcgatggtagtctcaaacaatccgtccgcgatttgtggagcaaggttccggcgtttcgcgatcatatggaccaagtgccgacactgcatgttcctctgcacaaagaaacggttacgtgggctcttcgagcaaaagaattcatgtttgagactaagattgatccctgcatccgtcgctatgacccgtga

SEQ ID NO: 531511 - DNA, 837 bp, Stenotrophomonas maltophilia
atggccaaggtgagcattagagatagacgcgtacttaaggtctttcaagagaaggcagccgccttctttggattgctttccataattcttatattcgttgacattccggatgaagctcgtgtttgggccggcattgccgtgcttgctgcagcgggcatcggttacatcgtcgtatggctttgggccgataatctcaatgagatcagcattgagatcgaagggagcagtatcgacatcaaagtgggcgacatcttcgctcagcccggcttcaaggcgattgccttcaatgagtattttgacacccaagtcgatgatagggtaatcagtagggcgtcgctcaatggagtgttcatagagaagcatgttggcgccgatctggccaccctgaacgcccatatcgataactaccggtttgaccccgatgcggtcgaagaccgggaggtggagaggcacgagggccgacggacgcggtatcaactaggaaccatctgcgtctatggagattacttacttacggcgttctccaagtttgacgagaagaaccgggcttcattgacgatgcctcagtacctggaattcctgatcgccttttgggatcgcgtaaatcgcgtatatgcccaaaagaacgtttctacggcgatcttcggttctgggattacgcgtattcagggtcaccgtgatattagcgacgaagacctgttgaagatcatgctttggacattccgcatcagcgagatgcgattcaagtatcctgccaagctgaccattgtgatccatgaggacaagatcgacaggatcaacctcttggacatcaagtccgctaggaacggcgtgtag

SEQ ID NO: 531512 - DNA, 1227 bp, Stenotrophomonas maltophilia
atggtcatgaagttcaatggaaagccttttcggcctggtgatcttgagagggccattaacaaggcggcaaaagagctcgtggtcaagcgcgttcgggacaccgtgggaacgctccgcgaccccgatacggatcggtttgcaacagttgcggtagatggggccgatctacatagtcttgccattagcgtagaaggttccgcacagctgatgggacgtgcccgtgagaacctgaagctgcagccagatatcagcgccgaaattgagacaggtcataccgacatggctgaaccgcacgtctttctgagctttggttgggaggatcgcgcgcttgctgagcacatcgccacgcagctaatcgaggcgggggttcagacatggtggtccgaatgggagattcgcgcgggagacagtctgcgtcgcaaaattgatgcgggaattggcggctgcactcattttgtcgtgctactcacgccgacatcgatcacccgtccttgggttcaagaagaagttgatgccgcttttgcaagaaaaatgggtgaagggatcagcctcatatctcttcggcacaatgttgagatgagtcaagttccgccattgcttgccggttcgctttgcccggtgattggtgaaggaacgaatgcaatcaagcagctcgtcaacgacatcctgggtatttcacgtaagccgccgctgggaagcaagcccatcgcggcgggccttcccaggtccaactattcacaggctgccatggcagtggcaaaagtattcgtcgagggcagcccgtttggaaccttcaatgaccacgcactgggtgacgaatatcttctgtcacaaacaggcctgacaaaggacgacctaactgatgcactgtttgagttgaagcgatggctagaagttaggtttggtacggtgttcgctcgcgaaggtctctacgcggagttcgatgcattctggatggactggaagccagcagacgatgcgatatttctagctagtcaactcatgaacgatccccagttcccccatgagccgaagcgtatctccgaactactcgaatggcctccgcggcgactgaacccggcggtgacgtatcttgaaaggcgagagatcgtgagaacgcttcggggcctcgatacagggccctacatggtattcagcatcgaacctactgaccacaccagaaggttcctaagaggtaggtacgctccagggtcagaactgagctaa

SEQ ID NO: 531513 - DNA, 2238 bp, Stenotrophomonas maltophilia
atggctaagaagtgggttgaggtagcttcgtcgcctgcctatcaggctctagcgcctgagcaacaggaagaggcccggaaccagtactggaacgaggttgttgctccgaacgttcctgctgaagagcattctcaggtgcgccaggccttcgacagcgatacatcgagaaccgttaattggccggatcaggctccgttggatgtaaacgtgaccggtggcattcctgcgccggccgatttctctggagtgacatccagcatatccagcaccgctgatggccgtcaggctgatggctggatgcctggtgccggtcgtgactttgcattcggcgttcgctcggcgctgcagggcgctggtggcttgctaggagctgtcggcggtgacgccttcaacaactatgtcgccaatccagtggcgcgtactgtgggcctgcaggagtcgcgcccgtaccgagaagaggctgcagctttggcagatcggcttggcctccccaaggcccagactggcgctgatcgtgtattgggtgatgttggtgaagcgctggcgggaaccggcctcactatgggcgctggtgctgggatcaatgcgctagccagacttgggggaaacgcagcaatacgaactcctggatacgtggcgcccgtcaagaacaaacttgccgagttcctggccgcacagccgggactacagacggcatccgctatcaccgggtctggcgcatcgtccatcgcccgcgaatccggcgcatcgcaaaagaaccagctcttggccggtcttgctggtggtcttgcacccggagtagcaacagcaggcggtgctgctgcacttcgcggcgcagtccgtggccgctctggcgaaggtatgcagaacacgcttgcagacttccaggccctgggagccacgccttccgttgggcaggccgcagggcccggctgggttcaggggttggaggggcttctttccaaggggcctaccagtggcggcgtatttggccgatttgcggagaaccaggcggatcggattggcgcagggctgaatgcgaaggcttccaacctttcgcccaatccaggctcagagaacgctggccttgcaattgagaggggcatggatgccttcaagggtgatacaaccgcagtgaagcgcgcgttgtattgggcggttgatcagcagatcccggggtcttcgccgacgccgatggcgaacacgcagcggatgcttcagcgtttgaccacccccaatccgagtgctaaggcgacgactggcgatcttatccagccaagcatgatccggcttcgggacaacttggaagccgatctccaggcgaacggcggcaacttgccgtatgaggccctgaagcgtatccgtaccgatattggcgagcagatcggacgttcgtcgccgctcaatccatccactgacttgcaagagttgaacaaggtttattccgcattgtcggaggacatgctggctgcggcgaagaataacggtcctgcagcagtgaaagccgctgcgagggcgaacaactacacaaggaacgtggctgaaaggaatgacctggtgcagcgtgttctggacaagaagggtggaccggagaaggtctaccaggcggctatgtctggaaccaaggacggggcaaccactcttcgtgccgttatgtactcgcttccgaaggaagagcaaaaggcggtttctgcagccgtaatcaagcggatggggctagccactccggggaatcagaacgtagaaggcgacgttttcagttcgtccactttcatgcgcaactggaatgacctgagtgaggaggctaaggcggtgctgttcggtcgctatggcaaggacttcaaggagtccatgaaccaagtcgccaaggttgccaacaacatcaagcagggagccaaggtctatgcgaacccgtctgggagcggtgacaaggttgcagcaattgcgtattgggttgggctgctaaacgctcttggcagcggtcacttcaggacggcaacgggagttgcattgggcggcgcgtctgcaaatgtggtatctcgcatcttgaccagcccaattgccgtcaagtggctcgcgcagcaaacgaacatgccaaagggcgcgctaatcccgcaggcgatcctgcttcaaaagcaagctgcagcagctggtgatactgatcttgaggagattgcaaaggctctagaagagcaggtccgaagcgatcaaccaaatgccagcaatcaacagagatag

SEQ ID NO: 531514 - DNA, 186 bp, Stenotrophomonas maltophilia
atgagtaaggaaaagttcgacctctccaacatcggcggccagccgaaggattggctccagcgagagcatgagaaggaagtcgcctccagctcgattaatggctggaaggtctttctatcgattgcgctagctctatctctgttgattgctggcatttggttgatcgcttcggacctgctcttctag

SEQ ID NO: 531515 - DNA, 141 bp, Stenotrophomonas maltophilia
atgagctatctggtcgggatcggtccatcggcgagggcgctggaattaatggacatctctacgcgggcgagcccgccggccgccatcccggactttcgagaccagtacgcgcaggcgcgcgataccggctgggtcttctga

SEQ ID NO: 531516 - DNA, 459 bp, Stenotrophomonas maltophilia
atggcactgaaggcgagctttttccgtatcgaaaatgaccttgacgtcgccccaggctccctgatccgacagggtacggactggcttatccgggcgaaaatcgatgataggcacgaaaaggcagatgttgcgctgtgcctcaccggcgagcagctaggccagttcagctacatcttcgaaccgtctcgttgcgtggcactggacccaactttaaagcttgagctcagggtggagggcatcatcgagggacctggtggagcggtgataggatcgctagtctggtcgggtacttctcaggcgatctgtgcgaaggacggcttcttcatcaccatggcgggagagagctcgaaggatttttctggattaaggacgttcttcgctcgcaactggagtatttgggcggtggacgaaactggcaaggaaattggcagtggccccctggtagtcgtcagcgcctga

SEQ ID NO: 531517 - DNA, 1182 bp, Stenotrophomonas maltophilia
atgtcacagcatgcagagcaatcagaaggggtgacgccgggcgatgccggagacttcatccgcatgcgattggccggagggcggttcgatcaacatttggtgccatttgatgttctctctgatctggcagtgtatcgagaaatcatcattgatctggcgcgtgttctctttaggcgtgcaaatccaaagcgccagaaggttccacggggcttcgcagattcttttcaattgggaatcgcttctctcaagccaggcaatagcgtgaccctagcaagtcgcagatttgctgaggacaacctcggcccaatggaggatcaggctactctgccattcccagaaattggggcgttttctgccgcgagagacatgatttttgatgtcatagcaaggaccaatagtggcctcgcgcttcccgatgcttttccagtcgcgttggcttcaaagttcaataaatttggcagaaattttagatacaacgaatttctggagctctccgaaggcgggcgtgcgcctgttcgttacaatggggagactaggaaaaagatcgttctacaagcggggaattcctacgagggtcacgtcgagggggatttcaccttcgatggcgggcgtcgaacagagcagctgatccacctagtttccaaggatggggcgccggtcgacttgttcgtgccgacttcatatgagtggactgctcttttctctaaggtggggcagtccgcccgtattacagggcttggactctacgaccgacaggatcgcctgatcaagattacggagtatgaagagatcccgttcggtcctgttgaacccctgaccaccactgctgttcgtctggccgaaatagcgcagacgcgagcgggatggtacagcgaatcaaatccagcgccatccgcgaacgccatcgactcaatgaaggatctgttggagcggatggagagtctgggggttccaaggccctatctctatcctttgcctgaaggcgggatcgtagctgagtggtcattaaatggttgggagatatccgtgactgttgagcctggcgcagattcggcagactttatcgcggtgagcacggaaggcgctggtgaagtcgaggattctatatacctaaatgccgaggacctgggcggcgtcgctctaagggtctggtcaagagtcaactcggaggaggccaaataa

SEQ ID NO: 531518 - DNA, 309 bp, Stenotrophomonas maltophilia
atgaccacagacacagcagaagtccttgaacgcctccacgcgtgcgaggccggccttgaagtgcaccgcggctacctcaaggctatggagtacgccctacgcgtctctttcatcactcaccaggatcctgatgccctcctctcgacgtggaccaagctgctccccgctatcgctaacagccacagaagcgagggcggctccctgttcgctgcggcatttgagcagtccctgacaatcctcaccgagcaaatgggcacaggtcacccggcatcaacgggcagtgacgacaccggcgagatgtcgatatga

SEQ ID NO: 531519 - DNA, 615 bp, Stenotrophomonas maltophilia
atgagcatcctcaacgttctgctcactcgcgaccacttggtcgtcgcggtagacactctggcagaggatgcccggacaggggcgcattccgcaggggcgaagctgctgctgatccctcagcacaacctggtgctggccactcgcggttccacccagttcttcctccggatctacgaactggcgctgcaggccagcttccgcgcagatttcacgatggagcagttgtccaccgagctcgggttggtggtggaccagctttggccgaactatgagaaggcagtggccgaggccggcctgccgatcgagcagctcgggacagagctgatgctgggtggctggtcgccgaagaacggccggatgatggccactggatatgccaagagcgacagccagcggccctgcctggtccagctgatcgaaggccagcttgcgtcacccggggagccgctccaggctttgacgccgagcatggcccaagccgatctcatggctcatgcgcgtgtgcaggccggctacctcaatgagcgggtgggacgagaagtagctggtggccggctgctggccgggttcctgcagaaggggcaggcggtggtgaaggaccttggccgaatctga

SEQ ID NO: 531520 - DNA, 699 bp, Stenotrophomonas maltophilia
atggatgcaagcaggttggccacgatcgccatcgagtccggcagaaagttcgatgtccttctgcgctgggcagcgcttcatcgttggcggcgtctgtgcattgttttcgcgttcgcatcgctgctggtatccggctactgcgtgattcttctggtgtcattccaccaatcgactcaggaaggggctgaaggggtagagcggtatgagcgagccttgcaggaggatcttgtaaaggcgggtatgggatctgcagaacagtgttccatcgcacgtcagtcaggatcgacagatgctgaaattcactgcccagctgcagaccgtctatacgcggaggcgcgtctggggatactcgaagaacgtcgccaggaagtactggctgcgaaggcttactcggcaatggtgctggactatctgcagcagttgcggaggatcgagatggcgtgggacagggatcacatttcaggggggcatgggaagtggatgaaagccttggtaagtcctctcggtgtggctctggcaatggcagtgcagctgctgctctatgtcgctgaggttgtccgcattgagcagttggcgcatgccgcgagcatggccatctctcgtcctccggaacgtgatcagccggtggaggacgacttggtggtgggagacgtgccaaacttgcctcatgagcgaatacaccatcctgatcgccgatga

SEQ ID NO: 531521 - DNA, 660 bp, Stenotrophomonas maltophilia
atgtcgatttggattccaagtgcaaggctgttgttgatgaacttggctatcaatgattctgcgaatttttcggctggcagaggaggggcggtttgcgggagtgcagcgaaagtgagcggtatcccatggcgctggatggcgacgcgggggggcgtgaatgttgatttccggtttttcgtggttattgtttttattttttatggggctggttgcaggtatcaagaaggtgtgggcgtaccgtttggaacgacctgtggcgtcgagggcagctccgcctgccgggtcagcttccgggaactggctgctacgccccggctattcgatggaaagttggtgcggatggagggctatctcggggtgagccgggagctctttgtactgaattcaagcaaagagttgtttgaggccggagtgactgaggagacccaagttcgaattagagggccaatagatctgcagcaaagcgtatttgatgaatacgcgtattcatgggtctcgataatcggggtgttcaggacaagggagagtgacaattcgacaggtgatctgctgcttggcgaaattcacgccccccttgaagttcgctccctacgaatccctggtcccgttccacgtgcggaatttggagatgtgctcgtcaatcttgaagatctgaagtga

SEQ ID NO: 531522 - DNA, 612 bp, Stenotrophomonas maltophilia
atggaatctgaagttgttcttggtgtagcgactggcgtattgactagcggcctactgtgggccgccaaatccctttggaccaaatccatcgagccatacttaagcaaggtccgttacagtggattggatgtgtccggtccatggaccgccattgatttgaatgagagtgctgcaatcagattcagcatggatctcaagcagtccgcacacgccctgcgcggcacctgcatgatggagctctattcaacagataacgagttcaaggtcatgcttgatgtgactggcgacctgtgggagggctacatcagccttacgctaaagccggaagaccgaaagatatcctcatactccgttgcactacttaaggttgcaggcggcggcgtggcgttggtcggcggccatcttttccgcaacgtcaacgatgagaaggttgacgacatgatcgtgagttttgtccgtggatctggcaacagacatcacgtgatcgctttcaacgaagcggcagccaaacttcaagcagcgtacgcaaatggtccagcacgccccccagagctggagggtgcgacgcgcgatattggcgaagaaactgacgaaagtggagagaagtcatga

SEQ ID NO: 531523 - DNA, 357 bp, Stenotrophomonas maltophilia
atgattgagttcgacccgcaccaccgtatcgacttgaccggcccttgggccggtttttctttcctcggtgatcgcctgatcacccccgagggccgcgagctgctgcccgaagatctggcctggctgtcgctcacggcctgccaagcacaggaatggcgccggatgatggaaagcggccgcgcgatcgatggtgcgcgaaagcccttgccccacaaggctgccactgtagtgagcctttccgatgccttggcagaacgccgcaaaagacggttgccagtggcgatggctggccctgacgccgagccaccttcagtagtcctgccggtgccggggccgaggccgcgtcagcgcgggtga

SEQ ID NO: 531524 - DNA, 444 bp, Stenotrophomonas maltophilia
atgatcgaaagcctgcgcgtgctgaagtcgcagagacgtgtgatcgacgtcgttggctatgacgtcaacgccagcaagggcggcaaccaggtacgcgatgacctcatggcagccgagttgcggcggctctatcgagggttgccagacaatgcacgcatgctggtgctgaccggcaatgtccacgccatgctgaggcggccggaaggtatgccgccggaaatgcagaggcggccgatggcctcccagctgcgggacctggatatctacagcgtgcggttgggtgcactgcgtggccaggcgtgggcgtgcgcggaccattgcatggcgcggtcattgcccgaacgggtggcccgtgggcctcgggtcgatgcccatgcaggccggcagcacgacctgtgggtatggatgccggaactgagcgtcgggacgctggtggatccgtag

SEQ ID NO: 531525 - DNA, 939 bp, Stenotrophomonas maltophilia
atggtcgctgttgcctgggggagcggcctgcatctcacgtcgcagtcggtttcgttgagattggtggtccaatccatgcaacgccgcgggatgaagcgggcgagcacacacatcgatgaaactctcgtggcatctcgtaaaagttgctccacttcggacaaatcctgcgtccttcaaggatgcgtagacgatgctcagggcgcgctttgtgatagcggtcgtgaggcgagcatcaggagggaggatgattgcaggcgaggcctctcagactgggtaagccggtgcgaggcaatgagtgtatcgacttggctgggagcggtaactggcattgacgtcagtagctgtcgctatcaacaaaagttgttgtttggccgtcgttccctggttcgcaaaatcccgaaaaacgtcggatcgcatgatgcagattgcagcttttctcattgccaatcttctgagtatggaagcaggctggagacacgcgattctgcgttcaaggaagcagcatccatgaaatcgaatttttcggtgtcattcaaatgtctgttggcttttgcgcttgcgcttggttcgacgacatggccgggagtgatggcgttggaccgccttgcggttgccgtcgatcggaccacgcgctacagcgccggaactgacgaagcgaacgaagtcgttcgatggctggacgcacgcaaggatgtccaccagcggacgcttgcacttgggacactgaccattcgccatcgctgtaggggggagcgggattcacctcggacgccagccatccgcgcccttttccatcatggtgcttccggagagaagatcactattaccaacgatcttccaggatgcgcacgcgagacgtggacgttcgcatggaccggagatggccaggacgcctactggaaacagaccgcctatggatggcgggtactgaccacttag

SEQ ID NO: 531526 - DNA, 636 bp, Stenotrophomonas maltophilia
atggctgacttggggccgttggttgttttttcctccggctgggtagctgccgcgtttgtcggtgtgctcgagctgccagccaggatcgtttccttctcggagaattacgccccggcaaaggaaactgcgctcaatgcggcgattggctaccagaagtacgccgggcgtttctccagtgaccctaacgcgtgggtggggcggaatcttgttagcgacggcactcatcctcccgacgagggggatatacagttcgacattaagtacctcggccatggcgagtaccgcggcgagattcgttcggcatacatggcgaaaaatgccctcgctccatggtctagggtcatgatcgatgggagggtcggactcactggaactttccaaggcgtcgtatgggacatcgttaacggcagtcgtgtctcctacgcgtcgttccgtttgtctccagaggacgaatcgaatggaagccttcgactcacgccaacatctgagaacgacattttttctgacgaggttgtactgtggcccactgattttgagatgtcaggaggtgagcgggggcaacgtttcgacgacttgcttcacaaagtcatcgcccagccttcaaagaatgagagtgccaaaaaggtcgagaagtag

SEQ ID NO: 531527 - DNA, 135 bp, Stenotrophomonas maltophilia
atgccaagcccgaagcttttttatcgcatcctgcacatccacgaacagctaatggcgcgcacccgctggtaccccattgttgctgcgttcgcgctggtatggaccactgtcacggtcaccaaggctgcactttag

SEQ ID NO: 531528 - DNA, 921 bp, Stenotrophomonas maltophilia
atgctgtgctcggatagcacagggcagttcgggcatcactgcccaaggtgctcgaactactggcgcagcgggccgttcccggcattttgcccttattgccgtcttaccgctgagcccctggcctttctttcggaggcgcaacgggcgtttattcagcaatattgcgcagtgatggctgagggtttggactcgggcgccgatggtgtattcgagatcgatatggatgccgttgccgatgcggtcggtgcggacacgcctaagcccgcattttacgtatcagagcagagtcagcagcataagttcaactgtgccgaatgcggcgagttcaacgatgtaattgggcggtatgtctattgctcaaaatgcggaacgagaaacgatcttgaagtgttcaggaaggatacgatacctgcgatacgcgataatcttaatgccggaggtaggccggaggacgccattcgcaattccgtttctgcattcgattccctcgtagcacagtacgccaagcaactctctgcactggtccccctcaccaaggcacggcaggacaagctgcggcggaaattccatgattttaacgacgtgacatctacctttctcgatatcttcgatgtcgatttgaagaatggaatcagacccgcagatgcgcagttcatcgcgttagagtttcatcgccgacatgtctttgagcacaatgggggagaggtggacgaagcgtatctgaggagaagtggagatgcttccgtgaagcttcggcagttcattcgagaaaatcctgagaatgcccatcgactgctggatttactggcaaaggtagctgcgaatctccatgatggattccattctctaattcccgtgcggaacgagcctatcgagtgggcgagaaaatctggaagagtgaagccagctgctcgggagtag

SEQ ID NO: 531529 - DNA, 984 bp, Stenotrophomonas maltophilia
atgctatcgacgacgctattgcgtaagaatccgtcattcgctccatactttaatgacacaaacgtcatcaatggccacgtcatggacagctttgccggtctcagcctcttcgttctggtcgccgaagcacgcagcttcgcggccgcagcacgacagcgtggcatcaccccttcggccgcaagcaagaccatcgcccggctggaagagcgcctgggcgcccgcctgctgaatcgcaatacccgcagcgtcagcctgactgccgaaggcgagcagttccttgaacgctgccgccgcatcatgatcgaggtcgccgcggcagaacgcgatctgaccgatgcccaggccgcgcccagcggtcgcctgaaggtcagtcttccactcgccagcggtctgatgctgccggtgctttcggcgtttgcgcacagcttccccgccatcgaactcgacctgcacttcagcgaccgcctggtcgatgtcatcgaggaaggcttcgatgccgtcgtccgcacaggcagccccgccgactcccggctgcacggccgcaacctcggcagtacccgcctgctgtgcgtgggcgcccctgcgtactttggcccagcgcggcacgccgcagcacccggacgagctgagcggccacgcatgcctcctccatcgctttcccggcaccggcctgatcgaacgctggccacgcccgtgcatgagggaagctctggaacgcggctgactgcagcgatgaccgccaatcatcttgagacgatcctgcacatggccatcgatggccatggcatcgcgtgcctgcccgacttcgccacgcgtgatgcgctggaccgcggttcgctcgtcagcgttctggacccatggagcaccgagcgaagcaccttctgggccctctggccaagccatcgccatcagcagccgcgtgtacgcgcgttcgtggatttcatggccgaacacctcctgcccgaacgcagccagcgcaattga

SEQ ID NO: 531530 - DNA, 195 bp, Stenotrophomonas maltophilia; identical to SEQ ID NO: 506278

SEQ ID NO: 531531 - DNA, 357 bp, Stenotrophomonas maltophilia
atgaccactagcaagaacccgcctttctccgtcgatgactcgatcaacgacgacaacaacccctcctctgacctgagcaccttccaaggctgcctcaagcgcatccgcgatggcgaaggctccgatggaatgttgtggccggaagagaacctctccgaaggccgcaggcagtcgctggcccggattgaccgggccgccgtggcgatccttacagcggtcgagatgctgcacgcagcaagccgctgcgagtcggtggccacgcccaatcggcacctggacgaaggcgtggtcgaggggctgttcttcgcctgccgggagctggccgagctggtttgcagggaagtccgacccgcctga

SEQ ID NO: 531532 - DNA, 282 bp, Stenotrophomonas maltophilia
atgttgaacgggaaaattgccgtggtgactggctccaccagcggtatcggtctgggcattgccaaggcgctggcgcggcaaggcgccgacatcgtgctgaatggtttcggcgatgcgcatgacatcgaacgcatccgctccagcctggaggccgagttcggggtgcaggtggcgcacgatggcgccgacctttcccgtggcgaagcggtgcgagagatgatcgctcgtaccgttgccacgatgggacgcatcgacatcctggtgaacaacgcgggtatttag

SEQ ID NO: 531533 - DNA, 252 bp, Stenotrophomonas maltophilia
atggaaatttcggcggcgctgaagtggtttaatttctgctatggcccggtagcgcagcatttcacgcgccccgctttcctggatatcgatgagatgaagttctacacacagactttgacggagctggcgggttggcgcgtcagcggctacgccgcgccgtggacggggcgtgtggtcgtggaccttgagttagttatcgggggtaagccggcttcagccttggaattcgccagcgcttggatgaacggctga

SEQ ID NO: 531534 - DNA, 861 bp, Stenotrophomonas maltophilia
atggtcgctaagataccaaagcctgacgaagatagcgttgtgatcttgaatcttgtgctcgcggagcgagtcaagttcatgaaattttacggtcgaatatctccggatctgagggcgcgataccagctatatgacgtccaaaaagggtgcccgtctgccatgccccctttggttctgagggattatgtagacactgacgcgcaggcagtttctagaaaaacaaccttgattggcctttacaagcctgctgtcgataaatatccgtttaatgagctggacaagctaagaacaaaaaataagctcttggcttgcccattatgcggtgagcttggcaggccaagaactctcgaccattgtctgccaaaaaccgtctaccctgagtttgcaataaatttacttaatctcgtgcctgcttgtgattggtgtcaaggcgagaagcttgtggactacaaaaatagtgatgggtttaggaactttttgcacccatattatgatgaggttaataggcctctttatgtaataaaattgaaaaaaccctatcttacgcctattattgattttgagataatggacgatctccctgctgagttgaagcgcttggtggcatcccatttggatggaattaacttctgggagagatttaaggagtactttgagactagctaccaggatgttattcgcattgcgagcgatactcgggccgctggtgtaaggaccgtcgctgatacccttgaaggggcatatgctctgcaggctgaaaagggggtcaacacttgggacgccgtggtgtatcgatcactgttggtggatcccgatgttatgaattttcttcagtgcggcgtgctgtcggagtttccttga

SEQ ID NO: 531535 - DNA, 1713 bp, Stenotrophomonas maltophilia
ttgaaagtattctttcacgctggcgataactgggctttgactccgcctgctttagattcagagaaaatgcttctatccctttcctataacaattgggatgactactcggtacgcactactctaaatgctgcattgtactttgacggcaagagggttcttgattttaatctcaagctcttgatagagggtgatgcaaactcgcccgctaaactgaacacccttcgggaagaaggatgggacggatactttccgattccagggaagaactatgtttctgttccaagtgacattgagttctatgatgcaatagtaactaagctgggtaagctgggtgctaagaaagtcttgttgctgattagagatgcgggctatctcgtgaatgtcgctcaggacgccgctgcagagaaactcactgaatccccagacttctccacgtcgccgttgcgggaggctggagcgaggaagtctttccaagatggttggaaagtattctctgggacctctcagtcaattaaagatttcacgttgaacttgcctgcccgcggtgcggggggcgttacttcgattgggtttaagtttaattccgacactctgccgtatgatattaatgttttgatcggtccgaatggcgtcggcaagtcgcatacgctgaagagcttggtatcctattggcttggaatggacgttgggtcgcaaacgcagcttagcaagtcaaaacatcagccatttgatatacatccgaatatttcgcggctgattttgatgtcttatagtccatttgaggactttgtgctagatctttcgaacactaaattgaaggataaaactgcatataggtactttggttttaggcgaaaggcaatgtctgcctcgggaaagcggcaaagctcgataagtcgtaatcagcccgcgagcgactcggttgagtcgatgttcaaggctttggctgacgacgaggcatatgattttcttagtgcgtggacatctaagtcagaggctattagcgatgtgctcaagcccgcactgaagtttgaaaggattgcggttgagttaaatccgcaggcgcagcttacccgctctcttaaggctcttttgatcgagggtactaatggggcgaagtatattgaactgactttggaggcgtatcaagaattcctcaagcttgaagacgatctttctattgtagttaactttaaggcgggcgttgtctttcttgttgggaatgagaagctcgacctgagttccggtcagcgcctgttcgtttacatggtaataaatattattgggcagattaaatctgagagtttggtgatcgtggacgagccagagctcttccttcacccgacatttgaggttgaattcatcgcgctgctcaagaaagttctatctgcttttaattcgaaagcaattctagccacacattctctggcagttgctcgcgaaattccggcgaactgcatgcatgtatatcgggcggggcagcacggagtagagattgatcatccgccatttgagacgtttggcggaaatatgcagagaatctcatcgtacgtgttcggggatagcaaggtgacaaagccttttgctcaatggataagtaatgccattgatgaatttggtggtcccgaaaaacttttgacaaagctcaaaggtgagttaaatgaggagatgaccataaaaattctaaattcgagatcgcccgatggtcgctaa

SEQ ID NO: 531536 - DNA, 906 bp, Stenotrophomonas maltophilia; identical to SEQ ID NO: 343219

SEQ ID NO: 531537 - DNA, 213 bp, Stenotrophomonas maltophilia; identical to SEQ ID NO: 343218

SEQ ID NO: 531538 - DNA, 387 bp, Stenotrophomonas maltophilia; identical to SEQ ID NO: 343217

SEQ ID NO: 531539 - DNA, 729 bp, Stenotrophomonas maltophilia; identical to SEQ ID NO: 343216

SEQ ID NO: 531540 - DNA, 765 bp, Stenotrophomonas maltophilia
gtgggaaacatcttggacagcatcgcgcgccgctgtggagaaggactgagccgctacctcagtcggccccaccatgtgcatagcgtggccccgccgaccgatccagaccttctcatggcgtgcctgcagcccggcgacgtgctgctggtcgaaggtcagagccgggtcagcgtggccatcaagtacctgacccaatccacctggtcgcacgcggcactgtttgtcggcacggccggcaggccgaccgatgccgaagggcggccccgttgctttcttgaagccgatctacgcgaaggcgtgcgtctggtcagcgtggccgagttcgccgatctgcatacccgagtgtgccggcccgtgggcctgaccgctgccgagattgacaccctggtcggcacggcggtggctcggctgggccatcagtacgacttgaagaacgtgatcgacctggcccgatatctgttgcccacgccgccggtgccggtgcgttggcgccgtcgcatgctcggcctgggcagcggcgaccccacccgcgccatctgctcgacgctgatcgcccaagctttccagtcgattcgctatccgatcctgccgctgatcgagaccgtgccgtcgcaggacccgatgtgccccggctgtgtggccgagattcttcatgtgcggcaccacagcctgttcgccccgcgcgacttcgacgtctcgcccaacttcgccatcatcaaacccaatctggaagccggaatatttccacttaggagcactccatga

SEQ ID NO: 531541 - DNA, 573 bp, Stenotrophomonas maltophilia; identical to SEQ ID NO: 343214

SEQ ID NO: 531542 - DNA, 972 bp, Stenotrophomonas maltophilia; identical to SEQ ID NO: 343213

SEQ ID NO: 531543 - DNA, 423 bp, Stenotrophomonas maltophilia; identical to SEQ ID NO: 343211

SEQ ID NO: 531544 - DNA, 408 bp, Stenotrophomonas maltophilia; identical to SEQ ID NO: 343209

SEQ ID NO: 531545 - DNA, 456 bp, Stenotrophomonas maltophilia; identical to SEQ ID NO: 343208

SEQ ID NO: 531546 - DNA, 510 bp, Stenotrophomonas maltophilia; identical to SEQ ID NO: 343207

SEQ ID NO: 531547 - DNA, 789 bp, Stenotrophomonas maltophilia; identical to SEQ ID NO: 343206

SEQ ID NO: 531548 - DNA, 894 bp, Stenotrophomonas maltophilia; identical to SEQ ID NO: 343205

SEQ ID NO: 531549 - DNA, 336 bp, Stenotrophomonas maltophilia; identical to SEQ ID NO: 343204

SEQ ID NO: 531550 - DNA, 564 bp, Stenotrophomonas maltophilia; identical to SEQ ID NO: 343203

SEQ ID NO: 531551 - DNA, 468 bp, Stenotrophomonas maltophilia; identical to SEQ ID NO: 343202

SEQ ID NO: 531552 - DNA, 576 bp, Stenotrophomonas maltophilia; identical to SEQ ID NO: 343201

SEQ ID NO: 531553 - DNA, 534 bp, Stenotrophomonas maltophilia; identical to SEQ ID NO: 343200

SEQ ID NO: 531554 - DNA, 780 bp, Stenotrophomonas maltophilia; identical to SEQ ID NO: 343199

SEQ ID NO: 531555 - DNA, 231 bp, Stenotrophomonas maltophilia
atggaagcccgacaggggcgagacgccgcaggcggctcgatgcgcagcacgacagcgcgaccggccatctcccaggtggccggggacgcccagacttcaaaaccgaatggacaacagggtcaggacgagcacgcgcagggcatcgtggatctgctgtggatgctgtctggccgatccggcgcagccgggtcggcgatgttcaggggcgccaagtctgcgcggcggggatag

SEQ ID NO: 531556 - DNA, 510 bp, Stenotrophomonas maltophilia; identical to SEQ ID NO: 343197

SEQ ID NO: 531557 - DNA, 1332 bp, Stenotrophomonas maltophilia
atgctggcggccctgggcatcaccgccattgaactgatgccggtcgcgcagtttcccggtggccgcaactggggctacgacggcgtgttcccgtatgcacccgcgctggcctatggcggtccgtccgcgctgaaggcctttgtcgacgcggcacacgatgcagggctctcggtgctgctggatgtggtctacaaccacttcgggccgcaggggaaccgtctgcgcgactacgcgtgcgggttcttccgtgacgatcgcagcacgccgtggggcgaggccatcgacttccgccagccctgggtgcggcggttcttcatcgacaatgcgctgatgtggctgcgcgactatggcgtcgacggactgcgcctggatgcggtgcacgccattgacgatgaccgtttcctgcagcagcttgccgacgaggtacgtgcggtggcccctcacgcgcacctggtgctggagaacgaacgcaaccaggtgcggtggctgcgcggcgcctatcaggggcagtggaacgacgacttccacaacgcgctgcatgtgatgctgaccggcgaacaggaaggctattacgcggcctatgccgggcgcgccgaagcactcctggcgcgctgcctggccgaaggattcgcctggcagggcgagccggacctgcacggccatccccgtggcgagcccagcgtcgacctgtcgcctgcgcgttttgtggtattcgcgcagaaccacgaccaggtgggaaaccgcgccttcggcgagcgcctgtcgatgctgatcgatcctgcccggctgcgcgcggcgctggccctgaccctgctgacgccgatgatcccgctgctgttcatgggcgaaccgtggcaggtgcaatcgccattcctgttcttcaccgactacgcgccaccgctggacgaggcggtgcgtgaagggcgtcgccgtgagttctccggtttcagtgcctttgccgacgccgccgcgcgcgcgcgtattccggacccgaacgatgcagcgaccctgcaggcgtcgtacacgccgccgcccggcgatgatccctggtcgcagcactggctgcgctgcacgggtgagttcctcggcctgcgcaggcgctatctgcagccgggcctgctgcaggcgcggtcgctgggcgcgcgcgtgctgggccatggcgcggtgcaggcgggctggcagttgccatcgggccagtggtggatcgcgatcaacgtgggtccgtcgccggtggcccacgcgatgccggccggcgagtgcgtcgtggggccggatgcggccgcgatgctgccggcaggcggcggtgcgcttgcgcgctggatcgccgcatga

SEQ ID NO: 531558 - DNA, 237 bp, Stenotrophomonas maltophilia
atgaagaggaccgtactgcggcagcggccgtccctgttgctgttgttgctggcgtgcgcgatggcagcctccagctgcgcgacgacctcgctacctgcaataccgctcgcctgtccgaagctgtcgccggcaccgtcgaacgtgaccaagcagcccaactacgagcagaggtcgcgggcgctcttgttcaaatcggacgagacgccgacgaccacctcctggcctgccaagccgtga

SEQ ID NO: 531559 - DNA, 648 bp, Stenotrophomonas maltophilia
atgagtaagcactacccaccagtattcatgcgaaaggaatatcactgcccgtactgcaacgtctatgcgagccaggattttcaccaactgccaatggggctcaattggaatgtttactgcgacgcatggcgctcgcggtgtggacactgcaagcaggacagctactggctggacagcgccacggtgcccggaaagttgctggctccagcatcctacggaactcccgcaccagccgaatacatgccagatgaagtcaggacggactacgtagaagcctcagcgatattcacgatgtctccgcgaggcgcagcagcgctgctgcgtctggctgttcagaagctaatggtccatctcggcatgaagggagataacatcaacaacgatattaagaccttggtcgcgtccggccttcccgtgacagtgcagcaagccttggactactgcagagttgttggcaacaacgcagttcaccccggtgaaatcaatcttgacgatacgccggaaatggcctggaccatgtttgagatgatcaacgtaatcgttcaactcaaaatcgcagccccgaagcaactggaagaactctacgggaagctgcccgaagcggctcgtgcagcaatctcaaagcgagatgctgcgaagccggcatga

SEQ ID NO: 531560 - DNA, 759 bp, Stenotrophomonas maltophilia
atgaccacaaacgtcattgatcggcgcaagtacgtcgtagctagcgattctcgctggtcgatcttgaatgaggctgagggctacttggccttcgttgatgataccggctttgacaagatcgctgatcgcaatcacgcgtcacttgtttgcgctggcgatgcacgtttgattgaggcttggaagacctggtttcgcgagccggttttggatacggacaacttgccagataccgagcgatatgccgagaacggtgcggtgtcgagcatcgtggtcagtttggtgacgaagcctgatggacgagtggtgtacagcttcggctggtatctcgaccatatggaagaggcgaagttctcaggtagcggcgcagcacccgcgcgcgattgctacgttcagaacggctgtggacgaactgcagttgcttccgctggaatggtcgacccgatgactggtggtgaaacgaagtacgtagaagtccagactgcgcgacacaaccttcatcaagaggttgttagtctgaaggaagttgaggagcagctattgaataggggtcttgtcatggatttgaagaatcctgaaaaggttgtatcgattgcacagtggagccagcagtcggtggccaagggcttggaagccggtaacctgagcctgtctgccccgactggccaacctcatcgtgcttggaccgaagttgagaagaatgagctgcgcaaggcgctgcagaatttggccgactttgagcatgctgcaagcaacgggtaa

SEQ ID NO: 531561 - DNA, 465 bp, Stenotrophomonas maltophilia
atggtccactcgcgggtgtgcgaccggcccaggcccggaaacgcgaaaccgaacatcggcgagatgtattcgcaggccaccgccaccgcccatagcgccaggcgcagattgccctcggcggcggcgcctgccagccagaagcaggccgacacgctcacccacgccagcatgcgtcggaaattgggcgccaacggatggctgcgaccgacctccagcagcacgaacaccgtgcgcccgacctgcatggtggcgtacgcccccgcgaagacccaggcgcgttcagcgaaggcctcgggaatggacgaggacatcaacagcgccagcaacatggtgacgaacagcaggctgcggatgcgtggcgcctggggatcgaaccagttgctgacccagcaggcgtactgccagcccagccagaccgcgaaccacagcaccagcgtctgcatcatcccgaccaggtccaggtga

SEQ ID NO: 531562 - DNA, 153 bp, Stenotrophomonas maltophilia
atgacttcactgcaccagtcgggatcaatctctcccgtggtacttgattcctacggacgcgccatcattgtggcctgtagtctgcccgacggcagcgtcatgctgtcgggctgcgcatccgcagacgaccaggggggcgttctcagtctatga

SEQ ID NO: 531563 - DNA, 606 bp, Stenotrophomonas maltophilia
atgccgcatccacgcccggaaccatctggagaagcaagcccctctgttgaggggctgccccgacaggggcggggagaggcaggcaaagggaggggcccacgcgttgccacgcaacgtgtggggcgacgcgcgaaacgcgcgtcgtgtcccgcgccagataaaagaaaagggctgcctttcggcagcccttttcttttatctggcggagagggggggattgtcgggtgcatccatgcacccgacccttccgcgctacgcgctccagggccagcctacggctgtccggttctgctcctgcagaaccgtcgaaccccgtcgggagttctcatccccccgcatcaaaggtgtcgatcactacaacaaccgcctgcatctcccgaacgttggccaagaaaaaagccgcccagtgggcggctttcttctttatctggcggagagggggggagtctaagccacatcactcccaaaacccttgcagcgcaagacttagcgcccgaggcacccacgcaaggtgtccaaggaagtgcccacgatatcaccgccatccagacgccacaacgcaagatccgcgtattcggcctgtacaattgcatcgcgccaaggtag

SEQ ID NO: 531564 - DNA, 222 bp, Stenotrophomonas maltophilia
atgagcacgaccaggaaactgcggctggggccgctgcccaagacagagagcgtgaagctgaccttcgcttgcacggccagcttgaaagccgacctcgaccgctacgccgcgctgcacgcgcaggcgtatggccaagtggtcgatgccacgacgctgatcccgcatatgctggaggcgttcatggcgggggatcggggattcaggaaagaaggcaagtcataa

SEQ ID NO: 531565 - DNA, 264 bp, Stenotrophomonas maltophilia
atgaagcgaatactctcgttgttgcttattgcagggcttacggcttgcggcccctcggagaagcccaagcaggaaattatgccgaccgcggaagagttggccgccgatcccgggcgtttgaaggaactgcgccgccaatgcaagaccgagcgtgcgacgatgggcgatgtgctgtgcaaccgcgtggccgaagcaacgaacaagcgcttcttcggagacggcaaggtgccttacacgccatcggagacgccgccgaagttctga

SEQ ID NO: 531566 - DNA, 945 bp, Stenotrophomonas maltophilia
atggagttacgtcatttgcgctgtttccttgcggtagctgaagaactccattttgcaaaggcggcagagaggctgcatattgaacaatcgccgctgtctcgagctatcaaggaacttgaggaagacctgggtgatcaactgtttatccgaaccagccgcagcacgcgcttgacgagagccggaaaactatttttggaacacgtgccgcgagtgttttctgctttgcaacaggcgcgtgatagcgtgaagtctgcagccaatggcttccacggccagttgcgcgtcgcattgtccgacggaatcactccttcacgcctgccagccttgctggcaatttgcaggcaggaggaacccgaggtagatattcggctgtttcaagtgcccctctcacagcaaatcaaggggctgcaagatgatctgtacgatgtgggcttcgcgcagtccgatgacgtgggcgaaggcatttcagccgaagcagtatggaatgacccactgatggtggcagtgccagcgcggcatcatttgctcaggcacaaacgaatcccgttgaatgaagtgctgcagttcccgcttgtactgtgcgatccgcaggcatgcgaggggcatgcccgtcaggtcgagcgcgtgctgcgacgctcggacagagaaccgttgatcgctgagagagttccctcgttcgagttgatgatggtcgttgtatcggctggctacgccttggggctggctggtggctcacacattgcggcaagtcgtgagtccggtgtggtcgcgcgacctttggctgggcgctctcctatgctgacgacctacctattgcgccgcgaaggtgatgtatccgatgcattgacccggttcatcgagcgtgtgcaggccattgacttgcccgaaggcacgagacacaagctaccacccgaaccagaccccgaagaggcaatcgagatatga

SEQ ID NO: 531567 - DNA, 1491 bp, Stenotrophomonas maltophilia
atgttgctggtcgtcatgctggcgtttcttcccatcgttctggatttgacgatcctgcatgtcgccatcccgtccttgaccttggcacttgaagccacgggcaccgaggtgctgtggatcatcgacatctatccattgttgatggcgagcctgctgattccgatgggcacgctggccgaccgtatcgggcatcgccgcttgctcttcatcggactgtctgtctttggcgtcggatcggcgctggcggcgatgtcgccaaccgcacaggcactgatcggtgctcgggcgctgatggccgtgggcgcggccatggtcatgccttgcaccctcgcgatcatccgtcagacgttcaaggacgatacggagcgcgccaccgccctggggatctgggcggctgtggcatcagccggtgccgcactgggcccgcttgccggcggcgcactattggagcatttctggtggggctcggtcttcctcgtgaacgtgccggtcctggcgctcgctatacctctagtctttttcttggcgccacgtcatgccgtgctcgccgaaggcgcctggaagccagcgcaggcattactcctgatggcggggctgatggccacggtgtatgccatcaaaacgggactcaagagtgacggcgcatggtggctgaacctcgtcataggttgcatcggaacggcgatgctggcctggtttgtccgcatccagcttcgatccacacacgcgatgctggacatgagcttgttctccaagcccgcgatccgcatgggtgtggtgatggcgttggtggtgatgggttcgctggccggggtggagctgttgcttgcgcaggaactccagttcgtcacgggacggagcccgctggaggctggacttttcatgctaccgctcatgatggcatcggcggtgggtggaccgctcgcaggcctcattctacgagcggttggactgcgactggttgcaacgggatctctggcgcttgccgcgatcagcatcgctgggttggcgtacagcgatttcaacaatgccggcttcggcgtggctgttctgatggtgggtcttggcctcgcattgggcgttgggttgacggcttcttcggtggctatcatgagcagcgcgccggaggagaaagcgggctcggctggctccctggaggcgacaagccatgacctgggcaccggattgggaatcgccgggttcgggttggtgatggcatcgagctatcaaagggcaattcacctgcccgagggcatagcgccagaggtagcgacaatcgctgctcgatctattggagaaaccatgttggctgctcaaagcgtaggcgggccatctggacaagcgatcgcagaggcgggccggcaggccttcagcacgtcacacagcatggtgcttatttccgccgcggtattgatcggtttcctcagcatcatgattttttcagtattccgacagcaagccaacgaacacgttggcgccgatactcactag

SEQ ID NO: 531568 - DNA, 1485 bp, Stenotrophomonas maltophilia
gtgaaatcaatgaccaccaccatgcgccgctttccgttgcacctgcttgcagcaagcgtgatcgcgctaaccgggtgttcgatggcacccgtctacgaacgtcctaccgcgcccattcccacggcatggagcacggttggagaagctgcggcgaccaatgcacaaccgtcctcggcggcgtcactggactggcagaccttcgtcgcggacgagtcgcttcgcaagctcgtcgaactggcgttgtcgaacaaccttgatctgcgccagacgctgctcaatgtggaggccgctcgcgcgcagtaccgcgtgcagcgggctgatcgcctgcccggcattgatgcgcaaggcagcggcagccgccagcgcatgccggcggacctcaacccttcaggtcaggcaggcgtgcagagcacgtggcaggccggcgtcggaatggcggctttcgagctggatctgttcggccgggtgcgcaacctgtcacaggcggcgctcgaagagtatttggcgacggaaggcgccgcccgtgcggcgcatgtcagcctcgtgggtgaagtcatccaggcttacctgacgcgccacggcgcgcagcagcgctacgcgctgacggcacagaccttggaaacgcgggaggcttcgctgaagctgatcgcccaacgccgtgcatcaggcgttgccaccgcactcgactaccaggaggcgcgtggcctgaccgaacaggccaaggctgacctggaacgcattgaccgcgagtttcgccaggcaggcaacgccttgagcctgctggttggtgtgagcgatgtcggtgactatctgcccgcttaccccagcgaggacgtgctgctggtgcaggacatcgcaccgggtacgccctccgagctgctggcgcatcggcctgacattcaggcggccgagcatcggcttcgtgcccgcaatgcggacatcggtgcggcccgcgcggcgttctttccgcgcatttcgttgaccgggatgttcggcagttccagcgcggaactctcgaacctgtttgattctggccagcgcgcatggtccttcgcaccgcagatcagcgtgcccatttttgctggcggtcgcaatcgggcgaatttgggcttggccgaagtgcgcaaggacatggctttggccggctacgagaagaccatccagaccgcgttccgtgaggtcgccgatgcgctggcggccaccgacacgctgcgccgcgaggaactggcgcagcgcgccttggcagatagcagccaggaagcgatgcgactggccgaggcgcgctatcgcagtggcgtcgatggctacctccgttacctggatgcgcagcgacatgcatttgccaaccaagttgtggcaatcgaggtcagcacacagcggcagatagctctggcgagcctgtttggggctctgggtggcggatggcgagacgtcgagttgcagccggtgcatgccagtcgtactggcacgccatcagcgccgtga

SEQ ID NO: 531569 - DNA, 3144 bp, Stenotrophomonas maltophilia
atgccgaacttctttatccatcggcccaactttgcgtgggtcgtcgcgatctttatcgcgctggcgggcttgctcgccatctcatcgctgcctgtggcgcagtaccccaacgtggcgccgccgcagatcctgatcaatgcgacctatccgggtgcttcggccgaggtcatcaacgccagcgtcaccagcctcatcgaggaagaactcaatggtgccaagggactgctgtactacgaatcgcagagcaacagcgccggcatgagcgagacctacgtcaccttcgcgccgggcaccgatcccgacttggcgcaggtcgatgtgcagaaccgcatcaagcgcgtggaatcccgactgcccgagtccgtcacccggcaaggtctgcaggtcgagcaggccagcgccaacttcctgctgatctatgcgttgacctacaacgtcgagggcaaggacgaggtgggcctggccgactatgcggcgcgtcacatcaacaacgaaatacggcgcgtgccgggcgtgggccgcgtgcagatgttcgcgtccgagcgcgctttgcgcgtgtggatcgacccggccaagctggtcagctatggcctttcggtcagcgacgtgggccgtgccattgccgcgcagaacgcgcaggtctcgggcggcagcatcggcgagcagccgagcccggacaaccaggagatcaccgcaaccatcatggtgcaaggacagcttgcatccgtggatgcgttctcacgcattgtcctgcgcgccaatccggatggttccaccgtgcgcatcggcgatgttgcgcgcatcgaggtgggccgtcaggactatcgctccagctcccgcctgaacggcaaggcggccgctggtgtcgccgtgcagctcgcgccgggcgccaatgcgctcgaaacggcgaaggccgtgaaggcgcgcttgcaggagctgtccgccaccttcccgaaagacatcgagtacagcgttccctacgacacctccaagttcgtcgaagtcgccatcaacaaagtgctgatgacgctcgttgaagcagtggtactggtgttcctggtgatgtggctgttcctgcagaacatccgctacacgctgatcccgaccgtcgtcgtcccggtgtgtctgctgggcacgctggcggtgatgctgcccttgggcttctcggtcaacatgatgaccatgttcggcatggtgctggccatcggcatcttggtggacgatgccattgtggtggtggagaacgtcgagcgcatcatgtccgaggaaggcctgtcgcccaaggaatccacgatcaaggccatggggcagatcagtggagccatcgtgggcatcacgctggtgctggcggcggtgttcctgccgctggctttcatgagcggctcggtgggtgtcatctatcgccagttctccatctcgctggctgtctcgatccttttctccgggttcctggcgctgacgctgacaccagcgctttgcgccacgatcatcaaacccattccccagggacaccatgccgagaagaagggactctttggctggttcaaccgccgcttcggccagttaactgacgggtacagcaaagccaacacgcgactgctgtcgcgtaccgggcgcatgatgctggtgtatctcggcatcgtcgcggtgctggccttcgcctatctgcgtctgccatcggcctttctccccaccgaggaccaaggctatgtcataaccgacgtgcaactggcgccaggcgccacttaccaacgcacgttggccacgacaaaggagatggagcagtactatatggatcgtccctccgtggtagacgttctgtcgcttcagggattcagcttctcgggcatgggccagaacgccggtttggcattcgtcatgctcaaggactggtcggagcgttccaaacaagagtctgccaccgccgaagccgatcgctccaatgaggcgtttgccgggttcgacgacggcacgctgttctcaatcgtgccgccgcccatcgaaggcatgggcaactccagtggcttcgccctgcgtctgcaggacagagctgggctgggtcgcgaagcactgctggccgccagtgaccagttgatgagcatggtgtacgagtcgggcctgttcgccttcatcacgatcgaaggtctcaaggacggtccacaactcgatgtccacatcgaccgtgacaaggccgaggcgttgggggtgtccttcgatgccatcaataccgcgctctcgaccgcctatgggtcggcactggtcaacgagttcccgaaccaaggccgcatgcagcgcgtgattgtccaggccgagcccggcagccgcgctacgcccgaatcgctgaataagctgcacgtcgccaaccgtgcgggccaactggttgcgctcgaagccttcagcgagatcggctggaagcatgggccggtgcaggtcgttcgctacaacggctatccgagcctgaagctcatgggcgacgtgatgcctggccgcagttccggcgatggcatgaaggagatcgagcgtctggcagcgcggttgccattgggcatcggctacgagtggaccggcctgtcctaccaagagaaggctgccggttctcaggcgcccgcgctgctggcgctagcgctgctggtggtgttcctcgtgctcgtcgcgctctatgagagctggaagatcccgttctcggtgctcctgatcgtgcccatcggcgcgcttggctcggtcgccgccgtcatggtgctgggcatgcccaacgacgtgtatttcaaggtgggcctggtgaccattatcgggctggcggcgaagaacgcgatcctgatcatcgagtttgccaaggatctgcacgcccagggcaagccattggtggaatcggcgatcgaagcagctcgcctgcggttccgcccgatcgtcatgacctcgctcgctttcatgttgggcgtggtgccgctggcgatcgccaccggcgcgggcgcaacgagccagcgcgccatcggcacgggtgtgctgggcggcatgttgagcgcaacgctgctcggcgtgctgttcgtgccggtgttctacgtctgggtcatgtcccggttcaaccgaaagaagactgacaactatcaggaactccctgcaacgactgagggagaagccaagtga

SEQ ID NO: 531570 - DNA, 1152 bp, Stenotrophomonas maltophilia
atgaccatgctgcgagccagttcgctggcgctctcccttcttttcctttcgggctgcaacgacgccggcaccgaggccgcctcccaggagcaaggacagccggttcccgtggaggcgctggtgatcgcgccgcgtgcgcagatgctcacgaccgatctgccgggccggatcgctcccctccgggtggccgaggtgcgcgcgcgggtggctggcatcgtccagaagcgtcacttcactgaaggtgcggtggtcaaagaaggtgatctgctgttcaccgtcgagtccgctccattgcaggcggcgctggagcgcaatcgcggcgcgctggcgcgcgcacaggcccaggttaagcaggccgaatccctagtgcatcgctacgaaccgctggtgaaggtggaggccgtcagtcgccaggaatacgacgacgcgcttgccgcactgcaaaccgcgcgcgccaacgcggtgtctgcccaggcagacgtgcgcaccgcgcaacttgatctggggtacgccactgtgcgcgctcccatcggtgggcgtatcgggaagagcctggtgagcgaaggcagcctggtcggccagggcgagaccacgcccatggcgctgattcagcagatggaccccatctatgcggacttcacccagcccgccaacactgtcctgcagatgcgcgaggccatggcggacggcaagctgtcgcgcgatggcaaggcccctcaggcagtgagcatcagtgtcgatggcacgcgctacaccgccaagggccggctgaagttctccgacgtcacggtcgatcccggcactggacaagtgaccctgcgcggcgagttccccaatccggacggcatcttgctgccgggcatgtacgtgcgcgtcaacttggagatggggacggatcagcaggccatcttcgtgccccagcgtgccatccagcgcggcaccgacggcatggcccgcgtaatgacgatctccgccgagggcgtggccgaagagcgcttggtgcagaccggcgccatgcaaggcaatgaatggcagatcaccgacgggctcaagcccggcgacaaggtgatcgtcaagggcgtggacaagatcccggctggcacgcccgtcacgctggccgtgtcttcctcgcagcaggacaagacgccgtga

SEQ ID NO: 531571 - DNA, 621 bp, Stenotrophomonas maltophilia
atgtcgaatgctctcgacgacaagctcgccggtgcccttgcactggccatttcgcagaggcctcgggccaacctgcaacagatcgccaggagcgccgggatcagcaaggcgaccctcaatcgaattgcgccgacacgcaaggacgtgatcacgatgctgatggaacgggccaccactcatctccaggaagctctggccaaggccgatctcgccacgccaccgtttgctgaagccctgggccggctaaccgccaacgtgatgcagggccgggccttcttcatgttctggaacacggcgcagtgggtggagattatggacgaccaagaacacgccctcgatgaacttcccatcccgtctttttatggcgaggcgctggaggagtttttccttcgcgggcaaaaggccggcgtgttccgtattgacctgccggcgaaatggctggtcaaagcctatgactttctgctttacgccgcggtggagtcagcccaccgcggggaaattgccactgccggcatggaatcgctggtggataaaactttcctgcgtggggcggtggagcccgtgtccatccctgctggtgcacccttggccgaagtggcagtcaagggagaggccgtataa

SEQ ID NO: 531572 - DNA, 321 bp, Stenotrophomonas maltophilia
gtggcagcgctcgggctggacttttccgaaagcctcctggtcggcgcggcgttgtcgggcatgtcttttcgcaaacagcgcttggatgaactggatttctcagacgcggatttgtccgggtgcaacttccgggaagcggtcttcgcaggcggtagtctgcgcaacgcgcacattccgcaggccaacttcggtagcgccgagctgcgcagcgccgatcttggtggcttgaagatgttggatgccaaggctttttccaaggctttcattccgcaagctcaggcggccgccattctggcctccttcgggctgttggtgagctag

SEQ ID NO: 531573 - DNA, 273 bp, Stenotrophomonas maltophilia
atggagattcggcgatacggccccaaggcgtcgggctgggcggagctaaatatggccagtggcgtccagcccatggtctggaccgaggtcacggggtttggcacaagccagccacaagagctcgggccgcaactcggtatcgagttggagttgctccaacacgcggcccgcgccgatgcctccttcgtcaccacgaactcggatgcgctgctgcaactggcaacgcgcaccacacgtctgatcggcacgcatatccagtattcgagctcttga

SEQ ID NO: 531574 - DNA, 279 bp, Stenotrophomonas maltophilia
gtgatcaccgcgaaaggtgtcaccacggtggagtcaggcgacagcgggatcggtccgtccgtgcgccgggaatgggtggatggtgacgcttcagaaaagccggggccgtgggcagtgatggcccaactcctggacagtttcgctgaaagctacctgccactgatggagtccgccgaggatcaggtgttggccatggaggagcacctgtccgaggcacctctgcccgatgagcagatttcggtactgtttcgtctacgccggcaactcatccttttgtag

SEQ ID NO: 531575 - DNA, 372 bp, Stenotrophomonas maltophilia
gtgtctaagctggtcgcacggctcggacagctgaacccgcgcttggccggtgccgagtcacccgactgccgaggcgcgcaggagggactacagcggttggagagcgaagtagacggcctctggcagatcgtcacctccgtggtcgaaatgagcaacctgaaggagcagcaaaggcaaggcaacgcaaaccgcaaacttgctgcctgggcgggcatcgtagcggtgcccacggcactgtcaggcatcttcggaatgaacttcaaccatatgcctggattcgaaagcgaatacggatacctagtggcgctcgccgccatggggatttcgtctgcggcgctgtacgtgcgtttcaaggaaatcgggtggctgtaa

SEQ ID NO: 531576 - DNA, 315 bp, Stenotrophomonas maltophilia; identical to SEQ ID NO: 82597

SEQ ID NO: 531577 - DNA, 1416 bp, Stenotrophomonas maltophilia; identical to SEQ ID NO: 82603

SEQ ID NO: 531578 - DNA, 1728 bp, Stenotrophomonas maltophilia; identical to SEQ ID NO: 82604

SEQ ID NO: 531579 - DNA, 762 bp, Stenotrophomonas maltophilia; identical to SEQ ID NO: 82605

SEQ ID NO: 531580 - DNA, 3498 bp, Stenotrophomonas maltophilia; identical to SEQ ID NO: 82606

SEQ ID NO: 531581 - DNA, 234 bp, Stenotrophomonas maltophilia
atggaagaagcctcgccgcaggggatcagcctttacaccagcaagaagcgcgagcagatcgaatcgctggaactggacaggtcgagcatccatattgccgagtacctaatcgccttgccaccgaggggtgtattgatggcgcggctgcaaccggcaatgccgcgggtgcagttgcagatcgcacagcgcaatccaggcaccgaaaattctatctccagttcccgaagttattga

SEQ ID NO: 531582 - DNA, 2286 bp, Stenotrophomonas maltophilia
atggcagaacgcagctacacgcccgaacagatcaaggtcatcgagcacggtgaggggcatgcggtcgtctcggctgtggccggatcgggaaagacggaaacgctggtaggacgggttcgccagctcctcaaggagcacaccccagcccagatcgccgtggtcatgttcaatcgagatgctagggaagcattccagaagcggtgccaaaaggcgattgcaggacctgcgcctgagatccgcacgttcaactccatgggcaacaagatcgtccagcgcttggtcagccaggggttgctgcccgacgccaagatcgtagagaaggatttccagcgcgctaagatcgccgcccaggtgttcacccgcgtcttcaaaagcatcaatggcgacgatgccgctcccgataaggaactgatcgacgagttcatcagcttcattttgttggtcaaatccgaaattcgttcagccgaggaagtctttgatagccgaccctatggcaagtcagcgctgggcttccctgatgccttcaggctttacgagcaacaacgaatcaagatgaagatccggttcttcgaagaccagatctatgatccggtcaagctgctgctgcgccactccgagtatcaacgattgatcgccaacaaggtcgatcacctcatcgtcgatgaggcccaggacgtcaacggaattcagatcgagcttttgaagatgcttgcgggtacccgcgccaaggtcatgctctgcggcgacgaggatcaggccatctacgaatggcgaggagccaagcccgactacatcacgcgtggcttcgagcgggatttctctggagccacacgctataccttgccgcataccttccgcttcggccacaccttgagcttggcagcaagccacgtcattacacgaaacgccaatcgcaaccccaagattagtatctctgctcctaccactcccaagacccgaattcactcgtttgggctggcattgggcaccgccggattcggagagcttgtctcagccagcctggctgacgggttcaagcctgatgaaatcgccgtcctggtgcgaacctacagcgtggccgtggctctggagcttgagctgcatcagcatggcatcccctacttcgtttacggccgacctccgttgcagcggattccagagatcagcgcgatggtgggcgtgctgcagctggcatcgggccgatggaaggacctgccaacggacgaagcccggttcgtgatcaacagtttgttatggcgaccggcgctctacctgagcaaggaggctatacatgccgtcatcgatcgatccttggaacagccagatcacctgtccgaggccgtgcgctcggtgatcacaccgcagcttcaacccttccaggcggaccagatcagggacagggccgatctgctggatatcatcgccacctgcactgatcccgacgaaaaacccgtgcagctgctggaccgctatctcagcggaaccagcttcgacaagtcgatcatcaaacagtcccccacggcagaagtcgcggaaaccatcttggccaatgtggctgcgtttcgcgctttggcagcaaagcacgagggcacgatcgccgagttcctggacgatattgatcccctcatcgactctaccaacctggatcccccttctgttcctcacgtatggatcggatcgatccatcgtgccaagggggcacagtggccgatcgtgatgcttccaggactggccgcgcggtctttcccccgcgaccacatcatccaggaggaacttgaggcggaaaggcgattgttctatgtcgctatgacgcgcgcgatcgaagatctgtatttgatccacccggtagatccggagtttgatcactccatcaaggacatcaagtctgacgccaaacgcggcttcgagtgcccaacatctccattcctttgggaaatggacctggcggtggcgcgctacgcagccgcggctattgagaacgaggggccgtttgaaagcgtcccgatcgaatcgcctgcggtcgccaatgaatacttcgcgcgctttcccttcgccaaagactgggccttcactcgccggccccgcgacgttcggcgcaggcctgcagagacgccgatcagttcgctagccggtctgagcgagggggtgcgtgtgcatcacgacacctttggacccggcacctttgagagatgggtagacaatcgggtatatcgcgttcggttcgacagcggagaaaccaagatgctggtggctcaatatgcaccgatccgtgttgtggactcataa

SEQ ID NO: 531583 - DNA, 357 bp, Stenotrophomonas maltophilia
atgtcagatctgtccgaggtcctggaaggagcactggccctgacggagaatagcggccagaacgtgcccgccggcgaccttacgccctttacgttcattcaaccacagagcctgaagccggctggcttcgagcacagcctcaggtgcaaagctgttcgtccgtccctccaatggttctccaggagatgccagcccaccttcaagtggctgaacaatggcaggttccccgccataactcttcgcgtaggcagtggcaatcatccgccggcctttcggagaccagccaccgagcacgagttccgtaccgattgcctcaattcgtcgcggccacgagcccgaacagatcgtaacccctaa

SEQ ID NO: 531584 - DNA, 588 bp, Stenotrophomonas maltophilia
atgaaacactcgcacgcgatccttccggccttcccgggcgcagcgaaggaccgtgacacggtggccgagcaacataagtggggtttggcgcgcatgtttgcgcagcatggcccgacgctgcgtggcttcttcgtccgccgcggcgccaacgaagatgcagaggacttggtccaggaaacgtacctgcggctgctccgtgcccaccacgcccagagccgccccatcgagaatcccgaggcatacctctacaccgtggcgcttaatctcgcgcgcgaacaagcagcaaaacggcgccaggcgcccgtgccggtggccgagtttgatgatctgctggcaggatttggcagtggcgacgatccgctggacggccaggcgcaacgtgcccaacgcgcacgcgtactgcatgcagcacttcaggcgctgcccgaccgcacgcgtgctgtgctggtcatgcagtaccgcgacggcatgacgtaccagcagattgcacaccggatgggcatttccacgcacatggtgaagaagcatgtcgtgcgggggctttccgcctgtcgctcccgactcgccggacatggggaggagatctga

SEQ ID NO: 531585 - DNA, 1026 bp, Stenotrophomonas maltophilia
atgcgcacatcgccatcatcggacaccctgacgctgcaggcagcgcactggcatgcccgccatcgggagggctcgctgtccgacaccgagcaccacgctttcatggaatggttggtggcctctccggagcacctgcgcgaataccttgccctggaccacgtcagcaacgccttgggcgatgccttggcgggcgaggatgtcgatgcgctgctggccagtccggccgccaccgatgaggacaacgtagtcactttgccacttggtcgttccgcggcacgccagcgcagcgcggctccggtgcagcgctggcgtggcccggcctgggcattggccgcgtgcgttggaattgctgcggtcggcgtggcgggatgggtcactcagtccgaaagcacccgcttcgacgctgcacggggcgcgccaaaacagtttgcgctggccgatgggacgaccctgcaactggacgcggacagtcaggtcatcgtgcactttacgccgctgcagcggcgggtggatgtgcagcgcggccgtgctgccttcaaggtcgccgaaggtcgccgcccgtttgaggtgcaggcagccggcctgcgcgtgcgcgacatcggcaccaccttcagcgtgtccctccagcgcgaacaggcgcgtgtcgacgtgctggaaggccgcgtccaggtccgcgccgatgccgatccgcgtgtgctggctgatcttgcggcgggacagagcgcccgcatcgcctaccgtgaccaccgggtcgatctccgcaatgaagcgccgatgtccatgagcggatggtggcagggccgcatcgttttccacgatgagaccttgcgcgacgtggtggaccagttcaaccgccgcaaccgccggcaggtagtgctggaggacgaatctgccgctgcgacgcgcctgagtggaaatctccgcgccgagggtgttgacgccctcgcggcgtacttaggtgcccaggcgagcctggatgtccgtcgtgagggcgacgacgtccgcgtgcgaagtcgcctcaagtga

SEQ ID NO: 531586 - DNA, 2976 bp, Stenotrophomonas maltophilia
gtgactaccctgcgtgcgccacgccggtggacgcacggcggttgccttgctctgctgttgccgttatccggcaccgtccatgccgttgatggcctgccgcgcgtgcagcgggcgatcgctgcacagccactcgacatcgcactgcagcagctgtccctgcagacgggcctgcagttcgtctacgatcctggacgcatcggtaaccccgactctgcaccggtcgcggccggcacagcggtcgctgacgcgctgccgacgttgctgcgcggtactggcctgcgcttccagcagctggatgccaataccatcacgttgcagacggacgcgcccgggccggcgctgatacggggcactgatccggtcacggtccagccatctccagcgacgctggcgaccgtgcgtgtggccggctaccagcacgacattgcgcgtgcagtggagctcaagcatcagggggcactgctcggcgacagcctggtgtccagcgaaattgcgtccttccccgacaccaacctggccgagtccctgcagcgcctgccgggtgtggcgatcacccgcgaggccggcgaaggacgtcaggtcaccctacgtgggctggggcccgagttcacccgcgtacgcatcaacggcatggacgtgctgagcaccaatgccgggatcgacagccacggcggcatcaaccggacgcgcgggttcgacttcaacgtattcccctcggacatttttgaacgcatcgcggtcatccgcaaccgcgatgcggccgagggcgaagggggcatcgcgggtaccatcgagctgcgtacgccgcggccctttgatcagcctgggcgccgcctgtcttttgccacgggcgggctctaccaggacaacagcggtcaaacgtctccgcgagtggctgcactggcatcggatacctggttcgacggccggctgggaggcctgctgtcggcggcgtacagcgagcaggacacgcttgagtttggccacagtacagtgcgctgggccagcggtggctggaacttgggcaatgtcgcgccgaccatcgatccggccatcgtcgcgcgcttgaacagcagtgctgacgatgcgttgttctatccgcgcttcaaccgctatgacgtctaccagcaccagcgccggcgcctgggcgtgtccgccgggctgcagctgcaggccagcgacagcgtgcagatataccttgacgcgcttgcgggacagcttcggtccacgcgcgccgagtaccatctggatgcgtcggcattcagtcgcaacaatgcagagggcctgtacaacaccgggctccgcgagatcacggtcaaggcgctggacgtggagggcaacgacatcgtccatggtgaatacggaaacgtcgatctgcgttcggacactcaccagaaccgctcgtctacccgctatcgccaactggtggtgggaatgcagagagatggcgagggtctgcagctggaagcatcgttgggcctgcagtcgtccaggttcgacaatccacaagatgacaatgtgttcctgttcgcgcagaaccgcgacttcagcatcgactaccgggatcaaggacgcgtgcctgtcatgcgctacggaatcaacgtcgccgatgcagagagctggttcctggacaccgtccgcgtgcgccacggaggtactgccttcctcacccgcagcgcccggctggtactgcgctatccgcttgcgcatgacctgtcgctgtcgggtggattggaagcacgtagtcagacgttcgacagtcgctactggtcaacggactacagcgatgcgcgattcaggacggtgggcgatctggcgcagcccctgccctatgattttgctgcgggaatgggccgcgccagcttgccagcccagtggtcggtggtacgcccaaggcgcgttgaggacgtgctgggaatgcggcagcggcaccccacgcttgatgccggcgtcagctggcaggtaagcgaggctcccctcgccgcctggttgcagctggacattgacaccccggtagcagggcgccgctggcaaggcagcctcggcgtgcggccgagccgtacgcgctccagcacgagcggctacctggacaaaggcgaggggctggcgcggacgcgcctgcgccagcaccagagcgaggtgctgccgtcgttcaacagccggttgcagcttgcccctgatgtggtttggcggctatccagccagcgcgatgccagccgccctcccctagctgagctggcgcccaacggcagcgtcgattctctcaatcgacaggtcagctccggcaaccctggtctgtctccgatacgcgccacggccgtggacacggcgcttgaatggtacctgggcgacgatggtgttctggcagctacggcgttctacaaggacatcgacggcttcgtggtttcgaccgtgagccgtgcacgctaccaagagtcgggctattccctggcgctgctggatccggccgtggtgacgccggaccaggtgttcactttcagtcgcccggaaaacgggcgcggcacgcatcttcggggcaccgagctgagctggcaacagcggtggggcagcatcggcatgcagctcaaccacacctgggccgatgctcgtgtcagggtgaccggcgccgacggccagacccatgcggcgcgtctgccaggcctctcccgccacaccctcaatgcgaccctcctgtgggagcgtggcccgttgagcatccggacctcggcgacctggcgcgatggttaccttacggccgtgccgggtggaaacggcaacgacgttgctggggtcaatgccagcctttacgtggacgccgcggtgcggcttcgcctggcgcggggttggacgctgcagctggaggccagcaacctcacccgggaagtggacgaccagtacgtggacagcagcaaccgtgtctaccactacgcgcgggccggctggcagagctttgtcgggcttcgggctgacctctag

SEQ ID NO: 531587 - DNA, 1014 bp, Stenotrophomonas maltophilia
atgaagaaccacccgcttctccttgcgatgtgcctggcgctttccggatcgatcacctgccaggcgcagacgcgtccagaaacacctgatctggatggcttcccgttgaaccacgtgcagctggcagggtcgcacaataccttcgacaagaagggcgagtacgagtacctcagcgatgccttcgccgatgtccagatggtggagatcgacgtctggaccaactttggaagctggcgtgtcagccacagcaatcctctggcgaacatcaacaactgcccaaagggcggcgtggccggcaacgaccgaaaccaagacctgcgctcctgcgtggacaatattgccagctaccaccgcgaccatccgggccatccactgctgatcatcaagctggagctgaagaccgggttcggcagcaacacgcagccggcagatctggacaacctgattgccgacctgcagggtggcggtgctggcgcgcgcattcccgagcgtgacctcttcacgccgcgagacctgatgtgcgtcgataccgcgtgcagcagtcgctaccctaccccggaggccgccttggccaacaaaccgtggccaaccctgggccagctgcgtggcaaggtcatgttcgtgttgatccccggcacggtgtccgactccgcgccgcgtgactacgctgccgcgctggccagcggcaaggcacggcttgcattcccggccatcgccgtgaagcagtccaccgatccgcgaccggcttactacggcgccaacgcgccgtggaacgtggtattcgacatccaggccgggcgcttggacagcggcgagatcccgcgcacgctggttgccgactgggcactgcgcaacttcctgctgtcggtgaacgatgaccagcccggcggcagcagcgctgacgtgacgctgggccgtgcacgccttcaccagttggcacgcgacttcaacgccaacatcgtcaacaccgaccaggaacgcagcggcattcccgcgtccttcgccattccctga

SEQ ID NO: 531588 - DNA, 2733 bp, Stenotrophomonas maltophilia
atgaaccaccgttctcccgcgtaccatcccctgacgctagccctggccagcgcgctgctcttggcgcccatcgccgcccgcgccgaggcgccggcctccggcgatcccgccaccacgctcgataccgtagtggtctccggataccgccagagcgtggagcgcgccagcgatctcaagcgcgaagccgccgtccagcgcgacagcatcgtcgccgatgacattgcgtcattcccggacaccaacctggccgagtcgctgcagcgcatcccgggcgtagccattacccgcgacgccggcgagggacgacagatatcgctgcgtgggctcggcccggaattcactcgcgttcgcctcaacgggatggacgcgctgagtacctcgggcagcatcgacagccgcggcggtaccaatcggagccgcggttttgacttcaacatctttgcctccgaactgttcaaccgcatcgacgtgaccaagagcggcgatgcgcgcgtcggtgaaggtggcctggcgggcacggtggatctgcataccccgcgcccgttcgacttccccggctacaagtttgccgcctccgccggtgggctttatcaggagaacagcgagaagaccagtccacgcacggcgctgctgctgtccaacacgttcgccgatggccgcttcggcgcgctgttctctgccgcctacagccgtcgccagaccgttgaatacggcgacagcaacgtgcgctgggccagcggtggctggaacttggccaacgtctctcctgatatcgatccagcactggtggcccgtctcaacagtagcggcgatgacaagctgttctatccgcgcttcgaccgctacgacgtctacgactacgaccagaagcgggtgggcctcaccggtgcgctgcagttccaggcgagcgacaacgtgctgttgagtctggatctggcgcacggccgcatgcgatcgtcgcgagatgagtaccacatcgacgcgtcctccttcagccgcaccaatgcccttggccagtacaacaccggcatccgggaaaccacgatcaaggagctggcggtcgagggcaacaccattgtctacggcgactatggcaacgtggacctgcgctcggacacgcaccaggaccgcgccaccaccacctatcgccaggctgtgctttcgatgcaggccgatgccagcgaccgcctgcgcatcgacgcgatggcgggtttccaggattcgtccttcgacaacccccaggacaacaacctgttcttcttctcgcagaaccgcgatttcagcatcgactaccgtggcaacagccgcatgcctgtacagacctacggcatggacatcaacgatccgtccaactacttcctggacatcatccggctgcgccatggccagacccgtaaccgcctgggtagcacccgcgtggatctggacttcgtcctgtccgacgcgctgaccctcaagggcggcttggacgcgcatagccagacgttcagcagcgcctactggtccagcgacttcaccgaccagcggttccgcagcgttgccgacatcagcaccggcctcccgcataacttcgccagcggtgccggtgtggcagggctgccggccggctggttggcggcggacctggacacggcctggagcaccctcggcgccagcaactacacgcctgccagggactacggcagcagctggtcggtgaaggaaaagccggtcggggcctacgcccagttggagttcgacaccgagcttggcgggctccgctggcgtggcaacttgggcgtacgctacgtccgtacggcgcttgaaagcagtggtttcgtgggcaacggcagcggcggattcgactgggttacgctcaaacgtcactacgacgacgtcctgccgtcgttcaacagcgcactggagctacgtgacgacctggtctggcgattgggtttgagccgcaatatgacgcgtccgtcgttggcgtcgcttgcccccaatggtgcggtcaattcgctcaaccgcaccgtgtcggtcggcaatccaaaccttgacccgttccgcgccgatgcgatcgacacctcgctggagtggtacttcgaccagggtgcgatgctggctgtggctggtttctacaagaagatcgactcattcatcatttcgaccatcaacgaaatgagctacacagcttccggctacccactgtcgctcctcaaccagtcggtggtcaccccggaccagtcgttctctttcacccagccggtaaacggtcgcggcacaaacctgaagggcgcggagatctcctatcagcaagggctgaccttcctgccgggtccattggacaagctgggcgtgcaggtcaactacacctgggccgatgcccgcatggacgtggacaccggtggcggcaagatcgtcaacacgctgctccccggcctttcccgcaacacggtcaatggcacgatctactgggagaacgagcgcttgagcgcgcgcgtatccgcgacctaccgcgatcgctacctgactgcggttccgggcggcaatgggaacgatgtggccggcgtcaatgccagcacctatgtagacgcctcgctgcagtaccgcttccgccctggctgggcgctggtactgcagggcaacaacctcacagacgaggcggatgaccagttcgttgacagctccaatcgtgtctacaactacaccaaggccggccggcagtacttcgtcggcctgcgcgtggagctctga

SEQ ID NO: 531589 - DNA, 525 bp, Stenotrophomonas maltophilia
gtgcacctgctgctgcccatcctctcgcacaccccgatctgggtctgggtgatcctggcgtacctcatcacccgtggcgtcgcggccatgcgtccaggacagacctcgctgcgcaggctggcgatcgtgccggccctgttcactgtgtggggcatctggtcgatcagccatcgctacggcggttcgctggtggcgtggagcgagtggctggccggcatctgcgcgggtgcaatgattggctgggtgctgctgcgccgcgcgacgctgacggtgaacgaagcgacgggccggttgtggcgcagcgcggactacagcctgctgccgctgctgctggtcacgttcctggtgaagtacgggttcgaggtggcgcttgcggtgtcgcctgcgctgagtgccaatggcaacttcagtgccgcgtacctgctgctgtctggtgggttcaccggcatttttgttggcaagtacttccggtatctgtcagcgctgcgaaaaggcatgcccagcaatctgggcccggtgcattga

SEQ ID NO: 531590 - DNA, 354 bp, Stenotrophomonas maltophilia
gtgaagtatgcgatggctaccattgcgggtttggctgtgctctctggttgcgcaaccttcggcggcgatatggtcgtgcgcgtttcgggaagcgtgccgacaggccagagtgatgatggcgcgctcggttgcgagctgagcatgctcggggagagcggcaacgtggtttcgtcgaaacccgttgggcgcgtgttctcggttcccatgatggtcgtagccggtcccgagcccaagggttaccacttcatcgtccagtgcagggacggccaaagattcgagaccagcgtggttcagatcagcagccagcgctcatatgccaggcatctggacctgggagagcttcaggcgcggtag

SEQ ID NO: 531591 - DNA, 1431 bp, Stenotrophomonas maltophilia
atggataccagcacccacgccactgaactgaacacgatcctgcgggccatgcgcgcccatcagattgcccagggcccggccacgctcgagcagcgccgcgaccgcctgcagcgcgccgccaggctgctgctggagcagcgcgagcgcatcgccgaggccatttccagggatttcggccagcgcagccgctaccagtcgctgctggtggacgtgggcaccaccgccgccacgctcaatcatgccgccgccaatgtgggcacgtggatgcagagcgaagacgtggaggccccggtggccggcatgcagacgcgcatcgaacaccagccgctgggcgtggtcggcatcatcagcccgtggaatttcccgatcaacctggccttcgccccgctggccggcgtgttcgcagcaggcaactcggcgctcatcaagccgtccgaactcaccccggccacctctgaactgctggccgaactgatcgcggtctacttcgacccgatggagctgggcgtggtgctgggcgatgccgaggtgggcaaggccttcagcgaactgccgttcgaccatctggtgttcaccggcagcaccgccgtcggccgccatgtgatgcgtgcggcggccaacaacctggtgccggtgacgctggagctgggcggcaagtcgccggtggtggtggcgcccgatgccgacctgcagaccgccatcgaacgcacgctcaccatcaagacgttcaatgcggggcagatctgcctttcgccggattacctcatggtgcccgagggcagcggcgccgcgctggttgagcatgcgcgccagttcatggcccgcatcatcccgaccctgcaggacaacgaggactacacctccatcgtcagccagcgccatttcgaccgactggtcggactgcttgccgacgcggccgacaagggcgcggcgatcatttccctggccccggccggcgagcccgcgttcgatgcggccacccgcaagatcgcgccgcacctggtactgaacgccactgacgacatggacatcatgcaggaagagatcttcgggccgctgttgcctgtcatgtcctacgctgctgccgcagagccgattgcctacatcaacgcgcacccgcgcccgctggcggcctattacttcggcaacaccgcggaagggcaggcggcattcacccggctgaccacgtccggcgcgctggtcatcaacgatgtgatgacgcatgcgtcagtggaagaactgccgtttggtggcgtgggcgcgtcgggcatgggcgcttaccacggcgtgcatggcttccgtcagttcagccaccgcaaggcggtggtggtgcaggccaaggatggggcgtcgaacctgcggctgcgtgcgccgtatggggacaaggtgggggcgctgggtgaggcgctgggtaatgccttgaagcgctga

SEQ ID NO: 531592 - DNA, 2637 bp, Stenotrophomonas maltophilia
atggtactgctaggaaagcaaggacttcggatgtgcggtgccttggcgcttgcgctatcagcaacaatcgcaactgactctgcacaggcggttccgcggtgcactcccggcatgggcggcggcggatggcgcccgatcgatggctttgacgacaacgttccggccccggagctcggtgtcggtgagaactgccttcccttcggtgatattgagctcccgccgatcgtcaaggtaccgccgttggacgcagccattgaacgtgtggatgtaccctctgtcatggctgctggtgaagagtacacggtcacagttgtagcactgaacaaggggcaggagatctggcagcctgcctctgcccacaagctcgcttcacgctcaggcgactgggcgcggccccccatctcagtcggatctactgtgatgaaaggcaagtcacatgttttcacctttaaggttcgcgcgccctcttccccagggcttcatccatttcaatggcagatgatccggagcggagccgagtggtttggtgaggcaacgccggcgcgaacggtggaggtgcgtggtgcagccgccaatatcgtcacccgacgattcacctatgaccagttcaagcgcctttgtaaagtcagtgagccggaaacgggggcgacggtctacgaatatgacgctgcgggcaacatgatctggtcgtcagcggggcttcctgtcggagatgcgaatgactgcgggcgaactgaagcttatggttcgggtcgcagagttgatcgatcctatgactctcgaggccgtctcattaggctcacgttcccggatgggaatggaagtcagagcatcagctacacgccagacggcttgcgcaccgaagtcgtgacccgcaatggtgcgcccgcatctacggtcatcaataggtatgcatacaaccgacgcaggctcgcaaccagcgagacgcagacagttgctggcagagccttctcgatcaagtacagctacgattcgctgggtaaccgcacaggaattcagtatccatcgggtagagcgatccagatgaatgtggatgcggtcggtagggtcaggggtgtttcggatcaagcggggaagcctatcgcctcatccattctctatcatccctcgggtgcgatgtcgcacatgagatatggcaacggagtcgtccgcaacgtatccttgaacactagaatgcttgcgcagctcgttgacgattcgggaatactctcccaggcgtacgtatacgattccaacggtaatgtcatttcgataagggactcgcgtggcgcgggctttgatcgtgtcatggagtatgacggactcaataggctcacttccgcagcgtcgggaagctttggtggtggcgggttggtcaggttcgcgtacgacggccttgataacctgctgtcaatttctgctccagggaagagggatcacgctttctggtacgaccagaacaaccgtctcaccaacgtgtcggatgcgagcggtggaaccgtggttggcttggcgtatgacgcccagggaaacctcaaagcacggaacggccgccagttcacatttgatttcggcaatcggctacgtagcgtcagtgacggtgaggggtactcctatgatgcttcgggccatcgggttgttgccctcgatcccctggggcaaaggcttcgctcactctacagtgatgacggaatgctcttcaccgaggagcgtcggggtgcggggatggtggacttcgttctcctcgacggaaagacaattgcggagatcctgccgtctggcatttcctacctgcacgcggaccaactaggcagccccgcagctcggtcgctggcgaatgggtcgacccagagccgagccgtgtacgagccctacggtgaattggtggagaatgaccaggatggagtggggtttgctggtcatgtacgggatacaggcacaaaactgaactatatgcagcagcgctactacgacccccaggttggccgtttcctctccgttgacccagtatcttcgcggcagaacccctctggtgccttcaaccgctactggtacgccaacaacaatccgtatacaaacattgatccggacggccgcgagtgcaacggtcaggggtgctgggtaaccccgatggagcgagctgcggcggagtcgggcaactggcgtgagtactaccatcttgcggccatggggggcgaccgctatgcggcaagaggctttgaggtggcaacgaacactggtagcaacgcattgaatgcttggctttcggaaaagaccaacgggttcttggcgcagtcgattgccatcaggcaggggtacgaccttaagagtctctcgacggcggaggcctttgatatccatcggagaatggaggggattcgaaaggacttggttcttgggcacatgagagccttggacgccaggttcgccagtcctgagaatcccgtatcactgccacgacccgccatcggcgattttcacgactttgcatttgagaggaatggcgcagaccccgatgcattcggcggctacaaaatggatgccgcagataagttcttgagcatatttgggatatcggtgagagaattctatgattactgtccgcagccgagttgcagctctggcaaagatgattag

SEQ ID NO: 531593 - DNA, 2658 bp, Stenotrophomonas maltophilia
atgaagcatcgaagtgcatggacgctactttttgcgattgctacggcggcaggcccggccaatgcccagtcagaagctgatggctatgaactgagcgtatccaaagccgccttcgatgtaccctccggcccggggcatctgggcgagaatcatgatctctacaccggcaagctcaggctgactcaatgggacatcgagctcaagggggaggggccaacgattcggattggccgggaactgatttacggtgacagccagccctcttcggggacaagcggcgactttggctcgtggaatctggtactacccatgatcacgacgcttgcatcgacggattccgagccgaacggtcgtgatgaatggatcgttgatagtaaatccgctgcaatggcatacaagcgatgcagtgcattcaataccgcagcatcggccggcagctatgcacgagcgtcgctgtggtggtacggagtcaacctccagaggccggatggaagtcgagacttcgtactcaagcgagtggcgggaacacggttgccggcaccgacgggcccgattgcgggagtctcttcatttcccttgctgacaggatccggatgggtgatcggctgcctcgcaacgacatcaaacagcgagccgggtgaaggattccttgcagtggatccagagggaaacaagtactggctggatcacatttcattccgcgaccacttctcctttcacagcactgacaaagagaccaattccaaggtgactcgcagccgtgcaatggcatggccgtcgcgtgttgatgacaagtttggcaactcggttcgatacgcctacggggcatttggtgttacgtcgattcgaggaagcgatggcagggctgtcgacgtcgagtgggagccagtaagtggctccaatccactgcacggtcgcatcaccgcgattcatgtgctgggtgattcaggacagcgtagaacgttccgatatcagtacctgggtgccgatctcggcggtgtaaccaggcctgatgggtcagcttggaactttgaggcggatgcaattcttgccaagccgttccatgcgtcccgctactgttcgcctgacaaggaccccgagccgagcagggaagctcgggcggctgttacttcgccaacgggattgcgcgcatcctatcgcttcaaggcgatccgccacggctacagcaacgcgccggatcgatgcaccgaccatggggcgagtaccaactggtcccttgtagaggtctcctactccggtccagctgtgagcttcgcaaagactttctcatatgagtttgcgagacggttcaagagccagtgcgcagcaggttgtgagcagatcaagcgtagctacgttaacaatcctgatgggagcgttgaagtctatggcttcaacaacctgtacgaggggattgcggacggcgtcctcgaatggaaggagacgcgagcggcagacgctagcgtcctgcgcagagatgtctatcggtatcgctacggtgactccgccggtccctaccagcttggcgaaaccaagatatcgttcggaaataatcgcaatgataggttcaatgagaatctagagcgatatgagcggaagcgtgtcctggagtcggtggtgacgtcatttggcgggaacacctacaccactcagatcaatgcattcgacacgtatggacgtcagctcgacaagtccagtactggtcccacagcgaccagaagggacctggtcgtgtaccacgacgatctcagcagctgggtacgaggacaggtcgcgcgaaccaccaatgttgagacaggggcggaagagtcgaccatactgttcggtcctctggggacggcaatcggcaaaaaggcctttggtcaagtagtgttggactacagctacgatgccaggggaaacattgaagcgagcgtggatgcgcgcggtaacgttacgctttttgacgcttggaagcggggagttccccagaaaacaacttacgcggatggagctgtcgagtccgtctcggtcaatggcttcgggcagatcgttgcgctgactgatgcgaacggaagcaccagtaggtatgcctacgatgcgctcgggcggatggcgcgccgtgactttccggcgggcgacgctgtgacgtggcagccggtcgtcatcggttggcagttcctttccactggcgacgtcgggttcgcggaaccccattgggtccgctcggaagcccagggctcaaaacggaagaagacgcactacgacgcactgatgcgcccagtcctggaagagctctttgacagcgctggcgggaccagtgacaacaggatctatcggcgcttccgatatgactttcgaggtagtccggtgtttgagtcgtaccctgcaaatacgccgaccctcgctgcaggcctttggacggagtacgacgcgctgggcttggtgaggtctctgtcgagggattcggagcttgggcccctgattacgacgaggtcacatctcgccggcgggcgaatacaggaaacggatccccgcggcgcaactgtctccacgacgtatcagctcttcggtgagccgagctttgtgcgtcccatcaagattgaagagccgggacgaagcaccgagatcaagcgcgatgtcttcggaaatattctggaaattaccaggaagaggtag

SEQ ID NO: 531594 - DNA, 804 bp, Stenotrophomonas maltophilia
atgaagatcgctttgttccaactctgtgcactcgaggttgagagctgcgcaagcaacggtgtgcccatcgatcgcatatcgcaactactcggcatggcagcggatcagaacgcggatctggccgtgttccctgagggctttccattcatagccaacggtgaagtagacgcagcgacgtcaatccaggaagccaggcgtgcactccaggaaatccccgcgcacacgctggcgttcatcgtcggcgggtatgtgatggaaggcgattgccagcgaaatgccagcttccttgtccacaatggacgtgtgcacgatccttacttcaaacgcattccctggttggatgagcccttcgagcctggcaccgctctgctgcggtggaactgggatgggtaccaggtcattccacttatctgtgcagacgtctgcgtgccgtggaacgaacccgatgggcgcgcagcgctgatgatgggggaggctgttgctttaggtgcagggccttcgtgcccgatcatcgtgagcacgtttggcgccgatctgcgcaaaccgtattggaccaacccattgcgcgcgtgggcacgtgcctgcaacgccccgatactggttgcagccattgcgtgccggagtgctgccgggttcagcgagggcgacaagcgtcgccattacggtggcggcggcagcggcatgtactggtttgaggaggggcgggaccgtgtgtggccgcgcgccaaggacagcgaggcggtggggatgtacctcgtggacacgcttgaacctgagagccgctggttgccactgcaccagtga

SEQ ID NO: 531595 - DNA, 780 bp, Stenotrophomonas maltophilia
gtggcctatgtcgttcaccaaccgaccctcattgcgccttggccagaactggacgaatttgttcgttcaattggcccattcctcgcgtgcgcttggtgtgcgctggagcgttcacgaagcataagctcgccggtcgcttcaggaaccttggcttccgatgcgttggacacacttgcaacgctccaagtgctgcgccgcaatccagttgaagatactgggtccgaagcccgatcattgtatgagccgttggcttggagctatcagtcatcctggtcccgcccagatgcgaacctggaggcactgataacaggttcgctcacgagatgggctggagagtgccgctctgccgtaaagcgcagcttgggcgcttcccttggtaggagcgaagctcgggcctaccttgccaaccttctacgaaagcaccgcctggatccgtcactgggcgataccttgcgatcaactcggctggctgagtgggaggcgctgagcctcggtcgaaagagatacgtcctgtgggctagcatgcgaaacgcttcgcctgacttcctgcaagcagacatggacggagagttcgcccgtcgtgtgcttgatcgagagatcggcaagacgatctggtggttgcttggtcgagcccagtccggatcgctagcatccaccgacttttgcttcctaccaggccatggctggcgccagccacttatgctggacgttgcgatggagacattcctgccattgggcagacggtactggttggaacctgtcgatagctggccgctctag

SEQ ID NO: 531596 - DNA, 603 bp, Stenotrophomonas maltophilia
atggccgaggagcgaatccagggcaagaccaaaggccgattccgacccaagttctctggcggctcatctcagctcgcccccaacctgctggatcggcaatttgcccccggaaccggaccgacggcgtgggtcggggatatcacgtatgtccccacccgccagggatggctgcatctggccgtggtcatcagcgtccagacccggcaggtgctgggctacagcgtttccaagcgtctgactgaagagctggtggtgaaggcatttgccaatgcttgggctctgcatccacaacgacccggcctgatcttccattcagatcgtggtgggcagtactggggaaacgagtttcgccagctgctgcagtcccatggcgtggtccaaagcatgagccggcctggcaattgctgggacaacgcggtggccgagagcttctttgcgacgctcaagacagaagaggctgccgagccttacgccagcagggaacaagccagccagtccatcgctgcttacatccacggcttctacaatccagcccggctacactcggcgctgggctaccactcgcctaacaactacgcccggcagctccgggctgccgcctga

SEQ ID NO: 531597 - DNA, 294 bp, Stenotrophomonas maltophilia
atgtcccgtatcacccgtcgtagctacaccgatgagttcaagcaccaagccgtggagttggccgagtcgctcgggcctgccgcagcggcccgtcagttggagatgtcggtcaagacgctggcaaattggcttgacgcggtccgtgctggccggtcgttgacctctgaggctcgcaggccagccaccgacctggaaagcgagatcagccgccttcgggccgagaacgccaatctgaagatggagcgggaaatcctaaaaaaagcggcggcgttctttgccagagagtccaagtga

SEQ ID NO: 531598 - DNA, 861 bp, Stenotrophomonas maltophilia
atggactacctcgttggtgcggtatcgggtgctgcaggcggatcagccttggtttggctgctcaagggatggatctcagagaggctaaggcagtcaattcagaatgagtatgcgcagagccttgagagctacaagaccgaactgaactcgaagattgagcgtatccggcatgatcatcaggtcgcacagttacgaacttcactgttcttcgatcaccaaagaagcgctttcgccgcgttgatctccaagatcgggcaagccaacaaggagtggggggatctctacgatgagggggaaggcctgctgtttccggtgccttcgaggaggcaggacgagctggaatcgctgttgtcggagcatcagctgtttcttgatgaggattgcttgatggcgttggccctggtcaccaatgtctacgaccgatccttgccgtgggatgacaggagtggcgatgagcctcaacaacgggagtgtagtcagctgctgtcggacattgggtatctactcccgcggatcgcatcaatattccgcgagaaaattggcgtcacttcgaacccgctgcacctaactgaagtcgcagtattctcggcgatggagctagtgaacggctacaactttgaagacgccggcgtgccccctgtaggtaacctgtcgaccgtaagaattagagacgccgcagacaaggtttcgatcggacttgagaacatcgacgagctattggagttgctacgaacttttgacaagcacttgagcaaggacaacggatggattcacaaggctcagctgcgagtgaagcagacgctgaacgctctggagcgaagcttggcaagcccgtctacagtaaaaagtgcgagacattga

SEQ ID NO: 531599 - DNA, 945 bp, Stenotrophomonas maltophilia
atggcgaagggcattagcgagcaggacgtccacaatgcggcggacgacatcgtcggcctgggcgagcgcccgacggttgagcggatcagagcacacttgggaaccggatcgccgaataccgtcacccgctggctggacacgtggtggcagacaattggtttgcgcttgcgtcaacgcgccatcgaggcggccgtgcccggggtgcccgaacgggtggccaatctaagtcagcgcctttggcaggcagcaatgcaagacgccggggagcttgcccgggggcagctggagacggctcagcgcgccctggaggatcgcgagcgactgctaaaggaggatcgagcaaccatggcgcgggacattgagtcgagccagaaacgggagcatgaggctcagtccgaagccgcggcagccgtagcggccggcgagctactatccgcacaggtcgctcaactcagcactcagattcaggacctactacgtcagcgcgatggcgcgtacgcacgagctgagcggctggagcaagagctgcagtccacgcgccagagcttggtcgaggtcaatacagcccatgaagaggagaggagggcgctgcagacgcacgtgagagcagtggaagaccgcgcgcatgctgaagttgacctgcaccgccagacggtacgcacggcagagcaagagtgggttcgggagcgcgccggcctcgccagcgcagtgcgccaaagcgaacaacagacgaaagcggcggccgaccgagagcaacaggccctgcgacgcttggaaggcgcggtcacccgagcgaatgggctggaggcccagctgacctcactaaaggaaactaccagcagctttgctgaggcgctccgacaaagccaatcgtcccgccctagccctactggggcaggcaagccgcggcgaacggtgaaaatgaagcgcagcagcacgccttaa

SEQ ID NO: 531600 - DNA, 5907 bp, Stenotrophomonas maltophilia
atgttcggctatacgcgccagtatgcgtcagcggcagccgccatctaccacggccttcagacgaggcagctacgctgggtaggtttggcggatcggtgtgcgggcatcgctgacgacgtcgtcctcggcttcgacaacgaagtcattggccaccagtttaaggccagtcgcgatccggaccccttccgcatcgctacactcctgaccggtgggtcgggtttgctgccagggctgatccaagcgtggcaggagttgaaagccagctgccccaacgtgctcatccgtctgcgggtcgtggtggacgacacaccgtcagacactgatcgcgtcggtaccggaggcacaacacggcagttcgtcgccgagtggcagaccaatccggaccggtcgcttgcgcagtggcgtgccttgccgtggggtccattcctgaacgacctgcaggcgatctccggactgaccgaacccgaatttgaggagttcttccagcacctggaactggtacacggtgaccagccagagtttccggcgctctacggcatcacgagccggacacagccacaagtcgaccgcatcgccgatcgcctcccgcacctggtcgcgcgcgtgcccgagcgcgaccggtggacgcgggcccagttcctagaggagatgagctggcccgagaacgagccacgacatcgccatcaattcccggtcggcgtggccgtgcaacgcaatcccaacaccgaagtgcagctgcagagcttggtccgtgaccatctaggcggctacgtttcgttggtcggcccgccgggttcgggcaagtcgaccttgctgcagatcgcgctggaagccgagccacaactcgtaatcgtgcgctatctggcctacgtgcccggcggagcgcagggcatcggtcgcggggaatcggccgacttcctggacgacgtggccgcgggcctgcgcagtaccggtttgccggggatacggttccttagagacaacgagcaccaccgccgcgaggagattgaagccttgctggctcaggccggcgagcgtttcaccaccgacggcctgcgcaccttgatcatcatcgacggcctggaccacgtgccgcgcgaagagcgaccgacgcgatcgttcctggccgacctgcccttgccagcagcggtgcctgacggcgtgctattcatcctgggtacccagcgcgtggacctgcccgacatccccccggcagtccgcgaccaagccagcgtggtggggcgtcaggtcgaaatgcagggactgtccttggcggccatctctacgatggccgatgccctcagcgtgccgacggcggtgtcccggcatcgcttgcgtgaactgaccctgggtcatccgctggcgacgcactacctgctacaggcgttggtcgccgcggaagatgacaccgcgcgcgatcggattctggacgaaggattcgaatacctaggcgacatcgacgccctgtacgctgccgccttgcgaggtctggaagaagacaacgaggtgctcgacatcttgggtctggtggctcgggccgaagcaccgctggatccgcgggagcttgaaagcctgtattcatcacccgccatcgagcggtccttgcgtcaggttcgccacctgctcaagcgttcaggccacgcttggtccatcttccacaacagctttcggctgttcctgacccggcttacacgcacgcgctacgaactgccggacgcagactattccgcaaggacctaccgccaactggcggacttggctgctcgggctcccgcaaactcgccacagcgttttctaacggctcgctacctgatgcgcgccggtgcgcacagcgaagcgctagccctggccacaccgacgttgttccgcgagcagtacttggtcgggcgcgcggcgtcggagattcgcgccgacgttcgcctcgcgtttcgttcgctgcaagtggtggtcgacccaaccgctgcctttagactaatcctggccggggacgaaatgtatcggcgcgccgaggccttcgacgaaccggacgaatcgatccgggcgctgctggcactggggctgcttgaggaggccgaggattttctcgacgaagtcggcggcgacggcttcctgatcgtagatgcatggttgaagcagggcaacctggatcgggcacgaaccttatttgagctgatcgaaccgctgcacgacttgggcagcgaccgcatgagcaacgggccatccatgcgtgtggacgaatttgcccggtgggccgaattggcgagcgagtttcggtcgatcgccgagctggtcgcagggatcgaccgcatcgtcgacgcactgcaacgcgatcccggcccgagcgaggagcccgaagaggtcggcgtgaagctgcgcaggcgcgcggcgctggccgtgcttgcgcgcgatccgttggctgaccgcgctgcgttgatcaacgactttggcctggagccgacggcaccggcgctactggcgacccaagcggcccggcagttcctggccaacggtgccgaccagctcgcttcggcgaccgcggcgctcgccgaggcagtcgacgacgcagcggctctggcggaggtaccgcggagacttcgtcagaccacggcactgatagcggcgcggcgcggcctcatcgcgcaagcgcgcgccctgtctgacggcgtttcgaacccggcgcttaacgaactggacgacgctacgaatttcgaccatgcgggctacgtcgtccgcgccgtgatggactccgttgaattgggcgtgtggatggacctgccagtcccgccgacattgccgcctagaaacgtcgtcttgcaccctctccagcggttcactcgggaggcgggacggctggccgcgggcacccgacgcgagccgcacaacgtcgtcgttggcgcggcggcgcagctatgcgccagcttcatgcgttacctgtgccgggtcggcacgggcgcgggggacgagcatttggcagccctgcatctcgaaaaggcagccccccaggtgctggattccttgctccggtcagccgcacgcgtcagcgcatcggagttcgcgggcacggtggcggccttcgatcaggtgcttgccgaacactcgggccagggagatcgccacacgcggttgcagatcacggtggcagaagctgtggccaggacaaacaacgatattgacggggcgcaagcgcggctggaggccctgctaggtcagcgcgaggaagacacccccagccagttcctggccagcacggcgaggctggcgcaggcgctggcacacattggacgccccgagcgtgcgcgcgagcttctgtcgcagcagcgcggggagaccctaggctacgccctgcgggccaagaaggacccgcagtacgccttctgggcgaacttactgcaagccgccaatcgggcagacccgcctagcagggctcatcgcgttcgagtgctgacacgccaggcgatcggaatgagtgccaccgaagggcgcgatgcggcacaccgactggcccatgttctcgtggccgaggccgccactgacagcgcaggattagcgtccagcgttgccgacgccttgcttgcgaaccagctgattgacttcccagccatggttgatgggttgatgaaaggcaccatacggcgcaatccctcggccgtgctgccctgtgtcgagctgtgggttgcgttgtgcctacccttccaccgtgccgcctattaccgagaatcggaagaaggcgaattcctgcacgaggccatccgccttgcattgcccaatcagcctggccaagtgcgtgatcgattgcttgagaacatcgagcgccacgcactgatcgatgtgcggttagacgcactgggggccttgcgcgccgcgctgctctcacgcggcgaagatgccgccccggtcgatgccgccttgcaacgtctggaaggcgttccccgtttgagtcgccggatgcgcaactcgcccacgcgctacgacaatgtgccggacatggtgcaactgatcgcgcgtcttgatgcggatagcgcggttatggaactcagccacgaggcctcgacggcgtttgtacgcgtactgccggacgcagacttccaaggggcgctggccctcttcgatcgccatcccaagctgcaggccaattacagttgccgcttcggattggtggaccgggcgcttgccgccggcgatcgtgcggcggcgactcgtttaatcgccgcctatccggtggcggatgacaacagctcgcgctggtcttggatctggggtggcgggatacgtcgatatttcgcggcgcgccttcagctggagggcgactcagtgttagccacggcctatgccgccttcatcgccacgctggtggcgggggaagagcagatcagcgccttgctgttggatgccgacgatatctggccggtggtcaccgcctcgcccgattgggcgctgatgtgggccgccgtggaggaacaactgccgagtacgcgcgactaccgacttggcgaggatgtgagcgttgatgagggaaaaacggacgccgccctctcggcctccctgatcgaacgcatgctctcgttgccaataaccgacgtgcgctggcatgccggccgcgtggcgctcaagctaccgtccgccgatccgcaggcgttcgcgctcttgatgcaaagcctcctgggcagtgatgaggatgatgtcgtcctggacggcttgcgcctgatgcacagtgcagccctcgcggagcccactccggagctggtcgtgctcgtcgttgacctgattggccatgccgactttggcattcgggaactcgcccggcggctcgccagccactgggggcacgtggttgatctgcagacgacgccgatgcctgcgttctataccttcgcgctcccgcccattggcgcccacgaccgcgcggaccagttgcgagcgcggcctttcggaccgccctccgtgtccgatcccgcagcgtggagcgcaccgtttcaggacgtcattgggctactcgcccaaatcgccggcgtgtcccaggaccacgtacgccatcgcgttcaacagctgatcgacggctggggaggggtggaagtcttcggccaatcgggcatcgaccgcttgaaggagcgcctgtcgatgtttggcctgcacaacacgttttactacccccatgtgattgtggcgctgcgcgccctgcgtcacgttgccggcgagttggcggccgcaggccgtatcccgggcaaccaggtcgacgagctactacacgaattgcatttggcgccagcttggtttcgtaccgacgtcgacgcacggccagcgttcgtcaggcgtccggccttgccagagggacgcggcgacaacacaccgtggctggagcgcgtcaacgacgatgtcgtcgctcacggcgccgcggacttcgtcttgggcgagatcacgtgctaccgcggccgctacttgaatacccggtacgagtggagccaattgcgcttgctgggcgtcctaattccgacaacgggagatccgaccgaattggtgcaccacctgccgaccggttcgcctgtcctgctggtgccacggcccaggctcggcgcaatgccgcgctgggaattggtaataaactcggatatcaccgagcagctgcgctggcgaacggccgatcagatcacatgggttgacaccgatggcgaactggtcgcgaccgcctattcctggcgggacggaggaccggatggcgagccgcacggcgagtacttagagggcgaaggcgccgccatcgtgctgactgcggccggcagcgagcagtggaatgcggtgcgcggaggcgcgcacacctgtgtgttggcacgacgacaagagcaggagggcgacagttctgcctcttcgcgaaatgcgcgtgccacgcgccctgtgccccccccggcctaa

SEQ ID NO: 531601 - DNA, 4059 bp, Stenotrophomonas maltophilia
atgtcagcggatcgacccacagaaacggtcaccctctcccctcagcaaattcgccaggcccgcgcactgttagcatggtctcgcaaagatctagccgaagcagcgggacttcacgtatctgttatcgcgcatattgagactggggaggcggagatcgctcctgagtctgatgcgctcattcgcatgcgcctggcggaacgcggagttcaggtctcgcagagcggagaggtgagctatccagaccttcctgcgtttccgcacttgactcgccacatcactccggtgcgctgggttacgtccgacgatctcgcaacttggggtgcgaagcctgatgggcccgtgaacctgccgacgttggtaagcaatctgatacgtgcgacacatggcgcggctgcacacatacatttcccggctgatggcggagtccgccatcctggctgggacggaacaagtgttgttgaaactggtagccgatacgtcccatccggtgtagcgggatgggagttgagtacgcagcgtgacggagtcgcagcaaagatccgtgctgactacgataagcggacggccgatcctctttcactggagcccagctcggcaacttttgtggctgtgacggtgcagcactggccagggaaggaggagtgggcacgagagcaggttaaggagggacagtggagcgatgtccgtgtctatgacgccgatgacctgatccactggattgagcttacgcctgcggtcgggctctggctggcgacctatctcgggaaacgcccagaaggtacaaccgagttggaggcggcttggcaagaatggtcactatccacaaagtggccgctcaccacggatctcgtgcttcgagatcgagacgaaagctcggctcaagtactgcagtggctaaggggtgagcctagcgttctgtcgctgcagtcaacctcatctgacgaggtcgtggcgttcatttgggcgacattggccgagctgcctgaagagtcagcactcagctatcgtgcgcgctgccttgtagtgagtgaggctgctgcgcgaacccttaagggagctgctgccccactcattctcgtcctgaccgatccaaatcctggattggcagagacactggcgaagaacgggcacttcgttgcgcagacgtacgatcaaacagccgagaagcatgacgacgtactcatactggagcgtccatcaagaggaggtatcgcagcagccctgaccttggctgcggtgcctgaagatcaagctagatcactcgcacgcgatagcgctcgagacttgactgttctacgacggcgtatgccggctgcgccaggtcggaacctgcccaaatgggctgaggtttctcctccgcgagcgctgcttgcggcgctactcgcaggaggctgggatgaggatcacgaagccgacaaggactgtctatctaagttggcaggatcctcctacgaactcttcgtggaaggaatacgaccctacttcagtaactttgacagtccacttcagaaaatcggtgcgtcgtggcgaatggcgtcaccttccgatgcatggcacttacttgccagctccttgactagtgcgctcatcgatcagctcggcgaatccgcaattgctgtcctgggtgagctcgaccctcgcttcaacatggatccaagcgagaggtggctggcacaagtgaaaggtcttggatctcagtattccccgatgctacgtcaaggtatcggacgaacgctgatcttgttggcattgtactgggaccgtgtcgtactcgttccaaatgcgcgatcgcgcactgacactatcgtctctcagttgctggatcgcgctgatgagcatcgatggtggtccctgtcacgcgacttccgccttctggcagaagcatccccatcgtctctcctctccgcgattgaggacagcctgagtgaggtgcctcagaccatcacggtcctctttgatgatagcgagacgggcgcttttggtgcggagtacctgtcagatctgatgtgggcgcttgaggtgcttgcttggtcgccgtcgcacatgctgcgagtcacgcgtattctttcaattctcgcgacactggatgtgaagacgcggcgataccataacgggccggcgaacagcctgagcaaggtgcacactctgtggagtcctcagacatacgccacacttgatgagcgacttatggcgctggaccacgttcgtaagagagctcctaagtccgcctggaacctcatgctaggtatccttccaagcgctcatcagagcctaacgccatcgcccaagccgctttggcgtgacttctctgtcactgaggtcgaagcggtatcgtgggagctgttgcgccgaggtgctgtcagcataagcgaccgtcttgtggaggatcttggcgaagatcccgagagattcagctcgcttcttggcagggtaaaagatctcaggcctgatccttccaagttcttgtgcgcactggagaacgtccagctcaggctgagcgatgagggcgcgcgtaatactatctggagcagtgtgcgcagggttcttcatcaccacagagcgttccctgatgctccgtggcgattgcctgagtcggtactggatcgacttgcccagtcatatgagcagttcaccccctccgatttgtttgacagagttaggtggctcttccaagccggtgcgggactaccgaacccgtctgccgtaggatggaaggctgaggagcagcagctcggcgaggctcgagctagtgctgtcctggatgtgtttgatggcagtggcattgaagggatatacgccctagcgaagggcaccgaggttccttctatcgtggccggcgcagtgcgcgacgccgcagtcccagcgccgcagatcgatgcacttatcgagttggccgtacgagctgaggatgaaaaatccagggattttgcaacctcgctgataaggtgctcgttccatgatcgaaaggatctgtgggccgatagtcttctctccaagatcagtgctgagaagtggggcacccagcctctgttgaccgtattgattggcctgccgatgtctagctggacgtgggggagggtggcggcgctcggtgaagagatcgatcggctctactggagcagcgttccgatcgtctggattagcggtgacttgtcggacattgaatacgcgatccaacgattgatgagctctgggcgcgctcgcctggcgctgtcgctggtccgcaggcgaccggaggtcgaggtgcggattggtgtcgtgatcgaagtcctgaatgcggtggccaatcaagcgtccactagcggcggggaaagtgactttgggatgttccagtatcacgtatccgaggcattcaagcggctcgatagagaacgtgttgatcagggcctggtcgctggattggaatggcgctttcttagtgttctagaacactcctctcgaccaccaagggcgcttcttcgtgaactctcggatagcccgaggttgttcatcgagttgattggtgcgctcttccaggacgattcgcaggggcccgttagcgaggatggggcgcaggaccctggtgcgcgcgcgcgcgcgcgacaggcgttccgcctgctggagatatggaaccgtgtccctggagccgcagacgacggcactctagatctggattcactagagggatggatcagggatgcacgggcgcaagcggcggagatgaataggttagcattcgcggaccgcagaattgggcacgtgcttgccgcatcccctgttggagatgatggaatctggccgcatgaggcggttcgtgaagctctcgacaatctacgcagcaaggatatgtttgagggcttcactattgcagccctcaaccgaagaggcctcacgactcgccaggccagagacggaggcgagcaggagagagcactagccgcgcagtatcggagttggtctgaagctaccaatgcagagcatccttatacgtcgagggcgcttgatgagctggcgaggagctacgaggaacaggctcgccgccacgatgatgacgcagcgtccttggattggagcgattag

SEQ ID NO: 531602 - DNA, 933 bp, Stenotrophomonas maltophilia
atgaaacgtatcttgaaactggaaaggcatcttccggcgtttgcggagggtgagctggtccgagctgtgatgagtgcggaaggtcgcagcgtgcagatgctcaagcgcttcggctttgttgagccatttgatgtcggtcagagtgttttgcccagtgtgcatctgggtccggctgcgcgaagaaacgcgtacggctacgcgatcgttcaccgggaccagccgatggaggaggtggtccgacagcactcctggaaacgcatggagtggcgtgggcgcgacaaggtcgaggtcgagaatgtcattgaccacaagtaccgacgctatccccgtacgtatgtcgccggagagggcgtggagttcactttcatggtggcgcaggacggggccaaggtgattgcatcgcccgcctaccatcccgtcgaggcggccgagtcactgctgatggcggccaaccttctggttgaagggttcggtggtgtggaatttgttcgcgaagacttggtgccgcatttgaacgtcgccgtcaaacggctcaactgggatatcttccctcagggccgggtcccctggtcacaggtccgggaggtcatcgaccgattcaccgaaagggtgcctacatcggtcaagcctgtcatccgatctcgtgtcaaagcggtagagcgttatgagcctgacttcgtagccattggtcgtgcgggattcgatggttactgggtctttggatttgccaaacatggcttgtacgttcttgaaagccgcatgctggataacgcgacttacgttttggatgcagactgggaggcggtgtcacgcttgacgaaggcggagatcatcaacagcgacctcgccgtggcgcggctgattcacgatggcagttgggcgctcaagctggacgaagtgttgcgccgcgtgcttccgcaggcggcagcctaa

SEQ ID NO: 531603 - DNA, 366 bp, Stenotrophomonas maltophilia
atgagcctgcgtgagcgcgattcgtctccaccggtgtccctgtgcgttggggagcagctgagccatccggcacaagcggttctgatcgccgctttgctgcggcccgacttggaggggcgaggcatccctaggagcgtcccgtgggctccgctcggcctagcgcgcgacgcatgctattcgcatatgaccgcctcgcgggtcgcctgtgaactggtggcggctaaccaggtcagcgtccagcgcgagggacgagggacgagcctgcggctcctgaaaacgcggcgatccttgtgggaggccgcgctgccgcggccgtgctcgccggtgcagcgcaccacctgtatcggcaatgctgccggccgatga

SEQ ID NO: 531604 - DNA, 183 bp, Stenotrophomonas maltophilia
atgagcgacctcgacgccgttgctcgctatctccaggaactactgccggacgtggtcggtgagcttgaacactggtccagttccacggcgcggaccctgtcctacttcatagtcagcctgttcgatctggccgagattgatctgctgggccaccgagtgctgctggccaacgtcccgacgtag

SEQ ID NO: 531605 - DNA, 1146 bp, Stenotrophomonas maltophilia
atgagcggacaatcctctccagttgagctcttgggcatagcgagtggcctagcccccgagctggttgaccccgatgcaggggcgccgcgtttgccagtaggggcgcagcagcggcttccgcatccatcttccgcgtttgaggcgatcctggtaaggctgcaggcctgggaggtcgagtacgagagggcaaagagcaggaacaccatcaaagcactgcgtgacgactggaccagtttcacggcgtggtgtggtcgagcacgaacatggtcgctgccggttacaccagagagtctggtgcgctttctgggcgatcaggtcgtggtcggcaagaaggccgcgacgcttcatcggtacattagtagcatccgcacggtacataaggcggcgggcttgcgtagtcccactgcttaccccgactgggccctggattggcaggcactgctcgacgacctgaccagattcaatcgggcagctccggaccaggcgactcctcttaccagggagcacgtggcacagattcacaacagtcttggcagcagtttgctcgatctgcgcgatgcggcgctactcggcgtagccgccgataccctttgccgtgagtccgaactgacccaacttcgcttggaggatttccagtgcactaattcaggttggattgtgcgcgtgtccactgccagggcagggcggtccggggggcgtatcgtggttgatgagcgtgatgtgagcgatgaatccaaagcggcgatcgacgcttggtgtgacgccgcagcgatcaccgaaggctttctgttcgttcggttagggcgaagcagtagcgtgaatccagctacattggaccgcagcagaccaatcaggccgaagcaagttgctcggatcatccgtcatcgcgcattgaatgccggggtgcccggcgctgcttccatgagcggccactccgcgcgggccggctcagcaatgggcatgatcgagaacggggcgactgtccatgacgtgcagctcgctggcggctggcggagccaagagacggtcctgaggtacgcagaggcggtccaccgtgcttggagtaaagataacgtgacctccgacgatgcagaactccgtaagtcggtctcgcgtcgcaagcctggccgcggggggtacctctag

SEQ ID NO: 531606 - DNA, 1665 bp, Stenotrophomonas maltophilia
gtggatacctatgcgccatggaggatcgatagtgagttgcccggcgaaagtgcttactccctattcagcaaagcggcatggtggaaagcggtaactcccagcgctctccttgcaagttacgtgggcgatgcgctgcatgcgcatggatcgcggtctcgtatggtgattttcggcgcgcctgaactttggatcaacaggctgcatagcgcctcttgccttcctgagacgagtcaagggactttacttgcatcgcttgtgaaggcggaggttgatcagagggcaggggtctccgatttgtggcagtcgcctgtactgcggtactgcgcggagtgtgtttcccttggagtgcacctctggattcatcagcacaccgctgttgttaagtgcccggtgcacctcgtgtcactccagtctgcctgtgttcactgcggcaagtcgagccaagtcgcatatagatcatctcaagcatctttcacatgtgtatgcggacattctctaattggctcctctggctgcgttcctgttgcgatgcgtgaagagttccgtcgcttgccaggtattgttgaacagatgtctggttggctttcattcgttgctgcacaggcttcgaaagtgcagatttcaggggcatggcaggcatcgcattttgctgatgcctgtgccatcagtcttcagcagctccccgtgcctgactgcatgcgccgtgatgtcgacccacggtttgacattcgactgaagagcattggggtctgcgacggatccttgaagagggtgacggaccaggacctggcgggcacaaattgggatctgcaaggttcaagcggaacaggacgcagccaaagttgcgaggccgacacttccctgccgctcatcggcgttgtcgccactgcctttcggagggtggcgatagctcatcttgaggatgcatcaaagcatgtatgcatagacatgccgtggcttatgtttggtgagtctctgctgttcttgcaggccgactcaattgctgagctggttcactgctgtccagtaggtgcgggcttttggatctggagaatgctttgcgaggacgtgctctcgatgatgcaaaggaatcgccaaggcgtgtggcagtgtgagctcatgcagagcaaggtgggcgggaacgctgcactgttcctgctgtccagatccgagctgaacttctgcattcgcgcatgcgcagaagtgtttgatagctataggcggggcctgatagatctaagtgaggccagacaagcgctttggagtcttagggacgtgtctggaaactggggcgctgcgggtgggtgccgcttgaagccgctggaggtcgatgggcgatggatctatacctctatcgatgcctctgatttcacatctaggccctgcttggacagtgcttcgtgcataccgaagctcaaacgcttcttccagcgtcgctacgatgaagccgtggccgagcgcatggtggctggtgccttcccggaacgaagtagacggccaatgcttcgcactttggcgatgatcggctgtcaacgacgtgttcttgttccagcagggggtgacgcaagtcggataggtcaaatggagcgtagtgatccgttgcggtgcgcaggatttgattggctggatagggtcatcacgcttcgtggaggtggcctctcctag

SEQ ID NO: 531607 - DNA, 510 bp, Stenotrophomonas maltophilia
atgaagaatcaacacttccgctggctcaagaggatcatcaatcacctcgccaaggctgacgtcgatgtcacgacggtcctgtttgggcagacggaactgcaagcaacgaagaaagagctcgtgacgaatggaaggtcggatctatccgtgcgatttatgaatcacttggttaggtaccgcggcgtagtaagcgctgaagacattgcggtgatcatgaagtcgatcgacagctgcagatggactgtcgagggtcatgaggttctctatacggaattcctctttccacaagcctatagcgcaggattcaggttcgagcaactctcggaacagctgtggaaagcagttgaccgtttgccggcgaatcagctgaagaaaggcattccgatggccgtggttggatcctttctctctctgctctgcagtgagctaaaggacagggatgtagctggcatggaagttgaccctgagctcattgcgtcaactttcatgtccgcctaccgcgacgtatag

SEQ ID NO: 531608 - DNA, 2031 bp, Stenotrophomonas maltophilia
atgagcgccacattccagtggacaagggcgaacacgccggtagagcgcatgttgtatgaaagctgggccgacatctcgttggatggcctggatgatctcgcaagtgcgagggtcaatctactgacgaaggctgtcaaagcctacatcgatggcgagccatatgacccctccttggagcagttcggcgtctatagggcaactgtccttagggcatttcgccgttgtaccaggctggatcagttcggccgagtggttggatggcaaggtttgttgccatacctccgactgagctcgcccgagcggcgcgcgccgttggtcagatccggaaggatggcgcagggcgggctaacgggcgcgctcggtagtgtgctgagtcgctacccagctgtccgagtcgggctcgatgatttcctcattggctgtgcaatgaggaaggtggggtatgaagcagggatctgcgctgccagcgttcacgggaagtttattgagctctgcgagaacgccggcatacctagtacctcgtggccgttcacgacgaagtaccagggcagggagtcgatccgcaggtactgcaatatgttcatgaaagagaattacgatcagatcgtctcaacgcagtacggatcaaaagcaagggctagggccaatacgtcaacgggacaccagggtaggcttgcatgcattagaccttttgacattgttgagcttgacgaacacaagtgtggattcattggcgcgatcggtgtcccatcgccagaggggctccgatggttgcccatggagcggatcacgatcgtcctcgtcgttgagaggttcttcaaggttgtgctcggatatgccgttgtcctgcggcgcgaggccaactccggagatgtgctggacgcgttgaacgcggcggtgggtggcggtgcgccctcttgtgaagtggatggccttgctcgttcatcagtcgccaagctgccgcgcgagctatcagagacctttgagtggtgcgggtttgatgcactcctcctggacaatgcgcttgctcacctttcccacgatgtaatcgaaagagccaagaaaattgttggttgcgacgtgaacttcgggccaaaagcgcgcttcgagcgcaggtccctggtggagaacgtgttcggacagcttgaaaggcgtggtttccggaggattccgcttacaaccggcgtcagtccggtcgatccccagcgtcaatcccctgaaaaggctgctggtcaagctcgcatttcactagaaggactgctgcagttcgttgacgatgtgattagtgagtacaacacccagcaaggcaaatccaactatggcgattcgccgatggggaggctggaggctggttacgacgatcaggatgggatggggttcatgttcccggtgctgcccccgcttcctgtgcatcttgccggcttgaatgagtccgtctactccgtttcagtgcgaggtgacaagaagacggggcggcgtccgtacttcacattcaagaaagagccctacacgggtcttgagctgtctaagaacttcgacctcattggcaagcgcgttcgcctccacgttgttcgcaaggacatcaggtccatcgaggttttcgactaccaatccgggcgctttatcgacacctgcaaagtgatgggggggtggtccagacacgaacactcgctcgacgcgcgttcgcacatcaactctctcatcgctagtggacagcttcgcgttggatatggtgagtctgcagttgccaagttcaacgaggccgtgattagcgctggcgagttggcgaagaaggcggcaaagctcaacaaacacgtcctggcaacctttgcggcgacgtcagaattggcgggacttaaagccgaagaagatcgattgtcagaaggcgcgaggtttgaagatcagaaggcgcctcggcgtggaaaggctttgccagttgagcgcgatgacgaaggcgattccgagttgtcggatgagtatctggactacagattcacatctactgcggggggcggaagcgatgagggttga

SEQ ID NO: 531609 - DNA, 678 bp, Stenotrophomonas maltophilia
atgcccagggttcagcagaagtcaccgcgtcaggctcagcgggatcgtgtttcgtccgctattcaggcgcggggagaggccggtgcgaacatctggctaattaggccgccgttcgcaagtcgagatctggcgctcagtagtgacttccagaggcaggccttctatctgatcgaaggcgagcactccttcgtgcgcatcgactatgccgagccgtggtggtctggctcgcccacaagctcggcaccatctgtgcggggtgagcctcggtactttgccagcgcggttagctatgaagggaagaagttcgagctctatctcgaccccaaggggcactcgcccgcaatccaacgcgtcggggaaggctcagggctggtgcacattagtggctacacgattgatgccaatgcgcagcgcgtggagaactggccgcggatagtcgcgtgcattcgtcggctgcttgttggggtcagtccagttgtggagcgcaggattctgttcgagttgggaagcgccagggcggtttccatgagagagcttgcctgtcgattggttgacgtcaatccagcagttcttcgaggcacggtcgcttcgcttctgcgcaagcgagaaatctgttccgacttggatgtggccccgtggtcaatggcaaccaagcttcatctgggagagggtgcatga

SEQ ID NO: 531610 - DNA, 1116 bp, Stenotrophomonas maltophilia
atgggcagaaggctgctaggagccggtgagcgggtcgggccacgtatctgggcccgatatctgaaggcgcgctttgcctcccctgggctcgcgcaactgaatgcgcagctcgcgctgcctattgtcccgttcgagaattttcacttcgggcacgagcccccgcccctccccctacgcctagccccaaagttctttgagagcgcctacgagttgggcaggtcgcctgatggcgcttactggcctgagatccattcgcccgacggccttgtgaagttcaacctgtttgaacgggtctcatcgcgggccccggagtcatccaagtggcttctcaatgacatttccccctacttgggagacgtatgcccgccgattgaggtaagccgaaaggtggtgaatgacgggctaagagagatcggggcgttcgcgctttctgtaccagcggtagcggctctcatccttttggatcagagcggcctagccgatctggccttcgctacagtcttctcactactcacccctttgccgcagtgcctagcactgacatacgggctctatcacatcgcggtctggcactcggcgcgtcacggctatacgcctgtaatcagcaaccttagcgatgcttgcgcggacgcagcgtgctcgttcagaaatggcctgatctcactcggcctcgatgacgccgaggaaatcggggggcagctgattgccgagctaagaaggggctgctatctgatatcgagcgaaggcgtacggtcaatgccaagcccggggctgcccccgccgcttgagatagggatccgcttggtgttagttgaagacacgccccgcactaggcaggcagccaagcacttggatgcgctcggccaaatcgttctcgaaaggggctacccccaccaggtccaagacgccttctattcttctggcctaacaaccacggaagctatcgacgcgatatttgtcggctgcggcgacgtggtcggaagaacgacctctatgtgggatgacgaactgaaccgtctttctccggcactagctagccgaacgcctgcgagcaaccctcgggctgacgtggcgaaatcagggcaagtcaatcgaccagtgttcgcgcgaccatga

SEQ ID NO: 531611 - DNA, 2268 bp, Stenotrophomonas maltophilia
atgaacgagggagtggaaagtaagtatttttctgaaggaatagatcgtgctctaattgcttatgcatttctagcctacacaaagtccgaccctgctgacctgacaagtggtcttgcgccgatgttcgcgcctattgccagggaacttaaaggagagccgttctcagcggacgtgttcgctgataagttgagtgagttttatggaattaaaatacacccctgggccgtcgatgacctcacgccgcgactagaggcctgcggtattttgagaagagttcctttttcagaatcaaccgtggcttatgtgtacgcaactccctttgaggcccgatacggagatgacgtaaccgaggcgcaagtgcgttcgttgttgagtgatttctcgacatttgcttgtgatcaatttaacagccacggtgttgtaataagtgctagtgaggcagaaaaagtcttcctagagtacttggtaatcacggatctttcttcaattcggagtaggtcgtcaactccagcaaaaaaaccggaaatactcacgctgcgaaaaagcgagggtggtcaggatgattctgctgttgcgaagcgcaaccagctactgaccgtttgtgcgtcttacattctcaacatgtttgagtcaaaaagggatacgtacgatcttatcgtcagactggctcacggagcattacttgctgaagttgttttaaatgtcaaagaccctggctcaaaatcagacctgcgacgcttgactgttgtccttgatgcgcctctggtgatgtctattcttgatgtcaggaataaggaaagcactagttatgccagggcgtttcttgatgatctcaaggctaagcaagcgaccgtcaagattttttcccactcgattgaagaaattgaatacaacataaaaagtgttgtcgatcacgttgctcgtggccaaggccatggcgcaacggcatcgcgcctttgtagtgatcactctttcagggtgtatgttgactcgcttcggtctgatattcgtggcgcagtcgagagatttggtatcaaggttgtggattccccggacaccaagcaggcctatgagatattttcacgggaggctgagggagcatttgcttcggatctcggtccctacaataattatcaggcgaaaattcgcgacgcaaattcagtggcgggtgttcttcgcctgcggcgggggatcgtcgcgcccttaaagagttttgattcggcaggccatctatttattacagaaaatgaacgaattgcggatcgttcatctaggcttgtgttggacaggaaaaagaattttccatcaatggtccctgcagcccttacggacaggtttttcgctggacttatgtgggttacttttggcggtggctctgaggaggtgactagacatcgccttctggcaagctgcgtttccgcgcttgaacctaacactgatgtaattacaaaagttcacgagttcctaaaggggttggatgtccagaaggctgaccattttagggcgctcatgactgaagagcggtccggtcaacatgtcatgcagctaacactcggtgatccgttgatggtgcgcagcactgaggatgcctcagaactgatgcgtaagcttgaagagcgctatatggaacgaggaagagtggcgggagaggagaagctgcaagctgcgcaccagcaatttgagtctaagatggcgcatttgaacgccaatcatgaagagctaatccgatcccttcaaactgaggcgaaagatagagaagaagcctctcaaaacgagataaaggcacttagggaggcgtcggcttccgattcgattaaaattgaacagcttgaagatgctctgagtgatttccggagagagctggaccgtgcaaagctacgagatttaaagagagatcttaatcttttgtccgggatcgctgcttccgcacagaggacctacagggtttcggaaggagtcgcctatgcggtggtcgtttttatgattgtcggagttgcggttgtaccagctatgtactcaggtctgagcaatggggcgattactggtataaccgtgatttccgtcttgctcgggattttgggtttctggaagttgcctgacatggttttcggttcatttgccgaacgtcttcgtgaaaataaattcagaagtaaggtcgcggatcactcgttggaaggactggtttccgaatgcacagtcgattgggtccagaagacaattgaatatcatgggggggttggcggtattgaggttcagtctttttcgtag

SEQ ID NO: 531612 - DNA, 387 bp, Stenotrophomonas maltophilia
atgtcgaaaatcttttgtgcacgattgtgtgcttgtgcgttcattttgggcttctttgccgaaatggcgtactttgttgtaatcacgcataacgcactggtgttccgaaccggcgtggatattgctattgcctgcttcgcgttggtgcaagcgtttgtgatgccgcacaaatacaaatcccaagcccacaactcctctcagtttgacgtggctttgtcgctgcaaagtttggtgctgtttggattggccgcgtatgcagcgtggagcgttgcggacgcgtggcacatcggattggttggcttgatgtcggcagggatcatttgcagtcaagtcgttaagatctgtctgcgcagatattcccaattgcaaaacagtgttcagtgctaa

SEQ ID NO: 531613 - DNA, 462 bp, Stenotrophomonas maltophilia
gtggcgatattgagcgcaattcgacgctggcattttcgcgatggtgcgtcgattcgggaaatagcccgacgaagcggcctgtccaggaacaccgttcgcaagtatttgcaaagcaaggtggttgaaccgcagtacccagcgcgagacagcgttggcaagttaagtccttttgagcccaagttaaggcagtggctctccaccgagcacaaaaagacaaagaagctgcgcagaaacctgcgcagcatgtaccgggatttggtcgctttgggctttaccgggtcttatgaccgagtgtgtgcctttgcccgacagtggaaagattccgaacagttcaaggcgcaaacctcgggcaagggttgtttcatccccttgcgctttgcttgtggcgaagccttccaattcgattggagtgaggactttgcccgcatagcgggcaaacaggtcaaacccgagcaagcctga

SEQ ID NO: 531614 - DNA, 246 bp, Stenotrophomonas maltophilia; identical to SEQ ID NO: 511152

SEQ ID NO: 531615 - DNA, 1278 bp, Stenotrophomonas maltophilia
atgagccaggacgatacccccgaccttgacgcgccgcaggcggacaaggtggcacccgaggcggtggcgctgcgcgcccaaccgcgcccggtcacgcgcctgaaccggcgcacgctggccatcctctccggcgggctgtcggtcggcctgatgggcgcactgatctggtcgctgcaaccgcagcaacgcagcgcgagcgagtctaccgagctgtacaacgtggatcgcgtgtccaagtcggaagggctggatgcgctgccgacggactattccaagctgccagcgctgccgcccgacgtgccggagctcgggccaccgctgccgggcgatttagggccagccatcgtcaattcgcagcagccagttgccgccacctatgccgcgcccggctacgaccccaacgatgcgctacgcaaggaagaagaagcagcggcagcttcatcggtgttcttccgcacgggttccccgcaggctgcgcccgtggcgcagtcgcaggtcgctgccgcggcaggcttcgctgccaatgccgctttcgatccgctggccgctggcccagcctcgacggcggcccagcctgctgatccgactgccgtgcagaaccggcaagaccagaaagaggcgttcctgacaggcggctctagggaaacccgtaactccggcaacctgcaaatgcccgcatcgccgtaccaagtcatggcaggaacggtgatcgcaggtgcgctggtgacgggcatcaagtccgacctgccgggcgacgtgatcgccacggtgacggagccgatctacgacacggccacaggcaagttcctgctgatcccgcagggttcgcgcatcctgggcaagtacaacagccaggtcagctacggccagagccgcgtgcaggtggtgtggaaccgcatcatcctgccggacacgtcttcgctcacgctcgacaacctgatcggcaccgacccggcgggctatgccggtctggaagacgacgtggactggcattgggatcggatctttgcgggtgccgtgctgaccacactgctgggcgtcggtgccgaactggccgcgccggaaaaccgccaggacggcgatcgcgtcatcatcgccgggcgcgacagcctgcaggacacggtgaaccaagtcggccaggaagtgacccggcgcaacctcaacatccaacccacgctgaccagccgtcccggcttgccagtgcgcatcatcgtgaaccgcgatctggtgctgcggccctatcagccgctgttcttcaacaaggggacttcgcgatga

SEQ ID NO: 531616 - DNA, 1005 bp, Stenotrophomonas maltophilia
atgaatgcacgtttccgtaaaaccgcattgccggtgatcctgctggcatcgactgtcctgtttgcgggctgcgccacgcagggcaagccgccgccggtgatctcgctcgatgagccggtgcaggctcagccattgcccgagccgcccacgcccatcgaagtggtggcagtgcccgaaccgttggcattgcccggacagttgaaaccgctgccggacgttgatgcgaccccggcttcaccggagcctgccgacgagaaggtgcgcgtttcgcgtgccaatgccgaggcgcgcattgcgccgacccgtgagggctacgtcaatgcgatccaggtctggcccttcactgacggcgcgctgtatcaggtctatgcgtccgtgggccgcgtgaccgtgatcgcgctccagcccggcgaggaactggtgacggtcgctgcgggcgataccgtgcgctggatcgtgggcgacacctccagcggcagcggggccgatctgcgcgtcaatgtgctggtcaagcctatccgttccgggttgaagaccaatctggtcatcaccaccagccgcaggacgtacctgctggaactgacttcgaccgacaaggcatggatggcgtccgtgtcctgggactatcccaaggatcgaatgctggccttgcagcgccaggcccaagccgccaacgctgccgcgccggtcgatgcaggcttgtcgctggagaacatccggtttcgctatgcaatcagcggcagcaatccaccgtggaagccgctgcgcgccttcgacgatggcgagaaggtctatatccagtttcctgcaggcatcgcccagggcgagctgccgccgctgtttgtcatcggcgcgcagggccatgggcaactggtgaactaccgcttccgctcgccgtactacatcgtggatcggctgttcggtgcggccgaactgcgcctgggtgctgacaagggcgatgtggtgcgcatcgagcgcacggatggcatcgccgggaggaactga

SEQ ID NO: 531617 - DNA, 756 bp, Stenotrophomonas maltophilia
atgtctgatttttctgtgaccgcaatgggcattctcggggaccgcgatctcacggacgatctcctcaacgacatcatggtcaagctctccatggtctttccggggatagaccttgagccaacccgcaaaattcttgaggcaaaaatcggcctgaccatgagtcccggcgaaggattgaccagtggcgatcaggagccatgggttgctgatgccaaggcttcgatcaagtgggcctactgggaggcctatcagcagcagctcaaaagccagggtctgacaccttcaattcttcgtgccatcgacgaagatacagagaacgtcctgaccgagtgcggaaatccctcaaactctgagccgtggaaggtgtatggcctggtcatgggcgatgtccagttaggaaagactggaaactactgcggtttgatcaacaaagccgcggacgcaggctacaagatcatcgtgcttctcacgggaacaatcgaggagctccgctcacagtcgcaggaacgaatggacgagggttttgtcggagaggacagcaacgatgtcatggatggtgttcgcacgaaggtcctcggtgccggccgtttccgcgacaacatcgtgccaaatgttctgacgtctgtgagttccgatttcctgaccgcgaatcaaagatcgctcaagggcataccgctccagaacctttcgcagccggttcttctggtgatgaagaagtacatgactccgctcaagcgcctcattgagttcatgtag

SEQ ID NO: 531618 - DNA, 1065 bp, Stenotrophomonas maltophilia
atgaccaggcgacggtcatctgtggcatcgcccgcagcaccgtcggcgctgctgggcgacattcgggcactgatcgaggcggcacgcaagcgcgccgcctcgacggtgaatagcgagctgacgatgctctactggcgaatcggccagcgcatccgcacgcaggtcttggacgggcgccggggcgcttatggcaaggaagtcctgcccaccctggcggcgcaggtggtgaaggagtacggcagcagctttgccgagcagaacctgcgccgtatggtgcagttcgcggccaccttccccgacgagcagattctcgtatcactgatacgagaattgagctggacgcacttcatcgccctgatgccgctgaaagacccgctccagcgggactactacgcgcagatggcgagtgccgaacgctggagcgtgcgcacgctgcgcgaacgcatcgactcgatgctgtatgagcgcacggcgctgtcccaaaagccgggcgagacgatcgcacaggagttggcgaagatgcgcgatgcgcagcgcatgtcgcccgctttggtcatgcgcgacccgtacatcctcgacttcctggggctgcgggacacttggcaggaaggcgacttggaggcggcgatcatccgcgaaatggagtctttcttgttggagctgggcgcgggtttcagcttcgtggcccggcagaagcgcatccaaattgacggcgaggatttccaccttgacctgctgttttacaaccgcaagctgcggcggctagtggcagtagagttgaaggtcggcgagttcaaggcggctttcaagggacagatggagctttatctgcgctggctggacaagcacgaacgcgagccggaggaagcctccccgctggggatcatcctttgcactggcaagaagcgcgagcagatcgaattgctggagttggacaagtcgggcatccacgtcgccgagtacctgaccgccttgccgccgaggggcgtgctggtggagcggctgcaacaggcaacgcagcgggcgcagttgcagatcgagcaccgcaagaccgacaacgagtag

SEQ ID NO: 531619 - DNA, 1779 bp, Stenotrophomonas maltophilia
atgactgcacgcaccgctccgcgctggcccgtacgctacctgctcttcatcggcggcctgggtggcctgctgtacggcatcgacatcggcatcatcgccggcgccctgccctatcttgaagcaactgccagccacgcctggcagctcagcagccagcagctcggcttcgtggtggcggcggtgctgctgggcagcgtgctgtcctcgctgttcgccggcatggtcgccgacctgatcggccgccgcggcgcgatgctgctggccggcctgctgttcaccgcctcgattccgatcatggcactggcctccggctacacgccgctgctgctgggacgcctgttgcagggcatcagtggcggtttgatcggcgtagtgattccgctgtacctggccgaagtgctcagccccgagcgacgtgggcgcggcgcggcgatgttccagctgctgctgaccgttggcctggtgctggcagccctgatcggcctgtaccacgcccacgccgtggatgccgccgccgaagccgtgcgttcgctgccggtcgcgcagcaggcgcaggaactgttcactgtgaaggaccacgcctggcgcaccatcttctggacctgcctggcgccgggcctgctgttctgcgccggcatcttctggctgtccgaatcaccacgctggctggtgcgccgcggtcgcatcgatgaagcccgccgcagcctccagcgcgtcctgcccgccgcagatgtcgagcccacgctggcccagatccaggcgccggaatcgagcagcagcgacggcaagcgcgacccgctgctcagccgccgctacgtggtgccgttcgtgctcgcgtgcgtggtgctggcctgcacccaggccaccggcatcaactcggtgctggcctacgcggtcaacatcctcaaccaggccggcctgtccggttcggtggccaacggtgccgacgtggcaatcaagctgctcaacgcggtgatgaccgtggtcgcgctgctgctggtcgaccgcaagggccgcaagttcctgctgatgctgggcagtggcggcatctgcgtggccctgctggccgcggccacgctgttcttccaggccgagcgtggccgcgccgatgtgcagccgcagttgcaggcggcggtcagcggcgatggcctgcagctggtgctggatgatgcgcagtggcagcgcctgggcgcggggatcgaccgcgaagggcggccgatgcagctgaccgtctcctatgcctacggtgacttcaccaacgtgcgcgccctgcgcagcgacaacctgaccgatcgcgagctgcgcatcgagcgcgccggcactgtgcagcccgacagtgtgattggtgcgttcttccgcaagctgcatctgaatccgttcgccgacccggccagtgccgcgcgggcaccgctacgcatcgaacaggcccgcatcggcccggtaccgccgccggcacatggcttggccgtggccgcctgcatcctggtgttcgtcgcgttcttcgcggtcggccccggcgtgtgcgtgtggctggcactgtcggagctgatgccgaaccgcatccgctccaacggcatgagcatcgcactgctgatcaaccagttcgtgtccaccaccatcgccgccatcttcctgcccacggtgggccactacggctacgccagcatgttcgtgttctgggcggcgtgcaccttcgtgttcttcctggtagccgcgttctggctgccggagaccaagggcaagtcactggaggagatcgaggcacggttcgcccggtag

SEQ ID NO: 531620 - DNA, 1128 bp, Stenotrophomonas maltophilia
atgaccgacacccgttccctgcatggccgcatcctcatcccgctgggctggcggcgtggccaggtccacttcgattcgcacgtgcgccagctgcaggtggacgaccacagcggtgccgacgacctgcagctgccggtgatcctgcccggcttcatcgacctgcatgtgcatggcgccgccggcgtggacctgatgcagggcggcgacgtggcgcgcaccatcgcccgtacccatctgcgcttcggcaccaccacgctgctggcgaccaccatgaccgctggcctggatgagatcgagcacgcgctgcacggcgtggccgccaccatggccgcacccgacgccgaggccgcctgtattgccggcgtgcatctggaggggccgttcatcagcccgcagcggctgggtgcgcagcccaaccggaccatcgaggcgacgctggcgctggtacagcagctgcacgcgctggcgccgatccgggtgatgacgctggcgccggagatcggcgagcacaccgcgctgattcccgcgctttcggcgatgggcatccgcgtgcagctcggccacagcgccggtacctacgaagaaggtgttgctgcgctgcaggccggtgcctccggcttcacccatctgttcaacggcatgaccggcgtcgatcactatcgcccgggcatcgcggcggcggcactcgcgcatgcgcagtacgccgagatcattcccgacctgcagcacatccatcccggcgtgatccgcctggccgcgcgcgcgatcccgcgcctgtacgcagtgaccgacgcgactgccgccaccggcatgcccgacggcgagtacgcgctgggcgagcagcgcgtgcacaagtgcggcggctgcgtgcgcctggcgaccggttcactggcaggaagtgcactgaccatggaccaggccctgcgcaatctggtgcaggtgggcctggagctggccgatgcctcgcaacgtgtttccaccttcccggccgattacctgggcctgggcgatcgcggccgcatcgcgcccgacgcccgcgccgacctggtggtgctggacgccgaactgcgcctgcagcaggtggtggtgggtgggcgcgtggtcgatttgaacgcaacaccagcctga

SEQ ID NO: 531621 - DNA, 246 bp, Stenotrophomonas maltophilia; identical to SEQ ID NO: 511152

SEQ ID NO: 531622 - DNA, 1278 bp, Stenotrophomonas maltophilia; identical to SEQ ID NO: 531615

SEQ ID NO: 531623 - DNA, 1005 bp, Stenotrophomonas maltophilia; identical to SEQ ID NO: 531616

SEQ ID NO: 531624 - DNA, 1038 bp, Stenotrophomonas maltophilia
atgagcaaagagaagacaaccctggcggacgtgcagcccggtgggagggtgaggctgggggatcaggccgagcgggagcggtttgaggcgtgggcggggaaattctggtcactcgagaagggctggtgggtcggccagatgcgctatcacagcgactacgctcagcggacatgggaagcatggcaagccgccctctccgcccagccctccccgggtggtcagggggaatcggtcagcgatgaaatggttgatgcagcgtgccgtgcctactatgacactgctgaagatgctgtcgacgtagaccatacgtgcattgaggccgcactaaaagccgccctcgccgcccgccagccggttggtgaagacggtcagccgatggttttggtttcgcaggaggtcaagtctcaggccgattacgacgcagaaatcacgagttccgtcgcaaacctgcttcgaaataatcagctgggcctgagtggtagccaaccggaaatggttgctgcgctacttgatattgctgcccgccagccggtgggggagccggtgtgcagcggcggatttgtgatctccaacggcagtggcgagaaatacatggcatgggggcaagttggccccgagtggaccgcagacaggtccgccgcgctgtggctggttcgccgcgccgatgccgaagcactggcagcggagaacgaggacgcatggtcgatcctgccggtcgagcgctgcgcgctgccgccaaacggctgggcgtgcactctggcagcgggccatgagggtccgtgcccgaccatcgccgccccgcccgcgcagcagcccgcgcaggccgtggacctggacgcggtgcgtgcactgttgcggcgacggattgagcagtggcgctcgcacctgcccgccgatcctggcgcacctggaacccgcgagattgagacaaagggcgagcacgactacaacaacgacgtgcgtatctaccgcgaggggatcgctgtcatggaggaggtgctgtccaagatcgacggccaggcggtgggcaatggctga

SEQ ID NO: 531625 - DNA, 714 bp, Stenotrophomonas maltophilia
atgaccgcgaccctcaccacactccccacgaactgccccgtcctgcgcaacgcgttcgacacgatcagcgcgatcgcggtcgaggctgtgtggctgccgaaccaggcaaaggtcatcacgctcacacaggcccagaccgcgctgcgtgatctgcatcatcgcctgcctcgcctgcaggacctgcgcgtgttcgaagccgccgtcaccgcctatgtggcgactctgcgcagcagcatgcaggacggcgacacgccgctctgcgacgccacccgggcccggctggcgcaggcgaccgagctgctggagttggtcaggaatcagacacgcactgtggtcgatccggcggacccgtggcgcggcatgtaccaccctagccgacttcccccgcgcaatgccgacggcgagattctgtgccatccggacgtgcccatgtgggctgatgggcgcgagctatcgctgcgcccactgttccttgcgcagggcttcgacctggtcgtggttgagggcgagttctcagaggaagcggtggaggccggtgaccatcgctactgggacgagatgcgggcgtggcagcccactggccccggcgccgattggcgcctggtgtggttgggagatacagaagatggcccaggtgcatggtttgtgcggccactggcaatcgccgcaatgacaacgccgacagctgccccctccggatcggacacaccctaa

SEQ ID NO: 531626 - DNA, 246 bp, Stenotrophomonas maltophilia
atgccggagatcatcacgctccctcagcgcatgcgctttcaaaccatccgatcctttgacgctcgcaccggagtaggcggggttgttgcgatcctgtgggcgcccgtgcactcccagcgcaagagcggcaatcatggccaggaggatcatcaccaccccgctcttgcggatctgctgccggatgcggaaaagccggtagcgctggtggccgcgcacccagccgtagcgagctatggagacgattag

SEQ ID NO: 531627 - DNA, 1488 bp, Stenotrophomonas maltophilia
atgtctgaggaaatcctggtcaatgtgaccccgcgcgagacccgggtcgcggtgatcgagaacggcatgctgcaggaactgcacatcgagcgcggttggcgccggggtgtggtcggcaacatctacaagggcaaggtgcagcgggtcatgcccggcatgcaggccgcgttcgtcgaggtaggcctggagcgcgccgcgttcctgcacgccaacgacgtggtgcgcccggccccggtggccagtgcagacaccgagaacacgaccctgccgccgccggccagcgtgcccatcgtcgagctgctgcgtgacggccaggacatcgtggtgcaggtggtgaaggacccgatcggcaccaagggcgcacgcctgaccacccagatcagcattccgtcgcgctacatggtgctgctgccgcaatccaaggtggtgggggtgtccgcgcgcatcgaggatgaagccgagcgcgcccgcctgaaggccctggtgaccgagctgtctgcgcagcatggcggctacggctacatcgtgcgtaccaatgccgagggccagccggccgaggccatcgccgaggacatcgcttacctgtcgcgggtctggaacgtggtcgagcgccgcggccgcgaagcggcctcgtgcagcaacatctatgaagacctgagcctgccgctgcgttcggtgcgcgacctgatccgcaaggacgtggacaaggtgaaggtggactcgaaggaaaccttcgcgcagctgcaggcgttcgtcgccaagtacatgccggtgctggccgagaagctggaactgtattcaggcgatcgcccgatcttcgacatgttcggggtggaggacgagatcggccgtgcgctggacaagcaggtgccgctgaaatccggtggttacctggtgatcgaccagaccgaggcgatgaccaccatcgacgtcaataccggttcgttcctcggccagcgcaacctggaagagacggtgttccgcaccaacctggaagcggcacaggcggtggcccgccagctgcgcctgcgcaacctgggcggcatcatcatcatcgacttcatcgacatggacgatgccgagcatcgccgccaggtgctgcgcaccctggaaaaggcgctggcccgcgaccatgccaagaccacggtgtacgacttctcgccgctggggctggtggagatgacgcgcaagcgcacggtggaaagcctggaacgccagctgtcggaaacgtgcccgcagtgcagtggccgtggcagcatcaagaccaccgaaacggtgacctacgagatcttccgcgagatcacccgtgccgtgcgccagttcgatgccgcacgcctgctggtgatcgcctcgaccaaggtggtcgcgcgcatcaccgacgaggaatcctcggcggtggccgagctggaggaattcctcggcaagagcatccgcttccaggcggacgagcagtacctgcaggagcaattcgatgtcgttctgctgtga

SEQ ID NO: 531628 - DNA, 126 bp, Stenotrophomonas maltophilia
atgcttgcaagttgcggtgcacgaaaattcaatgctgcggggcacaatgccaacgacatcgcgcagaaagaaaagccccgcattagcggggctttcctttctaaccagatccgtcgcctgagatga

SEQ ID NO: 531629 - DNA, 282 bp, Stenotrophomonas maltophilia
atgattgatccactcgttaccttcgtgctgctggcggccatcgtggccgtgtccattggcagcgccaaactcgtttcgtggtgcctcgaccggcgtgatcgtgccgccgtccaacgcgccaaggaagcggccatcgtcgcccaggcacgcgccgaactggtcgccaccggctggaccgctgaggacgaagctgcgtttcaagccttgcagtcgcagcaaggcaagcatctgcgggcgctccgcccggaattccggcgactgtttgaggagggcgcgccgtga

SEQ ID NO: 531630 - DNA, 192 bp, Stenotrophomonas maltophilia
gtgactgagtgcctgatcgttactgccgaacaatggggcgagctgatgcgcgccattgggcagggtttcctgattgtgatgggtgttgctctgttctctcgattcagcctgagcaccatggaatggcggctccgccgttacctccgtcgtcgtcgcattgcgcgcatcaggggggatcgcaatggccgttga

SEQ ID NO: 531631 - DNA, 660 bp, Stenotrophomonas maltophilia
gtgcctcaatcggctgaccaagatcgggcatctttgctggagggctccttggagctcttgggtgaaattcgaggcgcttggattgagatagagcatggacgtgaccgaagatcgacggcggtggcagctctttgccagatgtcccttgatcacgccgtggcagtacactccctgaccgctaccctgccccagtcagcaatctcgctggtccggccgcagtatgaggccctcgtgcgtgcaacctgggcatgtcatgcagctaccgacgccgacatagagaagcttctggcgcccctgactctggagagtcagcaagcggcaaagaggctccctggcgttcaggacatgctcgtaaagcttgagacctctgggccccgaggagcatcacagttactgggcagagctaggcaacgcttgtatgtcggcttgaactcctatctccatgccgggattcaccccttggcaaggcagttgaatggctacccgggctcgcttctggagggggtggtcatgaacagcaatgctcttgccatgctaacccttctgaatctggcccacctgtggccaagtgaaccagttctggcatggatgaatgcactacatcgtcaatttgagggtgttctgccagagctggagccattgcccccctcctcgacttga

SEQ ID NO: 531632 - DNA, 675 bp, Stenotrophomonas maltophilia
atgaccaccaagaccccgcctcgcctgcttaccgctgctgaggttggcgactgcattcgacagttccgccagttgcgtcattggtcgcaagaacaattggccgagatctcgggcctgaacgtgcgaacagttcagcgggttgagcagggcgactcggccagtttcgatacccgtcgcgcactggctcgcgccttcgatttcaatgacatcgatgcactcaacaagccattctcgctgccgacggacgaggaactgcaggtggcgcaagcgcagttcgagcgcgactacatcaccctggcggtgtccccgctgactgcggggcgcgagctggcccgcctgatcgtttcgtgcgacatggatctgtccgaaccggctttcgagctatcgcgcgaggcggcgagcgagtttgctgcactggtcgactactaccgtgagtatcgcgactgccacgacctgtactcagaagtcgacaagctagatatctacgaggagctgcagcagcacattgagacactgcgggagcagggagtgtcactgtttcacggtcagcgtacggtcgtcattcggatgggctcaggtgtgccgatggacgccacggtcctgtacgtggtggcgtttcgcctcggtcaggagtgcagtcagatcgtaactcccaaggcggcacgcattggctga

SEQ ID NO: 531633 - DNA, 780 bp, Stenotrophomonas maltophilia
gtggcctatgtcgttagccaaccgaccctcatttcgccctggccagaactggacaatttcgttcgttcaataggcccctttctcgcgtgcgcgtggtgcgcgctagagcgctcaagaacggctagctcgccggtagccgccgagggattggcctcacaggcgcttgacacccttgctgcactgcgcgtcctgcatcgtgtttcggtggaacgttctcgggatgcagcaaggtcgctgtacgagcctttggcgtggtcctaccggtcgccgtggtcccgccaagacgtaaacgtagaagcggcgttgaccagtgctctgagtcgctgggcggctgattgttctccgggtgtcaggcggagcctgggcgtatcgctcgccgctaccgagtcacgtgcgtacttggcaaatctgctgcgaaagcatcgcctagaaccaagtcttggcgacgggcttacgtcaactgaatcacctgagtggcacgcactcagcttgggacgcaagcgctatgtgctctgggctagcatgcgtaacgctgcgtcggagttcattcaaagcgggttggatgaggcggcggcgcgcctagcgctggaccgcgagattggccggagatgcatctggttggccggccgagaacaagctgggatcttgggcgccaaggatttttgcttcctgcctagccaagcctggcgtcaaccattgatcttggatgtggcgatggagactttcctgccattaggcatcaggtattggctcgaacccagtagcaattggaggctgtag

SEQ ID NO: 531634 - DNA, 435 bp, Stenotrophomonas maltophilia
atgcgcccgaccatcctcgccatggacttagagggaacgctgatctccaatgcggtaagccagatcccgcgcccgggcctctaccagttcttggaatcggcgaagtgcctgtttgatgagctagtcatcttcacaacagtcccggaaccgaaatttcgtcagattgccgatctgctgacttgcgaaggagcagtccccagctggtttggcaacttggcttacacaagatggacgggcccgacgaaagatctaagcaacgcttctgcagacatcggctcggcgtggctgctggacgattacgcaccctacgtccacccaggacaggaacagtattgggtacagatcgagcttttcggctcgccataccaagaagatgacacaggactggacgacgccatggcagcaatccggaagagactgcgtgagtgcttgtag

SEQ ID NO: 531635 - DNA, 801 bp, Stenotrophomonas maltophilia
atgagcaaacatccacgccgcctcatcaccgcggccggaagcagagcaactttcatcctggcaaccgcagcgctgctagctgcttgcggtgggccgactgacaagaagatggttacgaatggaacccagcagcagtaccgggagtctatcgacgctatcgacgcggaactcagtgaccacgaaagagcggccttcaactgggcagtcgctgggatgaaccttgaaaaactgaaccaggcctacccaaacgcttctgtaagacaggtcgtgagagggcaggtcaagcacatcagggatgccaatccaaaggagataggagcgctacgaaaggaggtcactgatcagcttcctactgttgccgagctccagaaggtcactgcggttgataccgtgtttctgatggaagacagcttctttggtccaaagccggtcatcaccgcccgaatcgtcaaccgctcgacactgccattgagcgaggcgagctggaatgcggcgctttacataaatggcgatgcacagcctgtagctacgtcgaaggtgcgcagcgacttccgctccatcgagggcctcaagcccgaccaccatgtaacggctcgcttcactgtcggattcgtcaagggcgaccacgcatggaccacgctggcaatccgtcaagctgcatccactcgcgtggaactggagatgattccagagacagccttggactacggcgataaggcttatctgagcgccaacaaccaggagcgcattgattctctggaacgccagctcaagcaagccgacgagttcgaagacatctaa

SEQ ID NO: 531636 - DNA, 615 bp, Stenotrophomonas maltophilia
ttgagcattctcaacgttcttctgcgcccagatcagctcctagtggcagtcgacaccttggccgaagacgcccaaacaggcaggaagtcgtctggcgccaagctgttgcttattccccaacataacgtggtcctagccgcgcggggaagctcccagttctttctgcgaatctacgagctatccctgcaggccagcttcagggcggacttcaccatggagcagctaagcagagaactcggtctggtcatagacaagctctggccagcctacgagcgagcggcgcttgaggctggcattgagccaaatgctttggcatcagagttggttctgggcggctggtcgtctaaagcgagtcgtatcgttgcaactgcttacgccaagcagagcagcgcggcccccgcagtcgttcaaccgctcgagggcggcctggcttcccctgggcagccgctgcacggcagggagggcagctttgcacccgaggcagtccttcaagccagtcgcatccaggcggcgtgcctcaacaagacaacgggccggcaggtgtcgggtgggcacgtcttggcagccgtcttacgggagaggcaagcggtcatatacgatctcggtccgatctag

SEQ ID NO: 531637 - DNA, 657 bp, Stenotrophomonas maltophilia
atgaacgacttccacgccgctgcccgctacctccgggaactactacccgacatggttggtgagctcgagcgcgggcccagttccaaggcattcaccttgcctcacttcctcgccagcctgttcgacttggccgagattgacctgctgggacaccgggtgctgctggccaacgtcttggtgcaagcggagccgatgccaccttctcgcctgattgcgcatgtgcatcgactagccgagaaggccggcttgagggtcattctcgtgctctcgggcgtgtcaccctacatccgttccaggctcatcgagtatcgagtggatttcattgtgccaggcagccagctcttcgctccgagcttcctgatgagcttgcgcgagcgcgatagctctccatcggtcccactgccccttgggaagcagctgagccatccggcacaggcgattctgatcgccgcactgctgcgaccggactttgaggagggcggcatgcctgggagcgtccagtggtcaccgctcgagctggcacgcgaggcaggctattcgcgcatgactgcatcgcgggttgcccgtgaactggtggcggctaacctggtcagcgccgaccgcgaaggccgggagacgagcctgcggtttctggaaacgcgccgaactgctagatag

SEQ ID NO: 531638 - DNA, 306 bp, Stenotrophomonas maltophilia
atgccgttgcatgatccgccgcatcccggggaatcgctgcgagaagatatcctgccggcgatcagtatgtcgatcagtgcgctggcacagcatctcggctattcgcgcggccagctgtcgacgatcatcaacgggcacgccggcatttccgcagaactcgcattccgccttgagcttgcaggtctgggcaatgctcgcatgtggctcgcgatgcaggcggcatacgatctgtggcaggtcgagcatcgagcgcatccaccgattgcccgcctgtatctggaggattcagtgaggagcggacagtag

SEQ ID NO: 531639 - DNA, 627 bp, Stenotrophomonas maltophilia
gtgctgcgcacgccggtatcctgcgctcctcggtccgtcgagggacggtgcgagaactcgctgcgctcagacacccgcacctcttcgccctcgccggacctgcggtgctcggctcgctcaaggcggacccaacgtcaaaggcaaaagctgcccccagtagatccgcgccatgcgtggatgctcttgctgttgatcttgaccttccagtccgccttgagcgagccgagcatcgcaggggaatcaggggcgaagaggcgccggtgtttgagcgcagcgagttcggcgccgtcccctgattctccgagaagcacagggaaccgtcgcgtagcgacggctcgcggctggcggagcgtttctttggttactttctttgcgcgcaaagaaagtgacacccctccgcggtcgcggaaacgactctccgtccgcgcaaacgaaaacggcaccctcgcaggtgccgtctccatgaaccgctttacacggaatctcagaacttcgcgtcgaactccgccgcgtagccagtgttcaccagcaccttctgcagcgactcggccaccttcaggttgccggccacgatctggtgggtctccggaccacggttgtccatgcggcccagggtcgcgcccttga

SEQ ID NO: 531640 - DNA, 654 bp, Stenotrophomonas maltophilia
atgggtagcaagaagtacggattgcggatatccgacgacgatggaaacatgatgattgaggttggatcacatgttgttgccgagcttccaggttttgcggaagcaataggcactattgcctcgaactgggctcaggcggaagtcaatctctactgcctgatcgcggttttgatgaacacaacgccggagctggcagagaagaaagccgcttcgtacgcaatcgcaaagagtgcaactgccggggcacggaggatcgcagccgagcatctgactggatcggagctacaaggtgtcaatgaggcactggattcgttggatgctgtgcgtcccctccgtaacagggtgcagcacgacacttgggggcgaaagtcaatggatagcggtcgcctctatcgaattcaccgcaaccagtaccttgcattcactctgaagttgctggacgtgcagaagatgattggtacgccagccgaggcaggggcgaaagaaagcgcctggaacttcgtggaagagatatccgagggatactcgatttctgaactcgaaaggattgccgaagatatcgatgctgctagcaagctcctgctgggggcaatgtttgtcattagggctcgtcagttgaggacatcaccccaagtttggccttgcgaaacctga

SEQ ID NO: 531641 - DNA, 384 bp, Stenotrophomonas maltophilia
atgaccagtaagcacacaaagagcccgtggaacattgaaatgaacaaccaccacaccgggagcattgcaacggtttatggatgcaccgatggctacgcggacatttggtccgagagctgggtagataccggcatgcccaaggaagagcacgacgccaacgcccgcctgatcgccgccgcgccggatctgctggaagcgttgtccaaggcagttcgggagacggagcagttccttttcgacgcttggctggtgcgcgtctgccccagcggcgacgtcgaatccgtccagcaccaatggctggcaagcagtgaccaccgcgagttctttgacgaatggcgcgagcagatcgacgccatcgccaaggccacaggagaaggcgcatga

SEQ ID NO: 531642 - DNA, 126 bp, Stenotrophomonas maltophilia
atgcgctttctgaccgccatcggctgccgcggctggcgcgacttcgccgccttcctcgcctgctacgccatcaccgccgcgctcgcagccgccatgtgctggccgctggcgtggtcctggtcctga

SEQ ID NO: 531643 - DNA, 246 bp, Stenotrophomonas maltophilia
atggacgacttggagtacacgacgcggctgggcggatacatcgccgcccaccagttactgatcgtggacctgtacaaaaaactcgacctcggaccagggcacatagacgcgctcaccgatcgttaccggacgctggtggcggcgaaggacgccttggctggccacacatcggacatgcactggactggcttccaagccgcgatggacgaggtgcgaaaggccctcgcccacaagcagccggaatag

SEQ ID NO: 531644 - DNA, 351 bp, Stenotrophomonas maltophilia
atggaacctttcaataatcagcttttggagctctttgaaataggtgtgcacctcactgggaacaaccgcgacgacgagcttcttcagagagccctgactgcaaccgagatttccaaggaaatgcgcgacgcgctcgcggttgggcacgaattcccttcgctttccgacagccttgtgaactttgcccttcgcctcagttccgcccggtcgagcgccgtttccacctccaactctgcttttgcgcagtggcatgaaggcaacgacccattcgaactggcgaagacgatagaagccgcagtcgaagcgggcttggcccttggcaaggccgtcgatgaggtactcggcagctga

SEQ ID NO: 531645 - DNA, 216 bp, Stenotrophomonas maltophilia
gtgaagctgcagctgatcgacaactggcgcaaggcctggaagctggcctcggtctgggtgttcggcctggtgactctgttccccgacgtgtacgacgcgatcgcggccatgggctggatggacgagctgccgaacccggcgaagtggtccatccgtgccctgggtgccatcggcgtcatcgcccgcgtgctggcccggaggaaaccaccgtgctga

SEQ ID NO: 531646 - DNA, 435 bp, Stenotrophomonas maltophilia
gtgctgatccccgatcccgtccggccctacgtgggactgatccgcgtgggcctgtgggcgctgctggcctgtggcctgttcgtggccggctgccaacgtggcgaggacaaggccgctgccaaggccgaggccagcatcaccaaggccaacgagcagcgcgacgaggcacgcaaggacgccgccgagaacctgcgtgcggccaatgcctgcggcgagctgctgaaggaagtgaaccgccagacccagctggccatcgacgaatccgcccgccagcagaaggcagcccaggaggccgcccgtctggccgaggcagcagcagcccagagccagcgccgcgccacgcaggccgagcaggccctgcaggcggccaagacccagccgggatgccggcagcagttggagcagaccctatgcgacgccattccgttgctgtga

SEQ ID NO: 531647 - DNA, 204 bp, Stenotrophomonas maltophilia
atgtgcaactccgcccccaaggtgaagccggtcgccgccccgcccgaggtgggcgcagagtcgatcgacgacgccgccatcggcgagcgcgatcgcgagcggcagcgccagcgtctccgctacggccgcacgtccaccatcctggctggcgacaccagcgcggccatgccgaccgcctcggtcaagacggcactggggggctga

SEQ ID NO: 531648 - DNA, 261 bp, Stenotrophomonas maltophilia
atgtgcacctcgcgccaggtgatcgacccgggtggcctgctgttcggcgacaagacggccaagtacgccgacccgctgggcatcaccaagaccgccgtgggcgacccgaccggccgcgttcgccgtgcccggcaggaggccgaggacgagcgcaagaccttccagcgcagcggcgtcacctctgtggcctaccgctctgctgcacctaccaccgcgctgggcggcaccaccccgcgcaacaccctgctggggggcggctga

SEQ ID NO: 531649 - DNA, 360 bp, Stenotrophomonas maltophilia
atgagcaggcctggccgtagtccggaagacgacgagcaagaacgccgggagcgccagttggccgcgctggagctgcgccagctgcgcgaggacgtccgcaccgtcctggcggaccccgtaggacgccgtgtggtctggacgttcttacaggccatgggcgtggacatcagtgcgttcaacaccaacgccatggcgcaatcgcgcgccatcggccggcaggaggccgcccagtggtggctcctggccatccgcgacaactgtccggagcgcgaggcacagatgcgcgccgaggccaacaatcaactgaagcggctgctttcacagctgcagcaaccagaggaaaccaacgatgtcgactga

SEQ ID NO: 531650 - DNA, 1176 bp, Stenotrophomonas maltophilia
atggcacgcatgctgcaaccgagcatgtccggcggtgagcttgcgccgggcctgcagggccgcgtcgatatggtgcggttcgccatcagcctgaagacgtcccgcaacgtcatcaccaagcccaccggcggcgcggccaagcggccgggtctgatcttccggggcgaggtgaagcactccgaccgcgacacccgcctggtgcccttcatctattccacggtggtcaattacctgatcgagatgggcgacggctacctgcggttctgggtggacggcgcgctgctgcgggacggtgacggcggcatcgtggaggtggccacgccgtacaccggcacgatgatctacgacgtgcggttcacccagtcggcggacatcctctacctggtgcacccgtgggtgccgccgaaggagctgcgccgcactgcggccgacagcttcgcgctgcgcgacttcgtgttccgccgcgggccgttccgaccgttcaacacagacgaggccgcgctgctggccgtgtcggccgtgcagggtgtggtcaccgtcaccaccaacgtggccaccttcaccccggaaatggtcggctcgctgatctacgccgaggaaaaggaactgcgctcagtgaagccctgggtggctgccgagaagaacgtgccgctcaacgccctccgccgcagcgaccagaaggtctaccgcgccgtgagcgtgcccagcaccgccggcctgagcggcgatgacccgtattacgtctgcggcagcgtgcgccccgtgcacgacgtgggccgggccttcgatgggccgcaggacgtcaaggacgacggcgtgcaggagtacgtggtgggcgtggagtgggaatacgtgcacggcggcttcggcatcgccgagatcacggcctacaccagtccctaccaggtcaccgccacggtgatcgagcgcatgcccgacagcatcctcggcacggcgccgccgccggtggccggcccgtggaccttcgatggtgacggcaccaccaccgagttcagcatcaccggcgccaccagcgattcctacttggactaccgcgtgaccatcaacggcgtcccggtccagtccaatccgttttaccccggcggcagcggcaccggtggcaccaacaccggcggcatcggccgcggcaactcgaatgcgcaggaggccatgtaa

SEQ ID NO: 531651 - DNA, 1677 bp, Stenotrophomonas maltophilia
atggcacagggttggaccatcaacagggcgggggagaagatcaacttcttcgagccgccgccgaccggcaccggcaacgtggtcgtcacccagtacgcggcaggcgctgtgggcggaaccgacgtctgggccgtgggcgccttctcctaccgctacggctaccccggcgaggtcgagttctacgccgatcgcctgtggctggccggcacgcctggcgatccgcagacggtgtgggcgtcgaacatcggcgattacaacaacttcggccgaagctcgcccatcatcgacagtgacgcggtgtccttcaccatcaacgcgcgccaggtcaacgcgatccgcgacctggtgccgctggacagcctgctggtcctgaccacgggcggggaatggaaggtcaccggcgggcaggacgacgtggtgacgcccagcaccatcggcatcaagccgcagtccagctatggcaccggcaacctgcaggcgcgcgtcctgggcgagtcagcgatcttcctgcaggggcagggccagcgcgtgcgggatctggcctatcagttcgagaaggacggcttccgcggcaacgacctcagcatctgggctgatcacttgaccgagggctacagcttccggggcatcgagttcagcacggcgccgtggcccatcgtctggctgccgcgcaatgacggcgtgctggtgggctgcacctacctgcccgagcaggaggttaccggctggcaccggcatgacaccgggcgcgacctcaacgaccccaccgtcggggatggccaggtgctggacgtgtgcagcctgcctggtgagttcgagacccagacctacgccctggtgaagcgcgtggttaacggccagaccgtgcagtacatcgagcagctggcgccaacgcgttacgacgatccgctcgactggaagtacgccgacagcctgctgaccttcgatggacggaacaaggcggggacgaccatcgcgctgtcgaccgccggcggctggaccgagaacgacacgatcacggccaccgccagcgagccgatctttgccggtgctggcgacgtgggcgacatcctgctgatcacggccggcagcgaccgggttcgcgtgcgcatcgccgcgttgacctcgagcacggtggccacggtcgagtcgattggggaggtgccggcatccctgcgcggtgtcccgctgcaggactggaccttccagcgcagcacgatctcgggcatggaccacctcgaaggcaaggccgttgtagcgctggtggatggcaacgtgcagcgggatctgcaggtggtcgacggcgtggtcgagctgcacaggcctggcggtgtggtgcacgtcggtcttccgtatgcggcccacatcgagaccctggaggtcaactcgaacggcggcgaccccctgcggccgatgaagaagctgatgttcgaggtggcgctgctggtgcgcgaaacgcgcggggtctacgtcggcacgaccatggacacgctggacccgatcgcacagcgcgacttcgaggactacgacgagccgaccaaggcttacaccggcgtgatccggaagaacatgagctgccgctggggcgtggatgctggccacttccacatcttcagcgacgacccgctgccgatggagatcctgtcgctgatgccgcaggtggtggcgtcggaatga

SEQ ID NO: 531652 - DNA, 504 bp, Stenotrophomonas maltophilia
atgcgctcttccaacggcttccgcaccgcccctatcccctctggctgggtccagaccggcgagcgctgggcgctctggtacaacggccgcgagacggccagcgtcacgcccgacggtggtcccggggtccggctatggatggaaggccagaaaatgtggcaggtcaaggaagtccgcgcggccaacgtccggcaggcgaagcggtacgctgagcgctggtgtgcggccaggctctatcccgatctgcccctgcgccaggcagtcgcccggctgaccgacagcaccccgacccagccgccaccgccactgcccggcctgccgccgacccgcgagcagcagcaacaggcccggcgtctggccgaggccggggcgaaggaaatcgagcggatcaaggcggcgctcgaaccgcgcaagccgccggcagagacgaaaccccgagcgagggacgcccgcaccaaggcgtgggtgagggcagggctgcagcagctgcggcggggcgtgtag

SEQ ID NO: 531653 - DNA, 303 bp, Stenotrophomonas maltophilia
atgtttgagctcctgcgttgttcagtgaccggcctgcgcagcatgcgcaagactctctgcgagcgcttgaagttgctgctcgcggttttgaatgagttgattgagcgtgtggcgctcctgacgggcaaggtcagccagggcaacgatgcgttgctggtccgccagcgagggcacgcacagcgtgagcgattccagtacggggcggcggatactcaactggctgctgccttcagcggcttgctgaagctgacgctgaaatggcggttggtttatttgccacgccaggaaagcaggcagcaatag

SEQ ID NO: 531654 - DNA, 1809 bp, Stenotrophomonas maltophilia
atggatgagattaaggaaactcaaggcgttccctctctttcggcaacacctgcgagatttgaggttgtctttacggacgatgcgagcaaccctctaacgctcgtgtcgccgccattggctgacatcaatgagatgcagatgctgggtgagaattcattctcattgaaagtcgatggaaatcacaacgaacatcttcgcgaatctgcccaggctcatctggcatcgatgcttcagaagttcgataggttcaaatattcagcgacattccataaccggttggcgaacctccactctatccttggaaatttagttgaggagtccgcagccgttcgtgcagcgatagatttggaagattcggcaattttttctcgcaagcttggcgaggtttcggctcgtcaagggagaattgattctgcgaaagagatactcgccaaaatcgctggtgaagattccattgcttcgctgaggctggcggcgttcagtgttcgcgaaggcgatttgaaggcagctaagtactggctaactatagcgttggatgtcaacccatccggctactcggaaagattgttccagggagctctattcatcgtcgagcggcggttcaaggaagctattggaattttgaagattgcggtggacgaacggccaaattcttcagtggcatactgcaatcttggcctggcatatcttggtcttggtcagattagacaggcgtcaaagtgtttgaagagatcaatttctctggatccattcaatcgaaatgccctgttgctatatgcggatattaatgctcagcttggtttggatgacgatgtaattcccgtcctccgatattttactgaatttgagcaaaaggacccggcaatctgggagcgccttgctagatccctgctgaaagttgggctgatagacgatagtgttactgccctgaagtgccaaggcgcagtcaatcccacagctggtgtctggaacaacttgggagttgcgtatgcgcgcaagaaggatcatgcgcgagcgcttcaggccttcaagcaggcacttcactccgaaagtgaaggcggacttgcacttgatctcttgataactcggaattcagcccatttgctctcgtccgtcgggcaatacgagcaggcgcttgcgattacttctcatgtaattgcacaagatcaagattatgatcttgcgggagattctgagttctgggatatatactcatctcatgtgaattcactaattaagttgaagcgttttgatgaggcgtttgaagttaccgctaatttaatcggcgcagaaagaatatcaagtgacttggctgtctggattgcctccgctgaagccgcgcatttgggtgtaaacagaaataatgacgccaggctcgccagtactctttactggtttaaatctagatgtcctgactattttgttaatgacaaggtcgctataaataacatcgcattcggcttcgccgagattggtgcgttggatgatgcactaaggctaattggccatgtatcttcatacgttcattttgacccctatgtgactgcaacaatggggttgataaatatgaggaggatgaagagagagaaaggggaggctctctacaaggaggcgattcatctggctagacggccgtttgacaagtctaggatacgccaaaaaatgaatattgagattgctaaaacctatctctctactgatgtgaaaaaggcagttagatacttgggcaaggcttcaggcgagaggttgggagaggatgttttgcggcggcaagcactgcaattggccaaagttatttcacgtcagtag

SEQ ID NO: 531655 - DNA, 1179 bp, Stenotrophomonas maltophilia
atgctgcacggaaatagccagcttcttgttgatactcttgaatccctcgagttatttgaaaatcgctattcaaatttgcagctagttaacgtgccgatatcgggcccaaagcgcggcttcttctctctcatttttcgcgcaaaggatgagttaactggaaatgaagttgccttgaagttcttcgatctggatcccaacaaggcggatgtttatcgaataaagagctttgagagagagcatgaaattctaaccagactcattggcgcacccaggtgtcttcaggttctttcaaattttaatacttacaatctgcaagccgccgtttcaggtgggattgtcatcactcttccagccagttactttgcagttgattggctcgatgatgatatagatgagtattttcaaagccagggcaccaagcctgcgatcgagaagctaaaaatattcaatgaggtagtgcttgctgtggagagccttcattcaaggggggtttttcatcgagatctcaaggctgataatttccgggcccagcaacgaatcgatggtcgtgaagtagtcgcgatcgacttggggacagcggctcgctacgactccgcaccaatttcgtccagttacggtggaccagttggaatgttgatgtactctgctccagaggcgttctgtggattatcgggcgcacgaacggttgcgccgttgagcgacgttttcgctctaggatgcatgctgttcgaattatttcaccatgatgattttcctgctgcatttaggcgggtcaattcggactttgacgttaggttcgcagctctccgatcgaaagttgggtcggaggtttcagtggaagctaagttgaattcttggtctcgagaggcgcccaaattgcttcatggattgagtccagtcactcttagtggcgcaggctcaagtgctccactgtgcattgcggatattcttacttcgctcgtcggtagaatgacggtcccggattttcagcagcggaccatcagctttagaaggattcgtgaagtttcctggaatgcaatacgtattattgaaaatcaacagcttgccaagagaaaagcgaagcaagctgcagataggagggccgcgagggccgcaaaagctgcagctcgcgctcaacgcgttatcgggttgcggaatttggactcggcgagggtgtga

SEQ ID NO: 531656 - DNA, 846 bp, Stenotrophomonas maltophilia; identical to SEQ ID NO: 162920

SEQ ID NO: 531657 - DNA, 1263 bp, Stenotrophomonas maltophilia
atgtctgactttgtgaccctgggtgggcacatcatcattcaaaaaggaaaagcaccactggcaaccggctattccgggcctggggccgagccgtacctcaatcccgagtatctgcgagggcgagcgagtgcagaacttgccgagccaggacctgatgcagttcgcgcacgccatggcgatacgattctactgtgggacggttcaaatgccggtgagttctttagggcgaagtccggattggtcgcttccacgatggccaagataacgccaagcgcaggtttcaatccggcgtactttttccatgccgtaaagcatgcggaatcctatctgaagggccagacgaccggcaccgggataccgcacgttgaccgagagttgctggaggccattcgagttttttgccccgcgcctgcagagcaacttcgagttgccgagatccttgatcacctcgacaccgccattctccaaaccgaggcgatcgttgccaagctcaaggccttaaagaagggccttctgcatgacctgctgacacgtggcatcgctgcaaacggcgaactgcgcccaccccagtccgaggctccgaatctctacaaggaatcgccgctgggatggattcctagggagtggcatgtcaaccagcttgaagaattgcttgccgacgttgatccagcaatgcgtgctggaccattcggcagtgctcttctgaaggaggaattggttgaggttggactcccgcttcttggaatcgacaatgtccacaccgagcggtttgtcgccacgttcaccagattggtaactccgaggaaattcgcgcaactggagcgttatgcggttcgccctgaggacctgatgatcacgatcatgggtactgtcggaaggtgttgcctagtcccaaaagatattggcaaagctctttcttctaagcacacttggacgatctctctgaatcaagaggcctattcaccttatttggcgatgcttcaggtcaattactcgccttgggtgctggggcatttcgctcgagatcaacagggtgggacgatggctgccattcgttcagaaacgcttcgatctactcggtttccagtccctccgcgtgaggagcagcgtctcatggaagatcgccttcgggtgctcagcaagcgtatcgatctggagattgattcgctttcgaagcgccattcagagagggccggcctaatggacgatctcttcaccggccgagtccgcgtcacaccattgctggtcgaagctgcccaataa

SEQ ID NO: 531658 - DNA, 1068 bp, Stenotrophomonas maltophilia
atgtcatgggggtgccggccagcggccggcactaccgtgtggggaattgccgaagccggtggttggtcgtgccggccgctgggcggcagatgcgcaagcgttccgacgtcatgggggtgccggccagcggccggcactaccgtgtggggaattgccgaagccggcggttggtcgtgccggccgctggccggcggatgcggaaacgttccgacgtcatggggtgccggccagcggccggcactaccgtcttgggaattgccgaagccggcggttggtagtgccggccgctggccggcagatgcgcagacgttccggcgtcatggggggtgccggccagcggccggcactaccgtgtggggaattgccgaagccggcggttggtcgtgccggccgctggccggcggatgcggaaacgttccgacgtcatggggtgccggccagcggccggcactaccgtcttgggaattgccgaagccggcggttggtagtgccggccgctggccggcagatgcgcagacgttccggcgtcatggggggtgccggccagcggccggcactaccgtgtggggaattgccgaagccggcggttggtcgtgccggccgctggccggcggatgcggaaacgttccgacgtcatggggtgccggccagcggccggcactaccgtcttgggaattgccgaagccggcggttggtagtgccggccgctggccggcaaatgcgcgaacgttccggcgtcatgggagtgccggccagcggccggcactaccgtgtggggaattgccgaagccggcggttggtcgtgccggccgctggccggcaaatgcggaaacgtttcgacgtcatgggggtgccggccagcggccggcactaccgtgtggggaattgccgaagccggtggttggtcgtgccggccgctggccggcagatgcgcaaacgttccgaggtcatgaggttgccggccagcggccggcactaccggtgcgcggagtcggcgcacggcggtgggcgagggggcctgaatcagggacaatagcgtccccgccgctccacgcctgcccccgatga

SEQ ID NO: 531659 - DNA, 681 bp, Stenotrophomonas maltophilia
gtgttctacgtcagggggctgaatggacaccatgcggtcagaacttggaaggtggcgatcgccgcatggctgctgctgtcctctgccgctgcggcgcaggacgctgttcatgcctacgacatcccggcgcagccgctggaacaggcggtcgagcgcttcagcgtcatcagcgggtggtcggtgatgtacccgggcgaccttgccgccgggcgcagcagctatccgctgcacgccaacctgccgccactgccggcactgcgggcgctgctgcaggactccggtatcgaggccgaggtgatcggcgagcagcgtgtggtgctgcgccggggcacgcccttggcgaccggccccgacgttggtgctgaactccctgaggccgagcgtcggcgtcgctacggtggcctgcagcagcgcctgcgtgcggcgttctgtgacgacccggagatcgcgcccggccgctacgctgccacgctgcgcttccgcattgatcgcgaaggccacgtgcgcgagcccgcgctgctgtccggcagtggcagtgatcgccgcgatgcacgcctgctgcaggcgatgcagggcctgcagctggcgaccggggccgccgcgctgccccaaccggtgacgctgcagatccgtccttccggcaccggccacgattgtggcggtcgctcgccccttccatga

SEQ ID NO: 531660 - DNA, 912 bp, Stenotrophomonas maltophilia
gtgccgttcagtgcgccacccactgcactgccgaccgtgccgacggtgccgttgagtgcgccacccactgcgccaccgacagcaccgaccgtgttgttgagcgtgccgcccactgcactgccgaccgtgccgacggtgccattcagtgcgccacccacggtgctcccgacagagcctacggtgccgttcagtgcgccacccactgcactgccgaccgtgccgacggtgccgttgagtgcgccacccactgcgccaccgacagcaccgaccgtgttgttgagcgtgccgcccactgcactgccgaccgtgccgacggtgccattcagtgcgccacccacggtgctcccgacagagcctacggtgccgttcagtgcgccacccactgcactgccgaccgtgccgacggtgccgttgagtgcgccacccactgcgccaccgacagcaccgaccgtgttgttgagcgtgccgcccactgcactgccgaccgtgccgacggtgccattcagtgcgccacccacagtgctcccgacagagccaaccgtgccgttgagggcaccgcccactacgccaccgaccgcaccgactgtgttgttgagcgcgccacccaccgtgctcccgaccgcagcggcagcgccctgcagcgtgccgcccacggcgcccacggcgccgcccaccagattgccaaccccgagcgcactgtgctgcgcggcgacggccgtctgcccagccagcttcaggttgcggtcggcaacgacttcctggccgtccggcgcctgcacgcgcaccttgccggcggcgccggtgtcgaacgcggcgctgatggcacgatcgtgggtttcacccggcaactcttccttggccggcaagcggacggccgccgtcgctctggcctggccttgcccgtcgatgtga

SEQ ID NO: 531661 - DNA, 2244 bp, Stenotrophomonas maltophilia
atgattacatctctgagtctggcggatgttgcaacttatccgtctacgggtgttcatatagggcctctagctacatgcaattttgtttacgggccgaatggttccggcaaaacaacgctatcgcggtatctcgccaatcagcaaggtgcccaattcggcacttgctccatgacgtgggcgggaggtcgggcaacgaagatagcggtgtacaaccaggaattccttcagtcaatctttagcgaggatgggagtgtcaaaggcgtatttactcttggcgtcgaagacaacaacatcaaagatcggatcagagaactgaccgaagaaatatctgaagaacaacgtgaggagcagcggctcaccaccacactggagggtgacgacggcaaaggcgggaagcgtgcagaaatgtcggctgccaccaagaagctcagggatgcatgtctcgtccaaacgcgaaagcacaagggtgtgttcaagatcgctcttaagggtgttatgggagacagtgaggtgttccgcgttcgattgttacaggagcgatctagtaacagtggcgttgctcatagcttcgacgaccttacagcgcgggcccgaacggtattcgtcgcagcacctgagctggtctcgcctcttccctctacgcattccgcggaacttaaagcgctagagagcgatccactcttcaagaaggtgattgttggaaaagctgaggcaaatctagcgggcctcatcaatcatctgaagaattctgactgggttgctcaaggcgctgcattctttgaggaaagtaagccgaagtgcccgttctgtcagcaaacggcaccgccgacacttgagcgggatcttgccgatttctttgatggtgcgtttgcggtggacgtctcaacccttgaacgcctcgttgataggtgtacaagcgagatggaccggattgtcgaggtgatggataacctacgctcggcctcaacggaataccatgacaaggatgagcttgaccgactcatcgaaattttcgatgcgaggcgcgaagcggccctgctggtgatgcaaaggaagcttgagcttcctagtttggtggctgatctgggcgacgtcacttccgcgctggatgtggtggtcgacttcgtcgcagcagcaaacctgcgcatcggtgaacacaatttgctcgtgtctcgcgcgtcaactgaaaggacgtcgctgacggctgacttctggcggtacttgcttgatgtcgagctaaaggctgaattggatcgttggggtgcggcggaaagctctgttgggcgtgctatcgaatccttgcagaccaagattgcggcatcgaaggctaagcagaagcagttaaaagctgagctgcggggcctagaggagaaagtgacgagtaccggccctacagtagacaggatcaatgagacgctacgggcttttcacttcactggcttcaggttggagccggcgcagggtctacacagctatcgcctcgtccggtccaatggtatggcagcccatcacagcttaagtgagggcgaaaggacgtttgtcgcgtttctctacttttatcatctctcgcaggcggccgattcctctactgggatcgaggaggctcgaactatcgtacttgatgatccaatttcaagcctggatagcgacatcatgtttgtcgtatcttccctcgtacgagagatggcggatatggctcgaagcgggaaggggcccatcaagcaaatcatcctgcttactcacaacgtctacttccacaaagaagtgacatttgcaaagggaggtgggggtcttcctgcgtcagcgttctgggtgtgccgaaagagaggtggagttacgagctttattgctcatcagaacgtcaatccggtcaagagtagctaccagctcctatggcacgagatcagaaagcccgaaggtaactctctgactcttcccaatactatgcgtcgaatcttcgaaagttactttaaacttctcggaggatttgacgttgacaaggcgtgcgacggccttgtcggcaacgagaagcttgctgcccgagcactgctatcgtgggcgaacgacggatcccatgccgtgcatgatgacctctatatggttccggatgagtacgcggatgcgttgtatatgagcgtctttcgacgtgtcttcgagaaccttcagcaaagtggccactaccgcatgatgatgggggaagactttaaggatgaaccagatcagcgaaatgaaggggtcaagtga

SEQ ID NO: 531662 - DNA, 282 bp, Stenotrophomonas maltophilia
gtgaacgattcgctcattaccttcgtgctgctggcggccatcgcggtcgtcttcatcggtgccgctcgcatcgtgtcgtggctgctggatcggcgtgaccatgccgccgtccagcgcgccaaggaagcggccctcgtcgcccaggctcgtgctgagctggccgcaaccggctggaccccgagccacgaggcgctctatcaggccgaaattgccgccaccaagcgcggcgatcttctggccgctgctcgctacgccgggcagagggagacggcccatgtgtga

SEQ ID NO: 531663 - DNA, 1329 bp, Stenotrophomonas maltophilia
atggccgtgcctaaaggcatcacctgcgaggatcaaggcgaggcaaaggcggcggtttccgcattgctcagggccaagcttgtcgatcgatcaatcatctgctggaaccctgaggtagggaagagcatttcgggctatgtcacccatacagggccgtcgcccacttgtgatggcggagcggcatttgaggccgagcgaagttggtccaacagctgtatgacgcgcctggacggcgatgccgggatgattaacggcacgctctattcgggcggcgtgtgcaacaaagggtgcaagatggccccgaatctcgatcccggagttgatttcacgctaagggagggaagttcaaatgccatttcaattcgtcgtggcacttggaaggccacgggcgacacatgcgataccgatttgccagcccagccgcagaagaaggaccagtactgccatcaggctggtaactacacggtctgcaagtcgaaggatcagacctgtatcacgaccgcgagcggattccggacttgtgcgagtgacacagctaacacgaaaggccacaccgccacgaacaacccgcgtaccgaggcagcgagcatcagtgcgccaaacactccaccgaatccgccgaccaatcgccccggcgaagattggaagcccagcggcggcaccacgaacatcacgaacaacaacaacggcaacactaccaatacgcagaactacaacaatcaagggacgccgaacggcaatcagccgacgccgggcgacgggtctggccccggtgctggcggcagcaacgggaatggcgaggagggcgagggcaacggcaatagcgccagtggcggcggcgactgcggggctccgcccaccaccagcggtgatcccattctcggcatgatcgcaatgcagacctgggcaacgcggtgtgcaactgaaaaggcaaactccgccaaggtcacgggcgatgttggcaactgtgaatcacccttcgccgtcgagggtgattcgatacaggcgaatcagcttcgtgcacaacgcgcgcaactgtgcggcggcaagcccggctcgggtgaggggaccagtggcgaccctcatgaaggtgcggaggacgtggacggccccggcaagtggacttggaagtttgacgacaagctcatcgataagacaggttttggcggcggcagctgcccccagcttggaaccatcgacttcggcaggttcggcacggtcccgctcgatgggcagacgtggtggtgtccgctgatctcagcgctgcgtactgtgatgcttctgctgggcatgttcatttcgttccgcatcgtgtttggagattcgtga

SEQ ID NO: 531664 - DNA, 309 bp, Stenotrophomonas maltophilia
atgaagagctcctgttttgcagaggagcagattgcctacgcgctctggcaggtcgagccgaggacagcggttggtgaaaagggcgttgcggaggcgacgttctatatgtggcgcaagaagtacagcgggctgagtccgttcgagctcaagcagctgcgattgctggagaaggagaactgcgagctcaagcagttggtggccgatctgagcctagacaaggcgatactgcaggaagttgttacaaaaagctctgaggcaagcccagtagcgtgtctggggggggggcgggctgcagaagcgatttggtag

SEQ ID NO: 531665 - DNA, 447 bp, Stenotrophomonas maltophilia
gtgggtcgttcgtcgcttctaaccaagtcgttcaacatcgctcccgatgagttggagagcgctcggtatttagcgaaacagcaaggcatttcgctaaatagatacttgcgcttggcggtcttggaaaagaaccggggcgtggtgcaggggctggaggcccgcgacgccctggatgacatccgagccaccgtccgcgactttgaaacccggaatgccatggcgctggaaagcctcgtggcggacctgcgagccgagcaggacgcggcgctccaggacaaccggacgctcatcttcgaaacgctccgagggtttagccacttcatcgccgaacaacaggccgaccacgaagcccccgccgagccgccagccgccaagccgcatcgcgggccgtcccccaccccttcagacaacagcgcggattggcgacgtcacgccaaccgctcttaa

SEQ ID NO: 531666 - DNA, 1524 bp, Stenotrophomonas maltophilia
atgctcaagccgatcatccagaacgaaggcacaaccgcccgagaacgtcatctagccagactcgcatctgaccagttctttgggttgtggtcgtatcctgggctgacgcgcccagcaaagaagggcgtcaacaaggagctggccgacctaacagtgatcttcggggatgacatcatcctgttctcggacaaggacattgcatggccgtcacacccagacatacaggtcgcatggagccgttggtatcgcgaatccatcctggcttctgccacgcagctgtggggcgctgccaagtacctccgcggaccgaatccagacatctacctagatgccagctgccaattgccattcccgttgcccgctttatcaagtcgaacgcggattcatctagtcgcagtggcagccaatagcactctgccggctcgcgactacttcagtgagatcggcggtcccggaagtagcggcacgctcgttcatgccttcggcttgcccgacatagtggacggaaagcggcccttcgtggtgggcgacctggatgtcaaaaagccctatatccatatcctagacgaagagtgtctcgaccgggtgctgagagaactaggcacgatcggtgactttgttcactatctcaccgagaaggaagcagctatccgcagcggacagctgcggatgtacgacggtgaggaagacctgctggccttctacctccaggaagcgcttcccaatggatacgggtgcctaccctttgcccatcagaagcttagtcctcacgactggatcaggattccggagggggagtggcgggcttatgaaagctcacccgcctacaccgtgcgtacgcgcatgaggcagctggcgcgggagtggcatgatctcatcgcccccttcagcacagcggtcctgaccgccgatactggcgaggccaacgacacccctttgggcatgcatgaagtcacgctacgcattgcagcctcggagaaccttgcgtcgcgcgcgcggctcggaaccgcgttctccgagaagtaccggagcgtacctcccggagcgcggagctcaagggcagtggcttcgtcatgccaccccgggcggatttatcttttcgtctttgttccttggattacgcaccaggcgacctatgaagagtaccgctcgtatcgcctttccctgatgagagcttacgcaaccgttgcgcctctcaactttgaagatgccaccgagttcgtcatccttggcgcgcagactcgggatgctacagggggccgctctgaaaccatgatctatgtaaggtacgacggccctcttgaagcagagcacatcgccgaggcccaagagctgatggaatccgaagcaatcctggcggacatgccgacgcagatgactcgcaaaaagcggcttcagtccgagttgccgcgtcgctattctcgtaatgaaccatgcccctgcggctcactcaagaagaacaaaaggtgctgcaacatcgctggccctagatatgggaaggtatatgcagcagggatcacctag

SEQ ID NO: 531667 - DNA, 510 bp, Stenotrophomonas maltophilia
atgaaggaccaacgcgcgacggaatttcctaccgatactgacttcgagctgctggcggagtcacttcataaggatattgggttcatcgatttgatttctagattcatcaggccgtggccgcacctgcaattcgcagagacggttattgccgaggcggacgaggcgtggttgttgcaggggggctaccagccgactcgtgcagcgcagctacatcgcgctttcctggatgcccaagagcgcgaagcgaatgagatcgaagccgatctcgcatcgcgcgatcacaatcctacagaactcacggatctgggggcacgactggcaaggatacccgaggtcaggcgccataccatcgaggccaagatcaaggaacagagagacgcgtgggaggcgcaggcggcacttcaggcaagtttgactaagccgctgagccaaaagattaaggagcagagagcggatcagtcttcgaaagatgcacttggccaatcgacttcgaccaagcgcaccacttag

SEQ ID NO: 531668 - DNA, 570 bp, Stenotrophomonas maltophilia
atggaaaaccagacgaccgacaccaagcagaagatcctcgcgacggccgagacgctgatctaccagaacgggatacatgccaccggcatggaccttctagtgaagacctcgggtgtggcgcggaaaagtatctatcgccacttcgagaacaaagacgaggttgctgctgcggcgctgaacgcacgcgacgtgcgttggctggcctggttccagaaggaatgtgacaagtccgatggccccgaggcgcgaatcctacgcatgttcacagtgctcacgggttggttcaagtccgaggggtaccgcggctgtgcgttcatcaacacggccggcgaggttggggatcctgaggatcctattcgcaggatcgccagtcatcacaagcagaagttgctcgattacacgcttgaacttaccgggcagctcgggatcgagcagtcggacacactggcacgccagctgctgattctgatggaaggtgccatcaccgtgtcgcgcgtgatgggtgattaccaagcagcagaaaacgcaagggatgtcgcacagttgttgctgaaacaggcccgccgctag

SEQ ID NO: 531669 - DNA, 2070 bp, Stenotrophomonas maltophilia
atggcaggtaaacggcagcactacattccccgcttccttcaacgaggctttctcgcctcggatcgagaggaacgtgatggcgaatgcacttggtggcacttccgaggtaatcctcctcgcaaactagctattagccacgtcggcgttcgagagtacttctactcaagggctgctacgaacggcgagcgcacactggacgacgtaattaccgatcaggagtcacgtgtgcagtcggacctgcagtatgcgcgcatctcactggcaggggatcggctcgacgccgaacggatcggcgcacttgtaactcatctggttctcaggaccgcgtacattcgctccgccttgggtgacgcaggcgaaaagattacacaagcgatgctcaacagcgtggggagcccggctggccttcgcaaactgctagacgttgatgccccagctccaactgctcaagtgcgagccataacttcaggtgtggtcgagcgcttggaagcagagggccacgacgttatcccggcgctcctggagcgcacgcttgcgtattatgtccgtgagaactttgaagatttcattccggagttcgactggacgttcggtggggtgcaagcagaaattgccaggcaactccccgtgatcatcgctcgctctcaccaagccacgctggcagaaggcaattttgccgcttgggatagcgccctttccaagctcgcctggactaaggcttctttgcaatcggtagtcctgcccgattgcatcgctgttgcgcgttcaagcaagatggattgggctcccctgttgctagtaggtacccaggacctggatgcatgcatccttccgctggacgattccagtgtgctgattggggcggccagcgagggagtgtctgtttccgccggcgagctcagtgatatctgcgccgcctgcagcgatgattttttcatcgccgcatcgccgatgccagaactatccggggcactaggtcgacgatccggccaagccgtggtccgcttggtgcaagatgctgtggaggacgttcagtcgtcagttcatccaccgtcgttcccgcgcgtagtgccatcgccgcctgcgccgcgtttgcgtgagtacacacttagcgtgccagccgatttgggcgaggagcatgcagcattgctgactgacgccgtgcgggaatcggtcgaggatctctccgctgtctttccccttcacatgcttgatggcatcacgatcgcacggaactatgcccagacgctgcaggagctggacatgggtgatccccgactgccggcgcaaaccagcagcccgcggcctgatggcgtcggcgtgggtagatgcgtgagcgtttttcgaaacggcgttaaaaaacaacacatcgtgctcggctggccggtcgcacaaggcttgctctcagaccgacctgacgcgcagcgcgcctcaattcacaccatggctaagatgctggtgtcagcgagcttcgatgaaagtcatgtccttcagaatagtgaaggtacatacccggccggaccattcacgcacatcctgcatcgcgcaatctccacggttccgagccagtactacatttcacgtgcgacggcctccttcgatacggaggcgagcgatcgctatgcagctcttatcaaagggtatgtccctgacatcatcgtggcgttgcaacaggcgcacgtgcggtatcaagcctccgaagatgtcaacgagctgctggaaagtgcgcttagttatgttggcccactcatcgagcatgtggcgcagtggtgtggccacgtcgatggccataacgagtcgagtggtgacccgcagagctctggagccgctgcggggaggcacgaacccatccaggcagccttggcgccgctgcagctaggcagatggtcgagcctactccatggtgatcttcgcacgcttttcgaagtgcctgagaatttcaccactgaaggcgtgtatgggctcacaagccatctggaacgtgcgctctggtctgtcgggattcacccatggccaatggacgacggtcagatgtacgtgacggtgggcgcgccgccctgtacaccctaa

SEQ ID NO: 531670 - DNA, 915 bp, Stenotrophomonas maltophilia
atggctcccgctaacaaatacgatccgctcgaaacccggaaccagcactacgtgccccagttttggcagcgtcgcttcgggcccggaaatggagaagtctggaccctacaagacaaccgcacgaagaaagccggcccgaagaagttaatgagtcaggattggctctacacgatctatgacgcgggagggcgtccctccaattcgttggagcgcgcggctggtcacttcgaggccagggcagcgaaggcgttctcgaatttggacacgccaggtgcagtgggctcgttagaggatcagatcttccttcgatggttcgtggccttcagcgcatgtcgacatccggacaccttgaacatgggtcaccgcaggtcaaaagagctcgctgtcgcgctggctgacgcgttcaatcagcctctgagtgactatcaggtcagcttgagcacctttggaatcgggcctgaggaagctgcctgggcctacgacctcattcggagacgggatgaggaagcgttacttgaggagatggacgatgtgctcacccggcctccgaacgacgcaatcttgccctcgcagatcgcgctcgatccagaaacgattgagcgcgtcttcttccaactggcgcggcacagcgtagagatcctggacgctccggtcggaacggccttcgtgttgggagacactccgtttccccccggcctcggctcggggttcaccttgcctatctcgagcggactggcccttcggtggattcccgcggacggcgagatgcttcccgattggacgcgccggctcgcaacgtcaaccgaggtggctgaaacgaatcgggttcaagcggacaacgcggcctgcgtcttgattgcgcaggcggaagctgacctattgcccttcaagtcttgtccaaacttgggtgcctag

SEQ ID NO: 531671 - DNA, 210 bp, Stenotrophomonas maltophilia
atgggacatatccatcgcctgcttagcaaaccaaatctgacggtcaacactgcgatggaagaccaccgggtgaccttctgcgccgcgaacctggtcgttggccggctggtagaggacgagatctttgtcaagaaggcgggccgtcggtgcaatcgcgttctctacgcggcgcaagtgattgaggccctgtccaggtcgtcttccgagtga

SEQ ID NO: 531672 - DNA, 546 bp, Stenotrophomonas maltophilia
atgaatattcaaaagtctcactggctgtcgctctgcgccctcatccttggcacggtcgccgctgcgctgcagctgggttgggagcacactcacggcggcattctgcgccaccatctgctcaatgatgcgagtctgccggcgatctccaatctgtgggcgctcctggtgatgcccatgctgggtgcattggcaggctggagcgttacccgtcgagcacgcgagcggcaggggttactcattccggccatggccggcttcctaggctcgctgcttggaggtatcgcgctatcggtggccttcgtagccggcggtgaagcggcggcaacgcaggtaatgatggcgctgctcgtggctgctgtactgctcccggtctaccgggcggagtacctgttcggattcgtggtggggatgacctttgtcttcggtcccgtgctgccggcgcttgtggctttcgtaccgatgctgatcgccgcgatcagccggctggtgatatggcgagctgttgcgtgggcgttgcgccgcgcgcgagctgttgcagcagcatga

SEQ ID NO: 531673 - DNA, 2985 bp, Stenotrophomonas maltophilia
atgcgagcctccctccagacttggatcaacgatgcagacatggcccgacacctgggtcagctctccctagtcgcactgcctattgagctcgctcaaattgggaatcgccttgccgacttttacatctcgcttgtgggcgagttgttcgacggaattcactccacgactactccaagcgacgactgggcgcagttagggaatgccttcctccaattttcgaaagaaattccggcggagcacgttgaagcactgggtatctcgaaggatgaagcggcactatttgccgcagcatcgttctactttggtagctatccagcatcggcctgcctggcgatgcgtcagtcgactcgacccactgatccacaaagcccatgggctgcgtgttatgactttctcgcccgcccaggcagcttgggatctcggactgccatggaggcacgggagcacctgcgcagcggtgacctatccggtctgaacgacaatgtaagaatgagcgccaatgaggcacaacgcgcgttggcggacgggccggatgcttgggtggcaatgaccctgctcagtcaactgatggctcgttttgaggtgtcgaatgtccgggctgtactgccagacggggtgaatgaattttggacgcctctcgtcaattctttcatcgatcgcaagccatcaagctgggagttctttccatcccagatacaagcaatcgagaaggggctgctcggtaacgccgaaagctactccttgcagatgccgacgggagcgggcaagaccacgctatgcgagacgttgctgtattggcacctgaagcgcaatccgacacacgtcgcgatcatgatcgtgccatatcgatcgctggcttctgagcttcgccattctctggtgcgtcagctaaacagcctagggatcgcggcacgttgcgcgtatggcgggacaattccttccggagacgaggtgcatggactcgaccacatcaacgcgcttgtcgcgacgcctgagtccttggctggaattctaagcgctgatcctgcgttcgcccaacggatatcgctggtcatctgcgatgaggggcacttgctcgacagctccggcagaggtattggtttggagctattactggcgcggatgaaggcgcgccaaatcaatccgatccgcttcgtgttcatgtctgcgattgtcccaaacatcgaagaagtaaacgcatggcttggagggggcgaggacaccgtcatcagaagcaactatcgacccgcgatcgctgagttttccgtccttcgatcggtcggtagtggagttggaaagtccgttcgtcttgatatgcacccgcatgcggagcagcggcaatattcgatccacggcttcttggaccggaacacattccagtacgtgaactctcaaacggggcgtacgaagacctatggcttctcttcaaccaagaccctcgctgttgctgctgcccggaaggtactgtcgatgggaaccacggcggtattcgctgcaaacaagcgcggcgatcagggtgcgataggtttggctgaggagctcattaagcagctggattgtccattgccactacccaagcccattgatcacgcggatgttgaggcgctgcgtaagcgcgtcgactacctcgaaagtgaatttggtgcagactggataggtacgaggtcgctgagcaacggcgctgtgctgcaccacggtgacatcccccaggagacgcgagaggttttggaagagctcctgcgagatcggagggtccagctggtcatctgtaccagcacactcgcggaaggggtaaacctacctatccgctcgcttgttctgtattcggtgcagcgtcgcgttggaagtgggcggcctgagaacatgctcgcccgtgacatcaagaacttggttggtcgtgccggtcgtgctggtgccaataccaaaggcttggtgatctgcgcgaatccggatcagtggtggcaagttcttccagtcgccaccgcagggcctggagagcctgtcacgggctcgctgcgcaccctaattgaggatctcgaaaaccacctaaaaacccaaagcatcgcgctcgacaatcagttcttagagatccagcctgccagtcacccgctcattgatggagtggatgcaacgctcatagaattgatctcggaagagatcggagatgtcgaatttctaggactggctgccgaactgtccaatcatacgtttgcggcccatcagctacctgccagttccaccgctacattgcgtacggtgtttgaattgagagcccaacgcctgatcgcgctcagggccgttggcaggatcgcttggcttcaaagcactggtgccaaggtgcgccatctggagttcgttgaacagggattactaccgagcagggaagattgggcggctcctgtcgatcccgcctcggacgatctcctttctgcgatcctagagtgggcatggctggatgcggagttcagatcagatactcgtgtagcatttcgactggacaatggtcagattcctgagtgggtcaagctcaagcttttcgagatcattcgacaatgggttcgtggcgcaacctttttggagattgcgcggtcaacgcggatggacattgacgacattttagggatacacactcgtgtggtcgcgtactcactgcagaccctagttgagcagggcatttcacttctagccaggatcttgatggagcgcggtattgaggtgaacgagggggtttctgcatttatagaacatctcaagtttggcgcgccttcgcgctccggggtagtgttggcaagtggtggggtacgacataggaaggcgtatgtggcgctgggaaatgcgattcagggtgtgccaaatcttagtcaacttagcggcactaaagcagtggcgcgtcagtctcttgaaaattattcagatggttggcgctccgcgctgggcgatttgatctactcgaacactctgaaggatgtcggtagcgtggagtag

SEQ ID NO: 531674 - DNA, 795 bp, Stenotrophomonas maltophilia
atggatgatcttggtttcgatttcggtagcgctgtgccatggttcttgcacgagcaggagcagccgtatgtgctggttaggatgacagcccagcaggtggcgcttttggaggcggcaatggcggagccattgcgtcgctgctacataaccgatggagcgcttcacgccgccgcgaaccgccacgggctcgcgctatcagaggtccttgcgagcaagcttccagacgccggctcaactatggcgggagatttcggcgaggtgcttggttacctctaccaagccgcaatggagcaccctggtgacgctatcggcccgaagaagtggcggcttaagcaagacaggacaaagccggcaccaaagtcggatgtcattcacttcatcatgcccgaacgccccgcagccagcgctaatgaccaagtgctttgcgctgaggtgaaggtcaagtccactactgcatcctcagaccctattggctctgctatcaaagactgcgcaaaagaccgcaccagcaggctcgccagcacactagtttggctccgtgagcgtgccatgactgaggatctcggggatgtcgacattccgcttcttaaccgctttatcaacgcggttgactatccgccagctgctcagcgatacagggccgtcgccgttatctgcgagagctttgtcactgccgaactcagcaatgcaccctccacggccagtgatgagttcacgctcgtggtgatctcagtacccaatctacatgccacctacaactcagcttttgctgccgcgcgggctacggtaagttga

SEQ ID NO: 531675 - DNA, 288 bp, Stenotrophomonas maltophilia
atggacacaccctgcgttaccggcaccgatgccggcgttgaagcagaacttgccgcccacttggggtacatcaaagcacttgagtacggcctccgggcggcaattgccgcacacccagccgcaggagcaatgtcgcttctgtgggcgcagatgttgcctgagatctcggatcgtcatgcttcgactggtcacgttgacttcaatgcggctctgcaacatggcctaaggacggttggcgcgcagatcaacgaagcggcagggatcgtgccctccgatcccgtgagctag

SEQ ID NO: 531676 - DNA, 1008 bp, Stenotrophomonas maltophilia
atgcgcctggtggaccgtggcgcaaatgacacatatagtcatgttttaggacatggggaggccatcatgcatcgggtgggatacgttctgggcgacgggttccaggtgatggcgctcggctcgcaggcggtgttcgagttcgcgaacctcgtgcacggtgaaaccttttacgccgtggagaactggtctctgcaaggcggggagatcaacgcttcgctgggcatccgggtggtcacgcgcgaactgaccggacgcagccgtgccgatacctggatgttcgctggagtaattgacccacttacggacccggtctctcgaccattgctcgatttcgtccgtcgcgtggctcccaaggcgcggcgcgtggcaggaatctgcacaggcgggttcatcctggccgaagccggcgtgcttacacagcgacgggccaccacacactgggcctatgccgagcacatgcagcagcgccaccccgacatccaggtggaggccgaccggatcttcatccttgacggtcagtactggacatccgctggcatgactgccgcgctggacatggcgctgggcatggtggagaaggaccttgggcccgaggtggcgcgctcggtcgcgcaccgattggtgatgcaccatcggcgcgcgggcggacagacccagcactcggaactgttggacctggcaccgcgcagtgatcgtattcaacaggcgctggactacgccaagcggcacttggccgagccactcggcgtggagcagctggccgagcgggtaaacctgagctcgcggcagttcagccggatcttcacggcagaaaccgggcaatcgccagcgaaagccattgaagcgctacgacttgagtctgcgcgggtcatggtcgaacaggggcggcttccattggaggtgattgcgcgtgagactgggttccgcgaccgacggcatcttcgtgaggcataccagcgaggattcggtgtcgcccctcaggctatgcggcggcagtcgcgcacatga

SEQ ID NO: 531677 - DNA, 807 bp, Stenotrophomonas maltophilia
atgtccgcacatccctcatccgctggcgttgcactggttaccggcgcatcttctggcatcggcgcgatctatgccgagcgcctggcccgtcgcggccatgacctgattctcgtcgcccgcgaccgccagagactcaatgccctggctcagcggatcagcagccagacgcagcgagccgtggaggtgatcgcggccgacctgggccagcgtgatcagctggccgcggtcgagcgccgcttgcagcaggatgccgatatcacagtactggtcaacaacgcgggcatcggcacccacacccccctgctgcagagtgatgtcgagcgcatgaccgccatggtggagctcaacgtcaccgcgctcatgaggctgacctacgccgcagttccgcagatggtggcccgcgagcacggcaccatcatcaacatttcctcgatcgccagcgttgccccggagatcctcaacggcgtctatggcggaagcaaggccttcgtcaccgccttcagccagtcgctccacaaggaacttgccggtaccggcgtgcgtgtccaggcggtacttccaggcgcgacagctaccgacttctgggcgatcggtgggctgccagttgagaaccttcccagcgagatcgtaatgcccgccagtgacatggtagacgcagcgctgcgcgggctggatcaaggcgagctgatcactctcccatcgctgcaatccggcgaggaatgggaggcattcgaggcggcgcgcctggccatggcggcccacctttccagcaacaccgtggctccgcgctatcgcgccgcgcactga

SEQ ID NO: 531678 - DNA, 762 bp, Stenotrophomonas maltophilia
atgaaactcacaggtaacaccattttcatcaccggcggcacctccggcatcggtctggcgctggccaaggcgctgcatgcacgtggcaaccagatcatcgtggcaggccgtcgaaaagcgctgctggagaagatcaaggcagagtatcccggcattgatgcggtcgaactcgatgtcgccgatccggaccagatcaaggcggtcgccaaggtcctgattgcgcgctatcccgatctcaacgtcgtggtgaacaatgccggcatcatgccgttcgatgacgccggcggtgcgttggacgatgcccaagctgcgcatctagttgcaacgaacctgttgggtccggtcagggtcagtgcggcgtttgtagagcacctgaagcagaagccgcaaagttggatcatcaacaactcgtcggtcctggccttcgttccgctcgccgcgacggcactgtactcggccaccaaggcggcgattcactcctactcgatgtctcagcggttcgccctgcgagacagctccgtaaaggtgctggagattgcaccgccgtgggtggataccgacttgatctacaagagcagtgatccgcgcgcaatgccattggacgacttcattgccgagacgctcgagaagctgtcaaccgctactaccgaagtcgtggtggatcgcatcgcagcggtgcgtgctaatcccggaatggaagagcatgcgctggtgcatcagttcaatctcgcgatggtgcagagcccgatcccggtggcctga

SEQ ID NO: 531679 - DNA, 333 bp, Stenotrophomonas maltophilia
atgcttttcaactggtctgagtatgtgcctgcggtcaaaaaggcgttcggttccctgggcaagcgccatcctaagatgcttgaggcctaccagtcgttgggcgcagcggcggcgcatgatcaagcgctggaccccaagacgcgcgaactgattgccgttgcggtggcgatcagcctgcgttgcgatggctgcattggcacgcataccgaggcagcgcgcaaggccggggcgaccgaagaagagctggcgcaggcactcgctaccgcgatccaggtcaatgcaggtgcagcgtatgtttactcgatgcgagcccttgaggcttacggcgaatag

SEQ ID NO: 531680 - DNA, 375 bp, Stenotrophomonas maltophilia
atgagcagtaagcacacgccggggccgtgggagattgagaaggtttccgggggctggggcgttcgcgcgccgaactggggctatgtggccatccacaacaccagaggcctgccccactgggacgaagggcaggaggcgaatcgccgcctgatcgctgccgcgccggagctgctgggagcgttgtccagggcggtaagggagacggagcaattccttttcgaggcttggctggtgcgcgtctgccccagcggcgacgtcgatgcagtccagcgtcaatggctggaaagcagtgaccgcctcgacttcatcgaggaatgggccgagcagattgacgccatcgccaaggccaccggggaaacccaatgcggctcctga

SEQ ID NO: 531681 - DNA, 318 bp, Stenotrophomonas maltophilia
atgagcgcccctgtcgatgtgctggcggtgctggattcggcccgtaagaggctcggcgactccatcaccgtccatgaggtgtggacccgtgaccagatcacgcaagacgacgatctgctggaagctagcgacgcgttcaaagaactggtcgagcagaactcagcacttatcgaaatgtgcgacgagttgctccgcgtcaacaaccgcactcttgggcggggcgcagttcggattcaagccgcaattattgcccgcttcgtaaagaagctggaaagcacccgagtcgccctcgcccgcgtcaaaggcggtgccgaatga

SEQ ID NO: 531682 - DNA, 615 bp, Stenotrophomonas maltophilia
atgaccgctgcagcgaagaagatccgcgccaagcgcgcgcgccggccgatctacctggtggtggccaagctgatcgacccgaacaccggcgagctggtgggcgccttggtgccggccaatgccgtcgaccagcgcctgctgcgcgatcgcaagttccgcgtgggccgggagatccgcggcgaactgaagcagccgcgggaggaatggcagcaccggctgatccacaagatcgggcacctcatggtcgacaacgtggaagggtgggagcagctggacgcgcacgacgcggtgaagcgcctgcagctggactccaacgtgtgctgcgagacggtagaaatggacgccaccccggtcatcgccgcggtgctggacgcctgcgagtcgctgctgggtgctggcgctcgcaaggtacttgccggcgtgctgccagcgatcagcaccattccggtcaagcgcgccgaaagcctgtcgttcgacgagatggaacaggcccggttccaggaactgttcgacggcctgaccgagtacatcggcaaccactacacccacgtgatgctcgacgacgtgcgcgccgagttctgggaaatggctgggcagaacaggagattggcgtga

SEQ ID NO: 531683 - DNA, 831 bp, Stenotrophomonas maltophilia
atgacgcactccatacctgcttccgtgtatgacggctatgttgcctctatcgagatgggcgcccctccccttctcaatcgcctggctgacatcgcaaatggacgggtcgcgcccgctgtagatgatctccggattggggccgctcgccgagtaagggccgttgtcatattttttgacattcgcggattcacaaagcggaccaagtcttctgatgatgacgagcttaggcgcacgctcttcatgctgaattctgtgattccagcgatgatgagggttctctttcgacacggagcgtatgtcgagaaaaacactggggacgggctcatggggatactcgggattggagcagatggtcccactgccgcaagaagtgcactcgcagctgcttccgaaatgctcttcgtccttgggaatattgtgaatccatttctcgctcggcataggattgagccggtagacgcccgagttggactggatatgggagatctgcttttggctcgcatcgggaccgccagaggatctgccgatcacgatagaagctacctgacggcagtcgggcctgcggccaacctcgcatgcaaaattcaaaggctcgccggtacaaatcagatttattgtggggatctgataaaacagaacacccctctggacctccaaaatcgcctgttcctagatgccactcccgacgattgggcgtggatttatcaaggaactacaagggtttattcatgctggcgatatttgggggagacaaccaaggccgcccccgagggattggctgaatctcttcggcgacttggcgagctcgcaggtctacagccgccgcgctaa

SEQ ID NO: 531684 - DNA, 966 bp, Stenotrophomonas maltophilia
atgtggcttctgaacaggctatttgcgcaccatgagcagccggcccctcgattcgcgtttcagggcactgtgaactggatgcgagcgatatccattcttgcaggcgagcagttcgagcacgattcactcaggcgtttctacgcaggtgtttcccgccgacaatcaagcgaatccgccgacactcgggcctttgaattcctcacgatgtcgatgcacaacgtctgtgcggttcaaaagatggctgcaattgaggcgccatatccgatcgtaagggccgccatcatttcctggtattacgcaatctactattctgccaaggccatgctggcggcctcgagcggtagcgatccacagacgcatgcgctaaccgcgaaagtatggcagttggagattgtgaataataatttagctgagtcaccttttgatttgagtttgtcagatttaaggcccgtcagcgtggcttccttgttaaagggcatcaggggagacaacaaattcgacctaaacagccagcccattgaccgctctacggcattcggggcggcatgctcatacctaaagggaacggcagactacgagcaatggcgacttgaagagcaggtcaagtctggcagggagtacaagcaaggggggtatagaagctttcaatcaaaagctgccaagtcgcttagagatgcaaagcttcaacccgcccacgtcaacttcttagttcaggcatttcggtatcgcggcaaggcgaactatcgtgatgcaatctacctttcctatggcagggatgaatctcaacggctggggcagtttataagcgacctttctcatgtcagtgcgtgcttctcgttgatgtcggcgcacttcgttgcgaggcgggtagcgcgtgatgattggccgcgcttcgtcgcggacatcgaaaggtatgcgaaatttgctttgccttttgacttatcgggcattgggcacgccagatga

SEQ ID NO: 531685 - DNA, 1893 bp, Stenotrophomonas maltophilia
atggccttcgaccaaacaacaagaaaccgcctccagcgcttcgtcaacgacgcgcgccgcgtgctggaagaggaattcacccgccagctgcagaacgactacggcatggaccccaacgcgggcaccgtggcggagctagccagcctgcgccatataaacgacgcgcagcgcgaaactgcccgcatcctgcgcgacaccctggcgcactacacagccagcggcgacatgaacgccatgcaggggctggatcgcatcgtgcgcgagcaggcctttaccgtgctcaaccgcctggcagcgctgcgcatggcggaagcgcgggggctgctgatcgagtcggtgggcaacggcttccaggccaagggctttcagctctatgcgcgactggccggcaccggcctgggtgaaaccggcgatgcctaccgtgtgtacctgttcagtgtgtttgatgaactcgcgcaagacctgccgggcctgttcgaccgctactcaccgcagggccgcctgttcccgcgcgaggcggcactgctgcaagtgctgaacctgatcaacgatgccgacatcgccccactgtggagcgaggacgaaaccatcggctggatctaccagtacttcaactccaaagaagagcgcaaagccatgcgcgatgccagccaggcgccgcgcaacagccgcgaattggccgtgcgcaaccagttctttactccgcgctacgtggtggagtttctggtggacaacaccctcgggcgtctctggttcaacgcgaccggtggggtcaccggccttcgggagcgctgccagtacctgctggtcaagcccgacgaaacgcttcaagcagccaccaagctgcgcgacccgcgcaccctcaaactgctggacccggcctgcggctccatgcacttcggcctgtatgccttcgatctctttgccgagatctatcgcgaggcctgggcctgggaacaacagcacgggccgggctcgctggaagtctcgacccagccccaggctgcgctcaaaccactgagccagacctatgaggacgaagcggcattcctgtgcgacgtgccgcgcctgatcatcgagcacaatatctatggcgtggacatcgacccgcgcgccgcgcagatcgcctcgctggcgctgtggctgcgggcgcaacgtgcttggcacgacgcaggagtgaaggccaaagaccgcccgctgatcgggcggggccatgtggtggccgccattgcgccgccggcagagcgtgagttgcgccagcagtttgcggccaacctcgatcagcgcgacgccgagctattcgagaagacgctgcaactgctcaagggcctgccggagctgggtgtgctgctccaggtcgagcgcgaactgccgaacttgattcgccaggtctatgtcggcaaaggcaccggcctgtttgctgcgcaggagcaagagaactggcagcaagcggaggcgcgcctgcgtgaggcgctgaccgagtttgcccaggcggcgaaatccacctaccaagggcggctttttgcacaggacgcattgcaaggtctccggctcatcgatctatgccgtgaagtgttcgatgtcgtggtgatgaatccgccttttggcgcactggctgccaacacaaagaaccagctcgccaaagcctacccgcgcagcaagaacgacctgctggccatcatggtcgagcgtggcctggaactgctgcgctctggagggcgcattggcgccattacatcgcgcacttgcttcttcctctctagttttcagaagtggcgggaggatgtggtgctgggcgttgcccgccccgaagtgatggccgaccttgggcttggagtaatggacgatgcaatggtcgaggctgctgcctatgtattggagaaacaggcatga

SEQ ID NO: 531686 - DNA, 1377 bp, Stenotrophomonas maltophilia
atgaattgcctcatcaaacacagcctcagcttcgttattgagagttttgttaagcgattgatcgatgacatcaacgaataccattatttacttacaacggaagattggcgacttctcgtgaacttggatcaagctgtcggtgataggcagatttgccaaaatgaatgcttgggctgcctagaatttgccagaatgatgagcatgttctccaacttcctcaatggcgtcctgaaagcaaacaaagaaaacgaagcgcttatcacagagctgcgccatatatttaccattccaaaagcattagacccgattgtcctcgcactggatctggtcgtttctcctagctacgtgaaggcaaagataccagaaaatctcatcctaccttatgaagagtacgcagctgcggtcaacggcgaggtttctcgcttggcattggatcattttcttcatgagcaggccaagtgtcatgacacaattcttgcctacgcaaaattggagcaagagcaagttatagcctacaacccaacggatatacctgtcgacaaagaattgttctacgttgatcagaacgttgttagcaagtacggaaatgatcaagccttcaaccgacagatcgagagcctcaaaaacaagctttcctgcaggtttgtttatagcccttacgtgattgaagacggagtaaaaatgagtcgcgtccggcttactgaatactttgactcaatcgaaaagctcacagacaacacaatgctggtgcgatccgaaaatggcgtagtccttgccaaggaaaatattcaggtaacgctcgaacgcgttcttctttggagaaatgcgacaagggcggctgaagatttgaaaattcataagatgaattataattactggggtcatcctcattattcaagaagatcagaactttcagagcgggcgaacaaaaatattaatgagcttctggcgtcttttcgcccctaccttaacgacagcaaccttgacattgatcttgacgactatgagagcgatcgagccttgcatcgaaggctgttcgcggcaactattggcaaatcattttccctgaatgcattagttaatggatcgatcacgtatgaaagtgacgcgcaatgcatggaatgcattgaacatctttgcgaattcctggatttgatcaattatcagacagagtccctttctgaactgagcaaaattcgcagcagccttcaagatacggagcacttaaaacatgcctggaaagctgattatttcgtaaccgatgacaagaggctgcgcatacgtggtgatttcatatactcaaccttggggttgagtacgaaatttatgagcaccaaagatcttaaagaaaggatcgccagtgaattcaaaaaatga

SEQ ID NO: 531687 - DNA, 1266 bp, Stenotrophomonas maltophilia
atgagcaggttcaaggatttcatggatagtgatgccggcgcgcgcgcgcggtataaaaagcggaggcagcaacgcgtccatatctacatggatgacgtcgagcctcaatcaaagaagatgccccaagccgatcgggacaggtttcaacaggctgttgccgaacagctaggctcggtgagacgttcaaccttcgcaggtgacgtcgcccttaagattgatctggcgacgacaagcaaaaatgcaccgcaggcgcacaccatcgccaagaacctgttggatctgcttggcgcgcggagtgcgaatgtgtcgtggccgcgccggcaccttttgtacaaggacgaccggcaaatccaggcactctccgtatcctgtcgccatggcgaaacttccccagccatcagtattggagcgcggccattcactgcgatgctcgatgatctcgagcttgcgaccgaggccgtacgcgctgccgagatgaacatggaatccctctacgagcaggagcgcgagggggaatggatcgagacgttccgtgatctcaaagacaacgaggcggacgagcgccgtcgtctcggcgatgacctgtacgacgcctacgtgaagatgacgcgttggagtgcacaacgtgctttgctcaagcgcagcggcgtcaccatccccgttctcacctggatgtacggtcgtccgaagggcctttatacaggcatcggcaaggaaacgtgggcggaaatgatcagtggctcgaagctgcgcttgcaagtcggcgacctgccgatcaagagcggcagctcggacgtgttcaagcagaacgtcttgaacgagatcgccgctttcaagcagcgctgggattggctcatcagcccccttgtggtggctgtcgcgcttgaggtcgtcattcggccaaacccggccacaccggcagctgtgctgcatgatctcgacaatattgtccgagactatctacttccgggcatcgttcccaaatttggcacggtatccgatcaccgctggaacatcgacttcggcgaactgcagaaaaccaacccccagcttgcagcgtcctggggcccaaatcccacaccgccgcccggcacaagatcaggtgtcacgcggtacgaagcgtggcgccttcctgccgttccgggtgaaccggggttcgtcagcgttgcgctgatcgccgatgtggacgcaagaggtgacctgatggatgaagttgacgaacgcatcaagaaatggacccagcccaccgaccgcaggtaccggtag

SEQ ID NO: 531688 - DNA, 1044 bp, Stenotrophomonas maltophilia
atgagtagattggacgagatcaagagagaatacgaaaagcttgcaaacctgccggccgaatctgacggcaacgctaagcggcggcgcggatttgatttcgagcgcctattgaacagtctctttttgtacgaggagcttgagccacgcactggttaccgcccatcgggcgagcagatagacggctccatctaccttgacggtaggatttatcttctcgaagccaaatggcacgcagacccgctgccggcctccacgctctaccagttcaaaggtaaggtagacggaaagcttgccggcacgatcggcattttcatctctatgtccggctatgcggaagacgccgtcgacgcccttattcttgggaaggcgctgaacatcattcttcttgatcagcgtgacatggatgctgcgatcacccgtggcagtggcttcaaggatgttctgaaacacaagctgcgcaaggctgcggaggagggcgcgatctacttcccaacagaaggcgaactcgttaccgccacgaaaactcgaagcatcgagattgatttgctgcgtttcgaccagacgaccgggagcgtggtcgccactcggccagctgagccggacactgccgatctcctcatcgtatgcgaaggggattccgaccgcgttgtaatcgccacgctcgctgagcggatcctagctgccgcaggctctagccgctcgatcaagattctgaccgccatgggcaaggtcaccatccctcgtgtcgccaatgctatgtggaacactttccactcggaatccaaggtcctaatcgtcactgatggcgacaatgacccagccggtacggctatgatgctcgccaatggcctagaatttgaagattgggtcgcagctatcccgaatccatcgatcgagacatggctcaaccttgacagatcgcggcggcctggaaaatcttggattcaggtctctcggagcgcggctgaagcgctcgacatcgacgcacttcgccagcaagacgaccaattcgagaagttctatgcggcaatcctgggtggctga

SEQ ID NO: 531689 - DNA, 1149 bp, Stenotrophomonas maltophilia
atgggtaaccaactgacgctcgccgtcgccggctctcggaaaactcagggtatcgtggaacactgcgcttctgtgtcgcatgagcgccgggtgttggtcgtgacgtatacccaggccaaccaagaagaattgaccagtcgactgaaacagtatgcaggcgaccaccaccacgtcgaggtggcggggtggttcacgtttctcctgcgacatttcgcgaggccgttccttccgttcaagttccctggatgtcgcgtcctgggctttaatttcgacggacgtccccatcggatggcaaagggaatcgaccgatttatggacaagagcggcgccgtatatgggtgtgagcttggccgactcgcccacgaactgattgaagaaagcaagggggcgctcttgaagaggctagagtccatctacgacgaaatcctggtcgatgaggtgcaagacctcagcgcctacgactggaacatcatcgatgtgctgctgcgctcgtcgatagagattcgcatggtcggtgatatcagacagtccgttctggcgacgaatccgcgtagctccaagaactcaaagtactcgtatgccggagctatcaactgggcgcgagagcgccaggcaaaaggggaactcgaaatcgtggaaagtatgacaacctggcgctgtcatcctgtcgtcgcgaaattttctgacagcatctttgacccctcttgggagttcccagaaacccgatccaagaatgaagcagtgacaggtcacgatggtgtgtttctggttgcaacaaagaacgtcaccgagtatgtccgttcatttcaaccccagtgcttgcggtacaacgcccttgcaggaagggcattcgaccttgattatctgaacttcaaagtatcaaagggtatgacattcgagcgagtgctgatcgtgccgactgggccaatcgccaagttcattacgtccggcatccacttagaagcaaattctgcttccagcttctacgttgcagtgacccgcgcaagacaaagcgttgcaatcatcatggacagggcagggaagtccgctttgccttattgggttcccacgccaccatctcaggctgaatccgagaacaatccgatagtccctactttatcggggagtcttccttccctaaccgggtaa

SEQ ID NO: 531690 - DNA, 1602 bp, Stenotrophomonas maltophilia
gtgatacgaaaaatcaagattcggggctatcgaattcacaaggatctgacggtcgagccgaaccaggggtttaacctcatcgttggagccaatgagtccggaaaatcgacgctcatggaggcagtcgcgcttgcgctcactggacgaatcaacggccgcagtgtcgccgaagagctgaacccacattggttcaacacagccgttgtgcgggagttcattgagaaaagggccggcggggttccggtcagctttccggagatattgattgagctgactttcgagaacttgtcggaactgcaggtactgtgtggggccatcaacacacatgtcccgacaactgcttgtccgggcgtgacgatgcggattttcgcaaatccggactacgggccagagttggaggaatgggcaaggtcgccgacggctcttctaccagttgagtactaccgctgtgactggcggtccttcgcggacaaggagttgacgacgcggccaaaggttctggccaccgctgtcatcaattcgcacacggttcgaacgtcgaccggcatcgactatcacttgcgtcaaatcctgggggatcaactggagcctgcggagagggctcagatatccctcgaataccgtcgcgtgaaggcctcaatgtcgaagacggcgttaagtgctatcaacacaaggatgagctctgtgcatgccactttgcatagccggcctatcgcgcttgccatggatcagagcgcgaggacttcttgggagggggttgtaactccgcacgtagatgaggtgccgttcagcatgtccggccaggggcagcagtcggcgatcaagatctcgctggcgatgaaccgccacgccggacgcgctaagttcgtcatggtcgaagaacctgagaaccatctgacgcacacgagtctggccactctcctttcgaggatcgaatcgcttgcaggtgaccagcagcagctgtttgtcactacccatagctcctttgtgctgaaccgcttggggcttgatgcccttcttttgatgggcagagatgtcgcggccaaactctcgatgctcgatccggagacggtcagctacttcaagaggctcccgggatatgacacgttgcgcatcgttctcgcgagcaagatcgtgttggtcgagggcccatcagacgagatcgtctttgaaagggtcttccaagacacatacggaaagcgcccgatggagtgtggggtcgacgtgctaagcatgcgcggactttcgctggcccgaggtttggagctgtgtgccgccctcaacaagccgatagctgcgcttcgtgacaacgatggtgtcgatccggctgaactgcgcagctcggtagatgtatggctgaaaccgggtgagcgagaactcttcattggtgaggctgcccacggcgcaactttggagcctcagttgattcaccacaacggcgaggtactcctccgcgaaattctcggcgtcgctcctcacgcggacctgttgaagtggatgacgcgggagaagacagaggcggcacttcggatcggagtgtcctccaagaagatcgttcccccggcctacatcctcgaagcggtcaagtttgcccatgggtaa

SEQ ID NO: 531691 - DNA, 918 bp, Stenotrophomonas maltophilia
atgagtgacctgtttgacattgacggcgccaatctcgacttggggttcgagaacctgaaggctgccgcaagtccggctgaacagcagcttcgcgacacactgcagaagatgtggactcattacgagccctatgccgatccagatttccgccagggattcgcgcgggacgtggatggacgcttctgggaaatgtatttgggttgcacgcttcttggagcaggacgtacgttgatgcccgtcgccgaccgcaagcgccaaggcggccagcccgacctatgcgtgctagacgggaatcgccgtatctggatagaggctgtcgctccagaaagaggcgatcctggaccagaccagatcttgcgccctgtaccgatcgatgagggtggtggtctcatcgccgcgccgatccgtcaagcgcagttgcgaacctcaggagtattctggaccaaggcaaaaaagatcgaccgatacatcaaacagggcgtgatcgcccaggaagatgttcgcatcatcgcgatcagcgccagccgcttcggcatatatgtcccggaacaccccttaccacttatcatgacgacgctgttccccatcggagatgctttcctatccatcgatcgcgatacaggcgatgtcattgaggaaggctttcacgctgctcccttcatccaccgggaaggtgatccgatcccgcgcatggcgtttcttgacgaacgcttcgccgacatctcaggcgtgatctggtcacggattggcgttggcaacctctcgcgccaggttcggccgatcacctacgtccacaatccactagcacaggctccactacccgtgagctggggcgtctgggaccgtgaattcgtaacaatccaccagaacgacggatgggaatccaccgacatccttgccgcaccggggttgctgtga

SEQ ID NO: 531692 - DNA, 1464 bp, Stenotrophomonas maltophilia
atgtccgcaaccgatgaaactcggcgtttaacctcaatcagccaacgccaattcgagctatatgccctatctcttgaacagggcccgaatttcgatcctgctcacatcctcgacgcctatcaggccagaaatggtagcgtagccggctgcattctctttgatccgaacaacggtactttcaccagcgtggccatgcgccgccgaatcgaccactgttggatcaaggttgaggaaagcggggcccactccacacccgaggctgcactcaaccatctgacagccgctatgcgtgccgatgatcctccagaacctttgccgccaggggcaaagcgtcgccagcatttactgaaaacggggcctcgcgggacatctccagagttcgatctactgacgaccacgatcagccattggccggcgctcatggcgatcggcgaaagctacctcgctcttcccaatcccgacgccaatttcgtcccggattttcaaaccagcaacttcgcgtccagactattcgagctctacctttttaattgctttcgtgagcaaggcctgaacgtccgacaagaccatgtctctccggacttctttatcgagaaggacggcaacgcatgctggattgaagcagttacagcacactctgagcttccacgcagcggtggcatcggagaatgggttcatgccccaaaagatcgaattgataggctgacgggcaactcagccgagcgtttcgcaaagacgctgcgcggcaagctccagaaaaactatcatgaacgggagcatgtaaaggagcagcccttcgccttggccatcgccgacttccatgcttccggctccatggtctggagccgggaggcgcttcccacctacctttatggactacgcgcagatgtcgtaggggacggcgctgaacgtcgtgcaattggagtaccgattgccacgctgacaggccaacataacatcccagcgggcctctttcgcgacccggatttcgcccacctctcggccgttgtttttagcaactcggcaacgctcgccaaattcaaccgtatgggtttcctggcaggatggcgaccgcccggattgacgatgagacggcaaggcattctcttcgaccgtactccgggcgcactagaacctgtcgatttcaaccttcaggtcgacagtgccgaatatcaggcgctctggccctggggtgaggcttggtgtcaggagctggaagtgtttcacaatcccttggcgaaacaccccattcccctcgatctcatccccggcgcgacccactggtttgagcgcgacggtgacatcgaatgcagcacgatttgggcgaattcagtcctctcatcgatcactcaactacggatggccggcaaaccggctatcacgagcgaggtgcgtgatcaaagtggacccgctgtgaacgcaggctcccacgagcgcatacgagacaacgaccatgacgaatga

SEQ ID NO: 531693 - DNA, 504 bp, Stenotrophomonas maltophilia
gtgccggtctatttcattggtgaagatgagaacggatgctgccctatcaagattggagtggcgaagaacatcgcagagcgtaagcgcaacctccagaccggcaaccctctcgtcctgaagctgctcggatggatcgaggttgccgacgcctttgagcttgaacgccagctccatcagcatttcaaatcggcccgttcgcgcggcgagtggttcgcgatcgagcctgcagatatcttgcccattcttatgcgcgctggccgagacggatttgttgccaagaacgctgatgcgttccagatcgttggctatgaccgcgacgctgtgccggaatatcttggggtatgggaatggggcgaccttgagatctatgaatgctgcccctactgcggctgcctgtgcggcatgcactttcaagatgcatcacagatgtatcactgtctgaactgcgacacgctaactgacttctcggacttggacccacgcaacgaagacttggacgactga

SEQ ID NO: 531694 - DNA, 384 bp, Stenotrophomonas maltophilia
atggagaactacgccaagactgatcgcatccgcgaacgaatcgatgcctggactttgaacggaacgctaggagctgagctctacgagggggagcttgcctattttcggagtcgttactatgccgacggtgaattaactcaccatttccctcacctgaaactccggccctcagaccaccttggtctcgttcaggcggttattgaaggggtgaacaacaccccacgcgaccgaatgttcgctctcctgatgatcgtctggcgcctacgcaacaatctcttccacggcgaaaaatgggcctatgagcttcgcgatcagcgcgagaacttcagtcatgccaacagcgttttgatgcgaatactcgaacaccatggccagctcggctaa

SEQ ID NO: 531695 - DNA, 1242 bp, Stenotrophomonas maltophilia
gtgctgacagacttcgccctgcggaacttgaaaccccgcgagatcctttacaaggtcgccgatcgcgatggcatgtacgtcatcgtttcgccgaaaggcaccattacctttcgatacgactaccggatcaatggccgacgagagacgttgaccataggccgttatggcttcggaggaatttcactagccgaagcccgagaaaagctacgccgtgccaggcggctgctgggcgagggtacttcgccagcgctacagaagcagcgagagaaggggcgtggatcggagacctgtaccttcagcgatcatgcctcccggtggctttatggggccaccatggccgagtcgacccgttcaatgcgaaagagcgtactggatcgcgacatcttgccggcgttcaacaaacgccttcttggtgaaatccatggggaggatttacgcgctctgtgtttgcgcgtgagagcgcgaggcgcaccagccaccgccgttcaaattcgggaccttgtgaagcagatatatggttacgcgaatctgcatggggagaaggtggcaaaccctgctgatagcgtagatgcggcttccattgcgactttcgtgccgaaggaccgtgccttgtctccgcaggaaattcacctaatgtccaagcacttggagtgtgtggctacctatccgacgatccggctagcgttgcgcatgatcttgctgacgttggtccgaaagagtgaactgatcgaggcgacttgggacgaggtcgattttgagaaggctacctggacgattccaaagcaacggatgaagggacggaggccgcacgtagtttatctctcacgccaggcgctcgacattttcgtggcgctgcatacctgtgcggccggttccaagtttgtcctgccgtcacgctacaacgctgacagttgcatgtctaaggcgaccctgaatcgagtcacgcagcttgtggtcgagagggccaaagtcgcgggcttgccattggagccgtttaccgttcacgatttgcgccgtactggatcaacgctgctgaacgaattgggtttcaaccgggattggattgagaagtgcctggcgcatgaagacggacggtcttcgcgctcgatctacaacaaggccgagtacgcagagcagcggcgccatatggtgcaggaatgggccaacgtggttggtgcctggatcgacgggaggacttatgtgccgacgttgatgcctgagagcgtcatcgttccgacgtga

SEQ ID NO: 531696 - DNA, 1173 bp, Stenotrophomonas maltophilia
atgaaagccacgcctgcgccatccggcctttgggccgccgcctgggtggtgacggccgtgttcatgctgtccaactcgcccacgccgctgtatgtgcattggcagcagcagcttgggttctcatcaggcgtgctgacggtcatcttcgcgctctacatcgcgggtttgctggggacgctgttgatcgccggccagctatccgatcgctacggacgcaagcccgtcctcattccagggctgttggcagccctggtggcgtgtctgctgttcgcttcggccacctcgatcacgatgctggcgataggcaggttcctcgccggtatcgccgtgggcgtgatcgtctcggcgggcatggctgcggtggtcgacgtgggcggcttagaacacaagcgacgggcggcgctcctggcctcggtggcgatggtgctgggcgccgggcttgggcctttgctggctggggggcttgcacaaagcctggcgcagccggtgctgccgatcttcggcatcgaggcgctggtactgctcagtgcgctgggcatcgtgtggtggctgccgctgcgccgtcctgtcgtgtctggccccacacggctgcgcctgcctacggtgccgcaggccaatcgtcggcaggtcgcttgcggcattgccaccttcggccccggcatcaccgccacgtctttcgtattggcgctggggccttcgctgctgtcgcatctgctcgacgtgcgcagtccattgctggccggtggaatggcatgtgcgatgttcctgaccgccaccggcgtgcagttcgcagtgcgccagtggccaataccgcgcatcttcgccgccagcaccgcagcgacggtgctgtcgatggctgggctggcgctggccatacatgcttcgctagtgccggcgttggtcgcatccgcactgctcgccggtgccggtcaggggctgggtcaactgggcggcttgaccctgatcggcctgcatgtcccggacagccatcgcgcacaagccaacgcagtcctcaatatcggcggctacatcccggccggcttgctgccggtagcgacgggctacctgatagatgcggtgggattggcgtcgggggccacattgttcgcactggtgctgacggtcactgcgcttgtcggcggcatctgggccacgcggcaagcgggcgactga

SEQ ID NO: 531697 - DNA, 540 bp, Stenotrophomonas maltophilia
gtgtccaaccccttggtgatcgtcgcccaccccgacctttcgcagtcgcgtatcaatgcaacgtggattgccgcgctgcggcaggagccgagcattgcagtggatgacctgtatggtcgctatcccgacgaggtgatcgacgtgcaggccgaacagcaacggctggcatcgcatgagcgcatcgtcttgcagttccctttccactggtacaactgcccaccgctgttgaagaagtggctggatgttgtcctcgaacacggctgggcctacggccacggtggggatgcgctcaagggcaagcaactgggcatcgcggtgtccacttggtcgaagccagaggactaccggaaggatggccgctacggacggacgatggacgagctgaccagcccgttcgaggtcaccgccctgcgcgtgggcatgcgttatctgccgggctttttcctcaatggcgtgggcgatatcgacgaccagcaactggctgccaatgccctggcgtatcgcgctcatgtgcagcaaggcgagagggcttcccgatga

SEQ ID NO: 531698 - DNA, 1014 bp, Stenotrophomonas maltophilia
atggattcactgacccagatcgctcttggaagcaccgtcgcggcgcttgccgtacctgccagacatcgacgggcagcattgctggtcggagcgttgctgggaacgctgccagacctcgatacgctgccgctgccgctgatcgacgacccggtcacgcgcatgacctggcaccgcgcgccctcccactcgctgctggtgctgccgttcgtgggatggttgatctgggccgtgctgcggtggcgctggcttcccgcgcagcaagcgccgcaacgctggatgtgggcgatccaactggctttgttgacgcacccgctgctggacagcttcaccgcttacggcacgcagttgttgtggccgttgcccattggcccgatgtcactgtcgagcatgttcatcgtcgatcccggctataccgtgccgctgctccttggcgtgctgcttgccgcttgggtcggcgcgcggcgggccggtgccgcctgcctgctggtcggcctgctgttgagttcgggctaccttggatggtcgctgctcgcaaagggcatggtcgaacgggacgccgttgcggccttgtccgttacaggccagcagcatgcaccgcgattctcgataccgatgccgctcacgacgctggtgtggcgcatcgttgtgatgacgcctgatggttatctggtcggtgaacggtcgctattggtcggccgtgaaccgatgcagtttcacgcctatgtctccgacaccgaagcactggccgcagtgcggaacttgccggtggtcgagcgtctgacatggttcaatggtggatatatgcgtgcaagggtggatgatgatcgtcgcctagtgttgtcagaccttcgcatgggacaagagccgggctaccttttcaacttcgtggtcgcggaacgcactggggatcaatggggcgcagtctcgccgccacagcaattgccctccgaaatggatctccgaagtaccctgtcaggactctggacacgactgtggaacaaacctgttcgataa

SEQ ID NO: 531699 - DNA, 390 bp, Stenotrophomonas maltophilia
atgagcaccgtcagaaaaaccgaatcggttgcggttggcggcgaacccgctgacctgccagacccgctgccggaaccggctatcgcagacctgcgccttgaggccatcctgggcgcactggctgatcccctgcgcctgaccatcgtgcgcaagctgatgctggaagcgcaggcatacgatcatccatgcggctggttcgggttcgaccgccccaagtcgtcgctgactcaccacttcaaggcgctgcgcgaggcgggggtgatccgccagcggcagtatgggctggagcggcgcagtcggctgcgcagcgaagacctcgaagcgcgctttccggggctgcttgcactggttgccagttggcagccgccacctggtaggaaacagcgttag

SEQ ID NO: 531700 - DNA, 264 bp, Stenotrophomonas maltophilia
atgaagaaggcaatgccgcttttgctggccgtggtactgaccgcctgcggacaatccgaaactcccaagcagcccggcacgccaaccgttgaagaattggcatccgatcctgcacgcctgaaagagctgcgccagcaatgcaagaccgatcgtgccacgctgggcgacgtgctgtgcaaccgggtggccgaggctacccgcaagcgtttctatggtgacggcgctacgccatacacgccgccagggaacccgcccaagttctga

SEQ ID NO: 531701 - DNA, 945 bp, Stenotrophomonas maltophilia
atgaacctgcataaacatgcccgtttgagcccgcgcggtcgagccctgctggtggatcgcatccttgtgcagggtctgcgcgtggaagaggccgcgcatgcggcgggcgtgagcgtacgcacggcctacaagtggctgaagcggtaccgggaagaaggccgggacggtttgaccgaccgcagctcccggccgcaaagctgtccccatgccacgcctgcggccattgtggagcaggtgctggaacagcgccgctcccgccagacctaccgccagatcgcgcaacagctgctcgtagcccccagcaccatcgcccggttgctgcgccgtgccggcctgcaccggttggccgacctggagccggccgcaccgcagaaccgctacgaatacgcccagcccggccaactgctgcacctggacatcaagaagctggggcgcatcggctcgcccggccaccgcatcaccggcgagcgctcgcatcggcatcgggggattggctgggaatacgtccacctggccattgacgatcactcgcgcgtggccttcggctgcatcgagccggacgagcgcgggagcagcgcctgcaaggccctgatccgggcggtccgctactaccgcaccttgggcgtgtgcttccaacgcgtcctcaccgacaacggcgcctgctacacgtcccgccgcttccgtcgcctgctgcgcaggctcggcatgcgccacctgcggacccggccctacacgcctcgcaccaacggcaaggccgaacggctggtgcagaccaccctgcgcgagtgggcctatgcccggtcctatgccaattccgaacaacgggccgacgccttcaacggatggctccaccactacaactggcaccggccccacgccagcctcggccaccagccgcccatctcccgcatcccgctgaacaacgtactgggtttacacacctag

SEQ ID NO: 531702 - DNA, 333 bp, Stenotrophomonas maltophilia
atggggtgtcatcttggtatttgtggggaacccaaggtggcaacaacttactcgctggcgaaggcattgaagacggtcaggaaggcgcgcggcttgagccaggaagcgttctctgacgtgtctagccgcacctacatgagtaccctggagcgcgacctgaaaagcccgaccttgcacaagctggccgaactgtgcgaagtgatgaagatccacccgctcacgttgctgaccttggcgtactccggcgacagcgaacagaaagccgatcaccttttaatgttagttcgacaggaactcaaagaattggctgtggatgattccggccaaagatag

SEQ ID NO: 531703 - DNA, 1689 bp, Stenotrophomonas maltophilia
atgcctaagactcaactaaaaaagctaacaatcgagaaattccgcgcattgaacgatgtggcggttgagttcggcgattacatcactgttgtttgcgggaaaaatggcacatcaaagtcctcgatactgggcatagctgcgcaaatttttagctttgaaaaagattacgtcaaggatgagtcccttgcattccggcagattgcaggagggatgttcaagtctcaatacagtgaccatttcaggatatccgaaaagtttgatgtccccggctccatgtccgtgaacattgatttgcttgatggatatacaaatcaggctgcgaccgccaaacttgagctgatgaaaagagggaagtcacccaggcctgtggttaggaataatagtacagcggccggaagcagcaacacgagcaggaattttactcatccggtgatttttcttagcttgaagcgtctttaccctatcgcggccagagactacaagctaggcgactttgattatctagagcaacacaagaaagatttcattgcgctaacgaacgaacttctcaatcgcaacgcatcgcttgcaacagggactgatggaacaatcagttctgcggtggcgcacggggagaactacgaccaagactctgtttcggcgggtgaggacaatgcaggccagatcatattggccttgatgtctttcagaaagctgaaggaagattatgctgactataaaggcggtttgcttttaatcgacgaggctgatgctgggctatttccgactgcacaagtaaatctactgaagatgcttgatcgcgagtgcaagaacttggatcttcaagttgtcatgacttcgcattcgccagttctgattgagtatgcatatgagcaaagtcgccagttcagaagaaagtacaagaccatttatttgagcaacacctatggcaatgtccaggtgatgcaagactggtcatgggcgcagattagtgcagacatcaacacaaagaccatcgatacatcgcctggagtttcactgcctcgcatcaatatctatttcgaagataaagaggctgaagacttttttgcaactttgctgtacaggcagccaataaagaagttcacaaacccgatgtcggaagtgtcactcggatgctccaactatcttcagttgatccagaagaaaatccctgagttctcggaaagaagcatcgtctgtctggatgcagatcaaggctctcaagttacagggaagagctataagacagtgactctcttgcccgggcatctcccgcctgaccaacttgtattcgagcacttgtacaatctccctgccgcccatccattttggaaaaatgacttgcagttcacaagagatgttttcaccaatgcagctcgcgaggttttgaacgagttttcaatcaacggggattctgttgaggtgaaggagcgggtggctgcatacactggaaccaagaagccgagagaggtttttaagcgtttttataagagtgtcgaatttcagaaattgctcacctctggagccaagccctacaatccttggaagcattgggcagataacaatccagtgcttattaacgaattcttggaaaatttcaagacggctgttcacggtgtgatgagcatagggtatgctgtggacgtcaccaagttggccgccttggaagttaagccaagaaaggtataa

SEQ ID NO: 531704 - DNA, 876 bp, Stenotrophomonas maltophilia
atgttctcaaacagactgtatagccctctgcgctaccctggcgggaaggcgccatttgctccattcattgcaaaaataatggaaacgaatggtgtcacgggagggcattacttggagccatacgctggcggggcaggcgttgcacttgatctactctttcatgggcacgcaagtcatatccatatcaacgatgctgatcctgccgtatacgctttttgggttgctgtaacaaagcattcaactgagcttcttgatttactcgaatccacccctattaccattgaagaatggtttagatggcgaaccattttgcgcgaagattgcgttgccagcctagtcgagaaaggatttgcgactttattcatgaatcggacgaatcgatctggaattctcaaggcaggcgtcattggcggaaagagtcagaacgggaactacaagctggatgctagatttaagaaggacgttgttgcttcacgcattcgtgaaatcgcccggcgacagagtgacatatcggtgtatcgtgaagattcattgcgccttctgaatcgctgctcggattttctgccaaaacaatctctgatatacctcgaccccccatactacgttaagggaaaggggttgtatcgaaattactacgagcatgatgaccacgcggccattgccaaagtcattcaacagaagaagttcaaatggccttgggttgtgtcttatgacaacgcggaagaaatttgtgccatgtatcgcatgagccaatcgttgagctatggtctgaactacaccgcacaaagacgatatgttggtaatgaggtaatgttcttcagtcagaacttgacagtgcctgatgaagccattcctcaaactagggccgtgagctaa

SEQ ID NO: 531705 - DNA, 222 bp, Stenotrophomonas maltophilia
atgcttgttggtgtcagtccggccgttcggccggtggatgaatacgatgtgggggggctcgtggaacattcaagccgtctcccgaacgctgtgttcagcgcctggaaaaccttgccaggcatggcctggcacaaccgggaccgggcaaagcccggcctggtccatcaatcggcggccaccaccaccagcgccggccgcagcaggcgctcgttgagcaggtag

SEQ ID NO: 531706 - DNA, 669 bp, Stenotrophomonas maltophilia
atgggaatacgcctgcccacctgggtctggatcggcgcggtcgcgctctcgtgcgtggccggcatggtcaacgtggtcggcttcctcggtttcgagcaccaagcggtcagccacatgaccggcagtaccagccagttgggcatggcgctggcgcagggggactggcgcgccgtcgggcacctgtgggggctgctgatcgcgttctcgctgggtgcgatgctcagcggcctgctgatccaggacagcgccctgcagctgggccggcgctatggcgtggcgctggcactggaatcggcgctgctgctggtggccattccactgttcgaacaacatcagatctggggcgcactggccgccgccatggcctgcggcctgcagaacgcgatggccaccaccttcagtggcgcagtggtgcgcaccacccacctcagcggcatgttcaccgacctcggcatcggcctcggccacctgctgcgtgggctgccgctgcaggtacgacggctgaccctcagcggcctgatcatcagcggcttcctcgccggcggcatcctcggcgcctggctgttcatgcgctggcagtacgacgccctgctcgcccccgccctgctgactggcctgaccgggctgggttatgtgctgtaccagcagtgggcgcgttggcggcattga

SEQ ID NO: 531707 - DNA, 267 bp, Stenotrophomonas maltophilia
atggtagtgccggccgctggccggcaaccccatgacccgcgcgaagatgcatcgctgccggccggcagctggcactaccagtcgatgttcagcgcggccattcgctgttcagcgccgcttgcgcgcgcctcggccgtggccggtctggttgtgatgccggccagcggccggcactaccaaagcaaatgcgaagcgcagcgcagattgcgttccggcacacagagcagcctcgatggtagtgccggccgctggccggcaaccccatga

SEQ ID NO: 531708 - DNA, 213 bp, Stenotrophomonas maltophilia
atggttgagctgatgatccgtgacccgcacaggtactgcccggactgcggcctggccggtcacatcgactacaccgagattcccgcatccgtgcgcacctacacgcgtgctgacggcgagtactcggaccacgtcggcccctcccgagactgcgaatgccgcgactgcggcgcctctttcacgctgaccggctgggaggactcccatggttga

SEQ ID NO: 531709 - DNA, 825 bp, Stenotrophomonas maltophilia
atgacgaccgtcagccagttccggaccgatcttggcctcgaaattgattcgcttcgtgatcgtttcatctcgccgtggatgcaggtggtggtgccgggccatacaccggaccaatttcagcacgacgtgaaggcgttttgtgtgctcgcccatgcggcatttgaagagtacgcggagcagctatcgttgctggccatgcactccgcgcgggatgcttggcttaataaaagattcagctttagtacgatagccctgctatgcagctacggtgtttccatcaaatctgaagataacgatggcaaagagcagagcaggttctacgaccaggtgcgagatggtttcgtagacgttcttaaatcgcatagtaatgtggtctctaataatcacggtttctcgcggccgtaccttagatctctctttaccccagttggcgttgacatccctgaggacgatttgctgctgcagtcgcttcgtgagctggcggaggcgaggggatcttttgcccattccagagcagctgcggcaaactacgggcggcagcggtcggccatgcgaccgatgacccccgagaaagcaaacactgcggtgcaggcgtgtttgtctatttgcgatgagctcggcaagcgagtcgagcaggtcttgggtctgccagagaagttggcgccgacgcttcatgtactgcccacgccaagcgaggtgccgtgtggggcggcttccgacgcactcacatgtcagtcgacggaggccgagcgagcccccccttcttcgccgggctcagacattgcgggagacgttcgcgctcactcggaacgctctgagggctaa

SEQ ID NO: 531710 - DNA, 1152 bp, Stenotrophomonas maltophilia
atggcgagcgacatcgttgacgaagattggaacgaagatctggcgggtgaggttaccgctgagggtgttggctctttggtagtttattcccgcgattggactgtggagactattcttcgccaagtcgagcagggaaacattgatctaaatcctaaatttcaacgccggaatgcttggaacgacgttaagcgaagtaagcttgtcgaatctttgatcatcggtgttcctgttccggaaattgttctggcggaagatgtaaataaaaagaaatcattcatcgtcattgatggcaaacagcgtctccttgcgctcgctggttttgcggagcctgcgaagtatcgaagctgggatcgccctttgctgcgtggccttcaggcgcggcctgatctgaatgatgatgacgtcgcttcgctgcaggcgaagccggatgactatcgccagctgatgaatgctgatattcgttgtactgtgatttctaactatcagtcttccgacgttctgtatgacatcttctatcgcttgaatacggggtcagttcctctaagttcgcaggagcttcgccaggtcttgaagaaggggccgttctctgattttcttatttcggtcactgacaatgtgctgcctctacatgatgttatgcggcttggtgggcccgataatcggctaagggatgctgaaattgtgctgaggtacattgcgatatcgatgaatggaatgcaatatcgcggtagcctgacgccattcctcgatgactcgatggagatgattaattcgcactgggctcagcttaaaggtccagtcgaggcgctcttccatgagttgaatgacgctacgctgaagctgatagataagtttggcaagaaggtcgggcgaaaggtggttgaggggaaatacgagagtaggttcaatagggcgttgtttgaggttcaaacatattactttgggaagattccggatcatttgctggcgggcgtgccggccccggatgtagtaaatgcgtttgccgatttctgttcgaattcggcggagtttctggactccatcgaaacgactaccaagaatcttcgccgctatcgagctagatttgaccttttccggggcttcgtgaaccagctgttcgggacgaatatcactgatgttcccgtgccttga

SEQ ID NO: 531711 - DNA, 972 bp, Stenotrophomonas maltophilia
atgaacccgatgcaaaagccgctcggcacccctttcacacccttcactaccgccgaagaagtcgcccgcggcatcgacctatccggcaagaccgtggtggtcactggcggtgcgtccggccttgggctggagtccgctcgtgtgttctcgggcctcggcgcccgtgtcatcgttccggcgcgcaacgtggacgccgcgcgccgggcgctggccgggctcgcccgggtcgaagtggccgggatggaactgaccgaccccgcctcgatccgtgccttcgccgagggcttcctcgccagcggccgatcgctgcacctgctggttctcagcgccggcatcatggcgacgccgttgttccgcgatgccgaagggcgcgaaggacagttcgccaccaaccacctgggacatttccgcctgacggctgcactctggccggcgctcaaggcggccggcacggcacgggtggtggtgctgtcctcgcgtgggcatttgttgcccggattcgacctgaccgatctggatttcacccggcggccctacgacaagatcgcggcctatgcccaatcgaagaccgccaacgccctgttcgcggtggcgctggatgcgcgaggcaggcaacacggcatccgtgcctactcggtgcatccaggctcgatcctcgggaacctggcccggcacatcagccccgaggaactggaagcctacggggcgttgaacccggatggcacgcccctgatcgacccggccaacgacaagaagaacttcccccagggcgcggccaccatggtctggtgcgccacggcgccggaactggaagggatcggcggggtgtattgcgaggacagcgacatcgctccggtcgaagccgaggggcggttcggcgtccgcccctacgccgcagacccggacctggccgaagcgctgtggacggaaacgcttcgcctgacaggagagacatcggctcgcttcatgtag

SEQ ID NO: 531712 - DNA, 981 bp, Stenotrophomonas maltophilia
atgctagaacttctcattttctgttcagatcatcctatgctgccagacgagccactttcgcaattgctggcgctggccggggtacaggcggccgtctcgaccggactccaggcgcgggggctgtgggcgctgcgggtcgcttcgcttccgacgctcaaatgcaacgtgatccgccggggtgagtgcgggctggaggtggccgggcagcgctgggcgctgaagaccggcgactgctttctggtcgcgccaggcagaccattcacgctcggcaccgatctcgaccggctggcgcaaccggcgcaggacgtcttcgccggttgcgagaacaccctgatcgcgcagctcgatgccggacccgggccggaattcctttgcctcggcgggcgcatggatttgccaccggccgccgcgctgctgatcgatgccctgcaagcggtgacggtgatccccggcggcagcccggtggcgctgcggatcggctggctgctcgaccggctggaggaagagtgccgcgcggaggcgccgggatcggcggccatggcgactcacatcatgcagatcgtattcatcgagttgatccgggccttgccggcaaccgctgcccgcgggtggctggcagcactggccgatccgcgtatcgggccggcacttcgcgccattcatcgcgagccgggcagggcctggcggctgcaagaactggccgaggtcagccatctgtcgcgatcgcagttctcggcccggtttcggcagacggtggggcaggcaccgatggactatctgctccattggcggatggcgctggcgcgccaggcgttgtcacgccccggggccacggtcgagtcggtggcggatgaactgggctatgcctcaccaagcgccttcggtgtggccttccgccgcgtcaccggcaccaccccgcgacgagtagcgcgcgaggtgacgcaccagccgcgccggacgacctgcagcgacacaacctga

SEQ ID NO: 531713 - DNA, 393 bp, Stenotrophomonas maltophilia
atgaacccgcccactctgactgcttgctatgccggttggttcggcattctctttctcgttctttccatctgggtatccattggaagggcgcaattcaaggcgcaccacggggacggcggacacgagtcgctgcgacgccggatcaggatccaggcgaacttcgccgagtatgtgccgctggcgctgctgctcgtgggcctcaacgaagtgctcggggccgagcgctggacggtgcacgcgctgctgatcgcgctgctcgccgcccggctcgtccatcccttcgggatgacggcgcccgagggctcgcttcagcagtacgcgctcagggcgccggccatgatggcgacttggaccgtgctggcggtcgcgtcaggcatgttgcttttgcgctag

SEQ ID NO: 531714 - DNA, 243 bp, Stenotrophomonas maltophilia
gtgcacaccttcagcgcccgctggtcggacgatgtggcggcggacagaccctcgcgcgtgacctgggatatccttcccgcgggtgacgacgcctgcaagctcgtgctcacccacgacgatttcggcggcgccaccgccaccagccaggccgtgcgcggcggctggcccgaagtgctgtcgcggctgaagacgcaggtcgagacgggagcgccatttttcatccctgcgccgcccccggcctga

SEQ ID NO: 531715 - DNA, 2073 bp, Stenotrophomonas maltophilia
atggagcaaaccggcgaagagttcttccacgacttccggcaggaactgctggcgggagccgaggccaatggcaggtttcagctcgacgagttcatggaaaccatcgctgcagagcttgtcgaaacaggcttcacggaaggcttcgaactttgtcatttccgggcgcatcgtggcgtgcgcgtggacggttactggttcaatgatgagggagtcctgcacctcttcatcgcagactttgagtcccgcaacgaactggcatccctgaccaagacggatgtggatgcggcattcaagcgtgttgccaacttcttcgatgcaagtatcgacaggaatctggcggacgatctggaagtcacatcgccggaatacggccttgccagacagattgccgatcgcagaggtgccatcggctcgctcaaccttgttctgttctccgagcgcacgctcagcggggcagtgcagagccttccggatggagaagttgctggcgttcccacgagttatcacgtatgggatatttcgcgtcttcatcgtcagcgaagttcacgcagccacaaggaaccactcgatctcgacttcgagcagatgtttggccaaggcatcgcctgccttcccgctcacttgacaaccgatgcctatcagtcctacctcatggtcatgccagcagatgtgctggcgaccctgtacggaagtttcggagcgcgcctgctggagcagaacgtccggacattcctgcaggctcgtggcaatgtgaaccagggcatacgggcaacgatcctgaatgagccgggaatgttctttgcctacaacaatgggatcacggccactgcgcagagtgtcgaaaccgaggcaacggattccggtctggcgatcacaaggattgtcgatcttcaaatcgtcaatggtgggcagaccactgcatccctgttccatacgcggaagcgggacaaggcggacctttcccagatattcgttcagatgaagctgtccgtcattgacagccaacaaagcgagatggttgtgccaaagatatcggagtatgcgaacacccagaatagggtgaatgctgccgacttcttctcgaatcatccgttccatgtccggatggaagggttctcgcggcgcatatgggcgccggcgcagaaggggtccccccgcgagacgcgctggttctacgagcgcgcacgcggtcagtatgccgatgcacagtcaaaactgacaccagcagagcagcgtcgcttcaaggccgagcatcccaagccgcaaatgttcaccaagacggatctcgcaaagttcgaaaatgtctgggatgaccatccaagatgggtcaatcttggctcgcagaagaactttgcgcgctatgctgcgcgaatcggaagcgagtgggaaaaatcgtccgatgccttcaacgagttctacttcaagagagccgtcgcgcgcggactgatcttccgtgccaccgagcgcatcgtttctgcgcaaccttggtacaacggtgggtatcgagcaaacatcgtggcctatacgctggcggtattggccgatatcacgaagcgaagaaaggcgagcatcgatttcctgggcgtctggaatgcacagatggttgatgccgtgttggaggatgccatcgctgtcgtgtctggcgtggtgaacgatgacatcaccaagccaccacacggtatctcgaacatttccgaatggtgcaagaaggaggcatgctggacgaggatacaggctcgtaccgacgccattgccaatcttctcccgccggagttctacgatcgacttgttccgcaggatgatcaggcagcgatcgtgaagactgcgaagcagacgcagaggatcgacaacggcatcgaggcgcagcgaaaagtgctggctgttcccgctgcggaatgggctcgcatccatcagttgctgcttgagaaggatctgctcacgccaaaggaagacggcgtgcttagggttgccatgcagattccctccaagctcccgacagagaagcagagcgtggtgctactagaaattctggagaaaggtcgtcctgagggcgtggttgtgcgtgattcctaa

SEQ ID NO: 531716 - DNA, 966 bp, Stenotrophomonas maltophilia
atgcctgagtcctcgccttgggatgaaatcgccgttcccggcacggacttcaatgtccgccaggttgcggcgaaaacggccgtgccctgcttctggggacgcgatgccagtggcgcctgcctgttcattgtggagcttcacggcgaccacacagcccagtaccggaagaacacggtcacggtgaacggcgtcgatgtcgatcttcgtgccggagatcaggggcggcaacacctggtcctcgctcttgaaagacaggttgatcgcgatcttttcgagggactgtgccgtacccttgcattcgcgctggagcacgccaccgattcggccagctctctggcagtctcgctggcgcacatccgtcgttggaagactttcctctcgggtcgaagtcagcatctgtccgcagaggatgttcgaggcctcttcgccgaaatcgtcttcttgacggaactgatcgatcgggaaatgccgagcaacgccgtcgtcgaagcctggcttggtccggaacggtcacatcaggatttcatcttcggcaacacggctgtcgaggtcaaatccctctcgggcgccgagcgaagcagcatccgcatttcgtcggaagaccagctcgaatcgctgaacgacgcactgttcctgcgcgtgtaccggctgagcaacctggctgacgcggcaggtgcccgctcgctcaacgagcttgtcgccgccgtccaggcgcggctcgacaaggcagaggctatcgaggcctttgaccggaagctggttgcacacggctacgcgccgctccctgactacgatgagccgcgtttcttcgtcagcgacgtgcgcagctatcgggtcgtcgatgattttccgcgtctcatgcgatcgcaattgccgacggggattgccaaggtagcctacgacatccgactggaagcgattgctgaatacgagtgtgacggagccgccgtcttcggaggagagtga

SEQ ID NO: 531717 - DNA, 2661 bp, Stenotrophomonas maltophilia
atgagcattacagccatcacggcagaacgaaacatcgctaacgcgctcatctcgggccttgccaacatggcagaaacgccgacgcgcgatcaggtggaggaaaaggcaaggcagattgcttcaatcttcggctatgcgggagacctccgcaacattgtcaccgaagccatggaatcggttgtgacccgcatgggagcaggcatttcattggtcgatgccagtgcgaagcatgacgatcaatgggttcacaagcgcgaggacgtcacctggacctatgccggtgcatacgaggaatttcttcgcaacgagggctggcctccacagatggttcagtcgctgagcgatgtgacaacccgcattctcgggcaccttcaggatccactgagcgaaggcacgagctggaaccgccgtggcctggtcatcggccatgtgcagtcagggaagacggccaactacacgggtctgatagcacgtgcagccgatgcgggctacaagttcatcgtcgtcatcgcaggcattcacaacaacctgcgcaggcagacacagcagcgaatcgacgaggccttcatcggtaggtcgagtgatcccgaggatcgccgcaacatcggtgtcggtctcgctccgggatatccgcatccggcaacgctcaccaacatcaacgaggacttcaacaagaatacagccgccaagagtggctggaagatcaacgacttcagcaagccgatcatcctgatcatcaagaagaacgtcacgacgctcactgcgttgcacaaatggctgaaggcactgaacgccgaaggggaagaccgcatttccgatgtgccgatgctgctgatcgatgacgaggccgacaacgcatcgatcaacacgaacaaggaagacctggacccgacccggacgaatgcgatgattcgccgcatcctggggctgttcgcgaagtcctgctacgtcggatatacggcaaccccgttcgccaacatcttcatcaatccggatgcctatggcgatgacgtgcgggaagagcttttccctcgcgacttcatctattgcctggatgcgcccacaacctatttcggggcggagaaggtcttcctcaatgaggcgaccagcgaatcgatcgtcagcccgatcgacgattgcgaggatttcattccctactcgcacaagcgcgacgcccctgtccatgagctgcccccgagcctctatcgcgcattcgacgaattcatcattgcacgcgccattcgaaacctgcgcggacaggccagcaagcattgctcgatgatggtcaatgtgtcgcgcttcgtgccggtgcagaaggctgtgcgcgatttcctgagcctcagggaaaagaagatcagggaagcggttctcgcaaactacgcgatgccggaagatgtttcttcaaggaacatgtacatgcaaggcctgaaggatgccttcctcgccgagtatgccgatgtcggggtgacctgggaggaagtgaaggcagccctcgtcggtgtcttcgagcaccttcatctctacgtcatcaacagcaagagtgacgaagtgctcgactacacccggtacgagaaggaaggcatcgggctgacggcggtcgcggtcggtggcctgagcctgtcgcggggcttgactatcgagggattgaccgtcagctacatgtatcgcaacacaaagatgtacgacactctcatgcagatggggcgttggttcggctatcggccaggcttcgaggatctttgccgtgtccatctctcgcgtgattcgatcaactggtactcccatatcgccgaagcagcagaagagcttgttcagcaagccaagcagatgagccgtaatgggctaagtcctgaatattttggactatatgttcggtcacactcgaagagtttgttgattactgcagcaaataagatgcgggcggcagaagaggttgttatcaatcaaaatctcaccgggcagcttattgaaagcacctcgcttcctttggatgaagaggtcaacaataaaaacgaaaaagccatagaggaattgtggagaaaattttctgaccgttttcagccaacggataaaggatggtttatctcggatgttgaaatagaattcatcgaggaatttttgagtaaatttagggtgcacaaaaattcatcgttgaaaaaaatgatggccttggattatctggatgccataaaaaaccaataccccctgggtgacattttgcttatttccaagggagatggcgatcccgcgcacttcaggcttggtccacaggatcgaacggcagagaaagtaaagctggagttggatgagtgggcaatatctggatatcgagtcgcaagtcgaggcgatgagaaattcgggctgaataaagaccagatttctgaggcggagagaatcgcagcctctggcgtcaagagtaaaactggaaaagcatcggattaccattatcgagttgttcggaataagccgttattgatgctccatgtattgagtcctattgaaaacgatagacttatagggttgcgtgttccagcgtttggcataagctatccggatggcctctatcggacagaagttaaggttgttgttaatcgggtttggctaaagcagatgcaggggccggcggacaaccctgatgacgaggaggatttcgatgcctga

SEQ ID NO: 531718 - DNA, 1428 bp, Stenotrophomonas maltophilia
atgagggatctcgggtactccctcgaaacggccatcgcggatctgatcgacaacagcatttctgccggggcagacaggatcgacatcatctgcgatgtgtccggcgagcttcctctggtcgtcattctcgacaacggcaagggaatgacggaggaagagttgctggcggcaatgcgtcatggaaccgatagccccagacgacaccgttcgccaagggatctcgggcgctttggtcttggactgaagacggcgtcgttctcgcagtgccgctccctgacagtgatcagtacaggtgatgcttccatctgtggtgccgagtggaacctggatcgcatcgatgcggcagacgactggatcctgagcatccttgatgaggccgacatccaggcgctgccctatgtcgatcgcctcggaaggcacggcaccgcagtcctctggcgagaactcgatcgcatgctcgaagacgaagtcggggatcggcggcaggaaatcgtgaacgagaagcttgaggtggtggggcgacatctcgccctcgtcttccatcgcttcctttcgggcgaggtcaaggggcatcccagagtcacgcttgccatcaacggtcaccccattgccgcattcgatcctttctgcagaaagaatccggccactcaggttcttccggaggaaattgtccgcatcggcgatgcggaagtgcgcctgcagccctatgtgctgccacaccatagccgtctttccgcgtccgagtacgactactaccaagatcgcagtgacttcatctccaaccagggaggctatgtctatcggaatgggcgtctgatggcgtggggagactggttccggctggtgcccaagggtgaggccaccaagctggcgcgggtgcagatcgacttccccaacagtctggacgaagcctggacaatcgacatcaagaagtcgcgcgcgcgccccccacatgcggtgcgtgagcgcctgcgccagatcatcgccaagatcaccaaccgtagcgtgacggtacatcggggacgcggacagaagctgtttcaggaaacccaggcaccgttctgggagcgctatgccgatcatgatggcatccggttcgcgatcaacgaccagcacccgatcatcgtctcactggcagaaagactctcgccagaggacgcagacctgatgcgcacgctgcttgattcggttgctgcctcattgccggtcgagatgatctattccgactactcgacccacccgcgcgagatcaatcaacgatcggtggatgaaagccagaccatggatcgcctgagaagcctgcgccaggtgctgtatggcgacgggccgggcgatgcgaaggtctttcttcagatcgtgcgctccacgcatctcttcgatggccagatggatctggtcgaaaaattcatcaatgaggcctttgcatga

SEQ ID NO: 531719 - DNA, 288 bp, Stenotrophomonas maltophilia
gtggtgttcgtccatggctgcttctggcatcggcacgaaggctgccgctataccactacccctcgaaccaacgaagagttctggcaacggaagttcctgggcaatgttgaccgtgacaggcgacacgtggagacgcttcggtctcttggctggcgcgtggccaccgtgtgggagtgcgcgctgaagcagtcggtcgaggacactgcgcgattggttgaggagtggctgcatggcgacgaggaagccttggtgatcggtcagtcggcctcggcaagcagcggaacctga

SEQ ID NO: 531720 - DNA, 1626 bp, Stenotrophomonas maltophilia
atgccgattccaataatcgacctctttgctggtcccggcgggctgggagagggctttgcctctctcaagggacacaagcggcagccattcttcgagatcggtctatccatcgagaagactgaggttgcgcatcgaacactgatgctgcgagcggcgttcaggcgcctgcgcggtaccaaggatgtcaggcattactacagctacgtacggggtgagctcgacgaagcttcgttccgtcggattcctgccgtggccagcgccttcgagcatgccgccaaggaagcaagatgtctcgaacttggcaagtccgacgaagccagcatcgacgatgaaatccggtctgcactgaatgggcaggagacctgggtactcatcggcggtccgccctgccaagcgtattcccttgccggacggtcacggcgcgccaacgacaaggatttccacaaggacgagaagcactttctctacaaggagtacctgcggatcatccaggttcacaagcccaccatcttcgtgatggagaacgtcaagggattgctgtcgtccaagcactccggaaatccgatgttcgagaagatcattgcggatctctcttctcccgcggatggactggagtatgaaattcgctccttcacgaagaagggaaacagcgcttctctggagcctgcggactacctgattcattccgaacgctatggcataccccaaagcaggcatcgagtcatcctgcttggagttcgaaagggacagggcgtgccacagcatcaattgctggaacctgtatcaaagcctgtgactgtcaggcagaccattgatgacctgccacgaattcggagccgactgtccagaggggattctctggaggcttggcgcaaggcggttcaggcggcacctgcctacgtcaagggatggagagccgagaacgagtccgccatggtcgaatcgatgcgggcctttgccgcttcagccaccagtgtcagcaccggaggtgccttcatacagaaggaatacagaaggcccaagaaaccaaccgaactgcagcagtggctgcatgatcgaagccttggtggtatctgccagcacgaggcacgtgcgcacatggcctccgatctggccagatacctttttgcggcgacctttgctcattcgcagggttattcccctcggctggatgtctttccgcccaagctgctgccggatcacttcaatgtgcaattcggcagtgagttcgaggccatcccattcaaggatcggtttcgcgtgcagtgcaaaaacgagccggccacaacggtggtggcgcacattgccaaggatgggcattactacattcattacgacccttcgcaatgcagaagcctcaccgtcagggaagccgcgcgcctgcagacattcccggacaactatttcttcgcaggcaatcgcacggagcaatacacgcaggtcgggaatgctgttcctccgctgctggcgcacaagttggccaagatcgtgcggagtcttttgaacgaaatgaacaggaagaggcgcaggcaggtcagtgaccgagcgaacagcaagccgatggaaaacccgaggcgcaacgctcccgagcaggctcaggttccgctgcttgccgaggccgactga

SEQ ID NO: 531721 - DNA, 468 bp, Stenotrophomonas maltophilia
atgaacacctcagcgcacgcccgcatgaagctgcctgacgagcaggaggttcaattggcggcccaaggtcagcgggctctcgcatcctgtctttctggcaagcgcaaaaccaggcgtatccggctttacgatgaagcagaccgggcacatgagatggaattgcctgtctcgacgctgcgcgtcgtggaagaagttctcaacggactcgctaggggtgacgccatcagggtggtgtcggtaaacgccgaattgactacccaggaagcggctgatctcctcaatgtgtccagacctcatctggtgaagcttctggaggatggtgagctgccatttcttcgcacaggcaagcaccggcgtgttcgcctggccgatctgctgcagtttaaggacgcgagggaacaggccagtgcgcaggccatggacgaactgagccgtcaggctcaggaactggggatgggttacgaatga

SEQ ID NO: 531722 - DNA, 366 bp, Stenotrophomonas maltophilia
atggcacttcggatcgacagttgcacgcattggacaggcctttgggtggcgatactgttgatcgcaccttcgacctaccaatcggcggccgcagcagacgatggcatcgaacgcgagcagcttgcggccctggttcgccagctcgacctgatcgatcgcctcgccgagcacgccgcccataccgctccgcaggagcgcgcccgctaccacttcgaccatgcccgcctgcgcgaggacctccagcgcgtccgggcgggcatccaggactacctgacgccgccgcgcgcccagccgcgtgatccggtcgagctgtccggcgactaccgccagtccagcccgccctccgacgaggaggcaccccgatga

SEQ ID NO: 531723 - DNA, 483 bp, Stenotrophomonas maltophilia
gtggccaagccccgcactgcgccgtcaggcgcgcccaagaccgtccaggacagcaagccggccgccgcgccggccgtcacggaagagaagcccgcagagaccaccgcgacgccgctgggccctgcagccgatgccgacgtcgacgctgccgcgtcttcgggcctgggcaccgacccagcgctggaaccgaccgcgaacgaccaggctcctggcgccggcggcgacgttcccgcctctgcaccgctggccaccgctgaagccagtggcgcgaacgatgccgccgccgaccttggcgcggacgtgaattcgcacgacgacgatgcgccggcgcgcgtctgtttcgaggtgctggctccattcaagttccggggcagcgtcgtgaagccgcccgcctgggtcgaaatctccgaggacgacgcggcgatctaccaggccgctggcgtcctcggcaccgagccggccgaacccttcgaccacgtctga

SEQ ID NO: 531724 - DNA, 576 bp, Stenotrophomonas maltophilia
atgcccgcgcccgaactgaccgtgaaagtccccggcgaaaccgccgacaccagcgccgcagccgccagcaccaccaccgcaccgccggacgagcgcctggccgccgtcctgaccctctccaagcagaccattgctgccatcaccgaggcgctgcccggcctggtggcgggcgacctgatcgccctgcgcgacctcgaggtggccggcgacaaccgcaagggcgtcctggcagccatcgcggccgaggacgcgcgccgcgctgcgctggcaactgatgcggcggacaaagtcaacggcgaccggctggtgctgctcgacaacgaacagcaggtgatgctcgagctggccgaactgatcgcgtccaccgcctcgccggaagatccgcgcctcgaggtggcctatgccatcgcgcgccacctcgaactggactggccgtccgcgcagctggcgaccccgccggtgtacgcccaggagcagcaggccaaggccgccgcgaccagtcagccgcgcaccggcggccaggccgttctgaccgacgccggctgggtcgtccccgaaccgcagccgaaggcctga

SEQ ID NO: 531725 - DNA, 453 bp, Stenotrophomonas maltophilia
atggcccggactttcattctgcgcatagagaatgcgcgcgaccggatggcggcagcttggcacttctgccgagaattcctcgagcagggccagacggtccaggtttccgtcgaggaattcctgccgacctgcagtaacgcacagaaggcaatgttccacgccatctgcggcgagatcgcagaacagcggcaatgggccgggcgatggatcgacaaggaaggatggaagcggctgctcgttgatgcgtgggcacgttccgaagggaagcagcaggctgacctggtgccttcactcgatggccaaagcatcgtgtcgctatcgatccaggtccggtcgatgaaggtcagggacatggcggacctgatcacctttgcgcagtgctgggccgtggagaacgacgttgtactgcgcgaaatagcgccgctgcgcgatcgacggatggccgccgcgtga

SEQ ID NO: 531726 - DNA, 330 bp, Stenotrophomonas maltophilia
gtgagcgctcggccagcctggaaaatctggacgatcctggtcggagcatgggccctgatcgtcttcctgggcgctgcagtggcatcggtgaacgaaggtctggattcgatcctccccagctttctggcggttctgtggctgagtgcctgccttgtgatcccggtcgtcgggggcatcgctaccgggcagtgggcggccagggcgtcggggcggctttggattggttgggctgcggggctggcgaccgtgatggtcctgggactcttcttcctgcagctgcaggacgccctccccccctcgatgcgttactggatccgccggctggggtga

SEQ ID NO: 531727 - DNA, 159 bp, Stenotrophomonas maltophilia
atggctgaccgccagcacatcgaatgcaccaacaagaagtgcatcgacggcgtgatcgttgagccccccggcagttggtatggcgctgcgattgtttccgacaactgcgaggaatgcgacctgctgttccagagggatcaggagagctcggatggctga

SEQ ID NO: 531728 - DNA, 582 bp, Stenotrophomonas maltophilia
atgcagaagggcaacacgctgatgctgatccggaacatcgcgcgcaatccgcaggacccggccggtacgccgaccccgcagtatgtcggcctggcttcggccttccgcctggccacgctgaacctgcgctgggatacacagctggcgcagggcatcggtctgcgcctggacggcgattacatccgcaacctggcctacgacaagcaggccatgttcagccgcgcccagaacggcatcgtcaacaactacggcgccggcgatactgtcggcatcgataccttccgtagcggcgacaccgcgtggatggtgcaggccaccttcggtgccaccgagctgaaggagaagggtcagtggcaggcgctgctgggctacaagcacatcgaggccgatgcgctgcccgacgcctacaacgatccgaacttccacctgggcggcaccaacgcccgcggctactacgtgggcggcgcctacgcgctggatgcacgcagctggatcagcggcaagtggatggcggccaaggaagtgtccggcgcgccgctgtcgatcgacgtgttccagctggagttcaataccggcttctga

SEQ ID NO: 531729 - DNA, 1221 bp, Stenotrophomonas maltophilia
atggggttcttagcagtaagcctttttattttggcttgcggatggaagctgtatcgcgattacattcctaccaaggctaaggcgataagaagtcttgggcatcctcagtatttcggggcagcacttgcggcgggattggtgtttgtccttgcgcttagcgtccatacggctgcacagcgccttccgatttatggatctcttctctccgccatctctgacgttctcccgcgttctgaagatgcgcgcgttaaagtcaccgcaccttcagagcgcgtaacccagctgcggcctgtggtcattggtgctccattgaccaactcaaaagttatcttcgcggatcagtcggggaagcctgagggggtgattgggctttcacctctaggtaaaggaaaggatgactttctcgctgccgtgtctattgcggcgtgggcgctattcatcgcagttgttttgcctttcttgctgaatcagccatatatggcgaatcggcatcttaggtatgtggttgcgaggggcgatctggaggttgttgagacaatcctcgcgtcatcagtaaggaccggtcttacggttgctgtcagcctgtcgaatggaaaggtttacattggtgtgcctcttgaaacgggccaaggggggctggcagaaagccaatggattcagatccagcccttggcctcgggttatcgtaacgagcaaggcgagctggtcattacgactggttacaagcagatctacgataagttaaaaggctcgtcgacaaatcgaattcagtcgagcgatttcaaagtggtcgttccgaaaagtcagatcgttacagtccagaatttcgatttggcaacatacttagagaacttcggaccagaagcccaagcagctgaaggcgattcacctgctttggatgcggcaggggtcgaccggccgttggtgattccaggtgatgggctaaacatcccttggtggtgcatgccaaacgcggtggctcctgatgacgcagaagttcgaagcgaaagcggtcccaagccggtggctgcaaaggccggaatgaaggatggaactctctctttggtagtgaggtctttgaacttcatctatggattggggcttgcgggaggagcaatagggattgcgtataagtccgaatattccatgatatggctgttgtctttgctaagccttctagcattgtgcctttgtcccactggtcgatggggaaggacgtag

SEQ ID NO: 531730 - DNA, 231 bp, Stenotrophomonas maltophilia
atgagcgcttcagtgcacaaggatgctccccacctgaaggtgtgcgagggagacccttcgctcggacacactccttacattgccttcgaagagtatctggatattccagggcttgaggatgccgacattcgcttggaattcgctaacaatcccagtcttgaagtggtggaagacctgcggcgcaggctgaagagtgccggactggtctttgtgatccagcggaggccctag

SEQ ID NO: 531731 - DNA, 627 bp, Stenotrophomonas maltophilia
atgtcctgtaggaagttcaatccagaccatcaggagggtctcatggcagcagtgacagcggcaggtatctacggaaatccggagcgcattctctttaaaacgatgccgggcggtgactggagaaagtttgtgggccagtctaacgatgatccaagtgctggaggcggggctcgggatcttcgatttaacggatttaaggattttgaagcgatagcgagagcatttttccctcttccgaacccggtcctacggaacagaaatggggttgcaacgaccgttaatgcgtattcagggaaattgatgcacggctttggagtgccgcagtttgatgacgcatctttcgagcctcctaccaccgcgcgagacctggaatggagatttgtccgcgtcacaagtcaagcctcactcactaatgctcagccatcggcggtgaacggagacaaggacatcattgttctcgttcaagaaaaagttggagaaatcgtagccgttttcaccacggtcaatacgctgccagcacacagcatttctacgtttatctcggcagcctgcgcggctccgaggcaccctaactattcagctgccggcttctgggacttggtgacgggccatcaggagcacaactga

SEQ ID NO: 531732 - DNA, 1305 bp, Stenotrophomonas maltophilia
atggcccgcttctccgtcgtagagtatgggcagccggtaagccttcttccgtccctcgcagcgtcaatggggaaggggacggctgaggctgcccggcgcatcgccgatgccggcgcacgaattgcgcgtcaggttgggctcaagaagtcgccgattgaggtgagcgggccgttggtatcttccagtaaggtcgcgggccttcttcatttgggacgatcctgcgagctcgagatcgcgcccaagtttctgggggaacacgctgacggtgctggatggcaggaggatttcttctttcttgccatgctatccaagcatggacacgtgctcgcctctgatcgcatacgggccgacaccgatgtggacagcgatcttgactcgctgttggctcgggcgatcactgagatgtattgggagcatcaccaccgcccaatcagatcctacaaaagatccatcgatcacgatttctttctcgacggtgacgtagacccatttgatttacgcattccaggagcggctggatatccgcaggaggtcatccgatacagcagggccaaccgccacaatgccatcatttctgctgctgccggggttgcacgtaggcacgtccgaaacccggccgcgagcgctgatctgtccagagtgagatcacatttgggagttcagcctcgcctccctcgtggacatttgcttcaccaggtggtccccggtcggtcgcggcgttggcaggcattgatggatctttcggtggatgtggtgaacggctttggcatggggttcaatgaaggcgaggctagggctcctgggttcgtcatggggacgtggcagctatggcaggatctcgtcaccattgcccttcgccttggctttggcgcacgcaacgtgctggcggaaccgcctctggaactggggatgagacattatccctacggcaaaatgggcaagcttaatgtcaggccggatacatccattttttcagatggacgccggttccatgtggatgcgaaatacaaaggccgagttgaccgtggtcgtgagcgcgccgctgagtcagacatctatgagtccatggccttttctatggcgagcaaagggctccctgtgatacttgcttacccgcggctcgcgtcatcgcccgttgttcctctgggaaggattgaagtgctggagcaggttcagatatccggctgcgggccaatcttggcggtgtctattgaggtccgtggcatatcgggccgccgagcgttagccagctttgtccaagaaattaggcagggtctggaaaagttgcctgagctcttgaaatag

SEQ ID NO: 531733 - DNA, 234 bp, Stenotrophomonas maltophilia
atgctgctggctaaggggtgggacaaggtggtggcccatgtcgcagaggtcttctatggggacctccgtagcgtggctattgccttgaacgccaccgagttcgccaacgaggagtcaccattgaagcttgttgagcacacgttcggcaccgagcttcgatacgctttggaaggggagagccagtggacacgcaaggctttgtataaaggcctccgaagcattgctggaaagtag

SEQ ID NO: 531734 - DNA, 2223 bp, Stenotrophomonas maltophilia
atgagttcacctggaacattggaacaagcgcggctgcgagctgcggcgtctcagattcgcgatttctcaagccagttcaagtctaagcaggaagaagctcgattccagttgctggaggctgtggcagcacgccttggctcacacgacgttgcagagttccaaggagcttttggccgggctttgattgctccagctgctcagctggacgaagtcgccggcgcagtgcttgcacggattcgtgtggctggcattgaaccggcccttgctctgagtgcactctctcgggaggcacttacggcgtcccagcagaaaagcactggggcgtatcacacagactttcgactcgctcagcgtctggcgaaggtcttggctccgaacctaaccgccaagagtaaggtcatcgatccggcatcgggttcggggattttgcttgtagcgctgaccttggctgtatgcggggatgatcgtcggatgacggctcgttggcttcggaatggcgtccatgcaatggacctttctgaagctgcgcttcgcggggcaacattgtctctagcggcgctcaccgatgaccttagtgcggttatcgagatgcgtagccgttggagagcaggcgacagccttgcgctcgaggcggcagagtgggaaaggatggctccgcgcggctttgacgcgatcattgctaatcccccgtgggaaaaagttcgtctaactaagcacgagttcctcttggggaagggcaccgctcgtcactacggctctgatctcgaacacatggaccgcgcggcgttcgaagcatcgtcgggcgaggtgaagtcttacgcagagttcctggcgaggcgttttcctctcctggtgcgaggcgagccagacttgtatgcggctttcatggcgctttacttgaatctgctgaagccgggaggtcaggcatcagtcttggtcccgggggggctgatacgctctcaaggtactcaagccctccgggaagcacttttcgaccgcgctgaacggcttgagattgggctgttcgacaatcgcgcccgcttctttggaatagatacccgctttaagttcttggcgctcagctttactcagcacgctaacacccatacaaaggagcctatccaactgacccgtgagggtgggacggaaacagagacggaggtgttgagccgagttcgcattggaaggaagaccctgcgcgcagtgcggccggaccttagtgtgccggaggtccatagcaatgcgagctgggcattgttccagcgtttggttgagcgtggagagcgtatggacgaccctctttcgccttggtttgcagagttctgccgcgaggtcgacatgacaggccagcgctcatatttcacacggtgtccggggaagggaaggatcggagttattgaaggccgtcatgttcagcaacaccgctttggtgcgaaggcctacgtcgctggatcgggccgttcagccgtctgggaaagccttccgttgggaggggctgaggttgtccctcagttctacatcgctgcgaaggactgtcctgccaaggcccaagagcgcatccagcgccgtagggtcggcttctgtgatatcgcaggtcagactaacgagcgctccatgatggcagccctggtggagccgggctatgtgtgcggtaacaaggtcccaacagtctgcttccccaatgaccccgatgaggatcgcctcttcgtgtggctggccgtcgtcaatagtttgacctttgactggatgctccgcagggtccttacgaccagcatcaactactttgtgctcttaagtatccccatgccctcgataaagcccaacgggttgccttggaggcgtctggccaccgctgcccgggagcttcatgagcttaacttggctgccaggacccctgaaaccgaccgtgaggccgcaggactgcgcacaaggattgatgtcgaagtggcccgtgcctatagcgtcacccttgcagaacttgatctaatggccgctgatttcccgttgttggatcggggacagccttccttggaacaggacagccggtcaacgatcacttgggactctgtgctcgccggcatgtccggcggcaaggacccttggcaacggcgaatggttgctgcgcaggacgcaggggcgatcgcctttgttccagctcagcattcaggtttcgagccggaggaagggggcacttatggagcagagcgggtcgagtcaacgtaa

SEQ ID NO: 531735 - DNA, 1071 bp, Stenotrophomonas maltophilia
gtgaccttgcgatacatcggttcgaagactcgcctcgtggatggcttggcacccttcatcgggcaatattccgggaaaggtcgcttcgttgacgccttctgtggcatgggctctgtggcagcccaggcatcccagctaggctggcctgtgttgctgaacgaccacctgtcttacgctgctgtcatgagctcggctcggctgacgggccgcaatcaggtgcccttcgctgagctgggaggctacacctcagcgatagagcggctgaacgaactagacggccggcgggggttcatctggagcgagtacagcccggcttccttgcagcattcccgcgcaggtatagaacgtcgctacttcaccgaggccaacgccgcgcgtatcgacagctgccgttcgcagattttcgactggagcaaggcggggctgctgaattcttcagaagaacgagtgctgttagcagatctgctttcagccgccaatcgtgtggccaatattgcgggcacctacggatgcttcttgtcgcgctggacggcgcagagccaaggaagccttttgcttcgtccgcgtgatttggtcgacgaagggatgccagtcgacatttcggtgggggacgtgatggatgtcagcattacccctgatgacaccgtctacttggatcccccttacacgaagcgccaatacgcgtcctattaccacctcctggaaacgatcgttcatggcgatgctcccgtggtggagggtgtttcgggacttcgcccttggcagcatctggcatccgacttttgctacaagcgaaaggcgctcgcggcattggttggcctgattcaaggtgttgacgcacggcgagtcctcttgtcctacagcagcgaaggtcacgttgatctggacgagctgaccgaacgtttggttgacactggcgttgtcaatgttgaaccactggcaagtattggtcgctacaggccaaatcagaaggcgagtgacaacgcttctgaggtcagtgaatacctcgtcgtcatcgagccgaagtcagcggcctcgctgccaagaatgagtgcgacggcacggaaatga

SEQ ID NO: 531736 - DNA, 309 bp, Stenotrophomonas maltophilia
gtggtcgacctgggcgacaagggcgcctccgatggcatggagatggacgccaacgggcggttgtatgccagcgactacgagcacaacgccatccatgcccgcgacgcgcaggggcgatggacgacggtggtgcacgacccgcgcatcctgtggccggatacgctgtcgatggggccggacggctatctgtatttcaccgccaaccagctgcatcggcaggccggattcaatggcggcgtggatcgccggcagacgccgtacatggtgtatcgcacccgggtggatgcgaagcctgcgccaacgcggtga

SEQ ID NO: 531737 - DNA, 555 bp, Stenotrophomonas maltophilia
atgcagcagatcacggtagcgacggacgctcaacggcgtattcgccagcgcgagctggccatgctggacgagaaagaggctcaggagcgcgaggaagcgcggaagaacaaggggttcacacaggtgtattcgaggggttggaggcgcgtacgggagcttgctacgggcaattcaggcgctgccggtctgtacgccctctttgccgagcacatcgacccgacttgtggcgcggtgatctgcgatcagcagtttttggccgatcacatgaaggtgactaccaggactatccggtcttggctcgcctacctggaagaaaaccgggcgcttgtccgcatccctgtcgctggccgagtttgcgcctacgcgctggaccctcacgaggtctggaagggctacgacaacgccaaggaatacgcggccttcgtgaccaaaaccttggtcaacaaggacggcgatatccgccgccggatcatgtcgatgttcagcccggaagagcggccaaacgacgaccgcgacccgaacacgctggacatgtttgaaggcactccccaatga

SEQ ID NO: 531738 - DNA, 147 bp, Stenotrophomonas maltophilia
atgcgtaagggccagacttctcagatcgaagccttcgccaacgtcagcatacagagcactacgatcgcccagctcggtgagtgccgcgtcaaagctctgccgctcagattgattcaatacaattgctcgtgctgggagagcatctga

SEQ ID NO: 531739 - DNA, 855 bp, Stenotrophomonas maltophilia
atggaacaactttggcggcggcgcgggctgatcgtcctctcgttacccgtactccttattgttctgctgcggaagcaatcggtccagctggcgtcggcactgatcttgtactggaatgcccgcccactgttcggtgttacgccctacacgatgtcggagctattggccttcttcacctccaacattgaagccacaatcggcttttttggcatcgtcattgcctttgcagctggtcgtggcttcatagagtcgaaacagctagatctgaggctcagtgttgagggagatatcgccaaactgtctgaggatgcttctgcattgatttccgtgtgccgtcgggccgcacttgcgatgattgaagtggagaggctcggcaggtcctcgctggaacattcggtcgcgacgaactcagcctacgtcgcattccccccagctatggggcccgcgttccgtgaattggccgatagttcgcgtgagttgccgcaggcacagcgcggactggtcgcaattggccgtaggttcggggagatcacgaggaagtctggaccggtggtgagaagcaacatcgtgacggcattctcgttagaacgggcagaggcaaacatcagcaagatctcggaggcagcccggttgatcgaaggtgctgacaagctctcggttgaggagtttctctacctgcaaagtcatcatcgcggagccaccccgcagcaacttctggaagccctaacgaggcacgagcttagatttcaagcatggatgggtggcgcaagcgcggtaggcgccggttcgatattcaccccatcaatcatcgtgtgcgtagtgctgtggttccgactctggtcggtgcgggagtga

SEQ ID NO: 531740 - DNA, 330 bp, Stenotrophomonas maltophilia
atggacgccatcgagaagcgggcgcgggagctgctcgctgctgagtacgagcgctccggatatggcggttcagcggagggtatccgttccggtgacgactgtgcgcacgaccttgaagacgccagcatccgcgccatcgtcgcagccctcacgccgcccgagggctacgtgctcgtgccggtggatctactgcgtatggtgatcggctgtgcctatccagtatcgaccgacatcaaccagcgtggctacgcatggtcggaggcgtacttggaccagatgctaccctgcgtcaaagcagccctggccgccgctcgcccggaggtgccgtaa

SEQ ID NO: 531741 - DNA, 150 bp, Stenotrophomonas maltophilia
atgaagcctcccagcagaggcagggcgctggagaccaacatgcgcaccgcaacccggcccctttgggccaacctccgccccatcgccgccgcgttcgcggccgcgttcggcgaggccttcagcagctgcgtcagcagcaggaaggcctga

SEQ ID NO: 531742 - DNA, 258 bp, Stenotrophomonas maltophilia
atgagcgctcctgtcgatgtgctggcggtcatggatggtgcaatcgaaacctacaagcacctcaatcgagaagcccggtcggaggaagaccacctcctcgacattgaagatgctcaggcagcccgcgccgaagttgccgacctgatcgaggcgattcaacaagagcgttcagtcgggcatcgagagtacagcgcactagctgctgcccgcgagcgaaccaacgccgccctcgcccgcgtcaaaggcagtgccgcatga

SEQ ID NO: 531743 - DNA, 225 bp, Stenotrophomonas maltophilia
atgaacggcgataatgagcagtatttttccgaaccgcccccattcatgagccagaccgccgaaacccttgccgcgcttgacgatcgcctgcgcggcctgctccgggactacgcgcgccgcgaacccgcccacgacgccctggctgccgaattcggcacattgctggatgatccggaagatccgttccgccgcgagcgcctggccggccacttcaccgccagctga

SEQ ID NO: 531744 - DNA, 612 bp, Stenotrophomonas maltophilia
atgaccacgacatcgcgagatcctttggaaaaagagtggatagctatgttgccaggccggatgggcggattgtttggtttaatcaaaaggcttggcgagccgcaggtgaagcctcaggagcggagcgtgtgtatgcaggacattttgagaagatactttagatcggctgcctttctagtgctggtgggttggtctttgtcaagtggaggggcttcggcttcaggggattcaattgtaaagaatcactgcaacgagatcgtttccagagagctcaagaagctatgcggcgtacctattgccaggatcattgttgaccctgagaagttggattcggtggaggtagagaccagcgggtttatgctttatgagaacgataggggtgttgttttctatcctgggcccgatcttccaaatcgcaccgatatgtatagttgcatcatcgtgtggactgagaaggaaaccatagactgggggctagttaaaaggagacatggcgtctattttgcgaccgtttctggaaaagttatgctggacgcgtctcgcaagagttgctcggccgtcattgctaacgccaaggtttacgatgttgctgcggttaacctttccaagtga

SEQ ID NO: 531745 - DNA, 465 bp, Stenotrophomonas maltophilia
atgagtgaggcgagaatttttgctttgtctttgctgcttgttggctgcgctaacggggagcctccgggtgagcggttctcccgaaatgagaagcatgaagacgcgcgaagcttggtcctttccgaagaagatttgaaacgtcagatgtcgatggctgaaaaagggggagtagaggcccgcctaaagctcgaatggcactattcgacacgtggcgatatggagcggtatcgctactggcttgaggagggcgccgcgagaatggatgtcagtgcaatgcagcgattggcactgtttctgtctatggaacagggcgggggagattgcaaacgtgcgatgcagatccttgagcagggcttgcgtcttgatcccccggagtccacgcgcgcattgatggagatggatcttcagagattgcgccatgagcggatcggaattccgccctgcggggtgggttttcctgattga

SEQ ID NO: 531746 - DNA, 624 bp, Stenotrophomonas maltophilia
atgggtaacgcggttcgactgcaatgtcggcccctacgctactgcggcgcgcagtggcggcaactgcggatgccgcgttgccatccgccaacagcgagagcttcgtgctggaggaaaatgaaactaaattatcagctttgtgtggctttcttcttgacgatttccgcggtcggttgcggtcttcaggaaggagggcagacagcgcccgcaaagggctgtgggatcggccagaatccagtttgtcgagtcagcttccgggcgctggctgccactcctcggctattcgatgggaaatcgatacgcatggagggctatctcggagttagtcgggggcactttgtattgagctccagcaaggagctgttcgaggctggagtgactgatgagaccgaagttcgtatcagggggccaatagatctccagagtgacgtgtttgatcgctatgcctactcgtgggtatcagtgactggggcgttcaggcttaggaagacggacgggtcgacggatgatcttcttctcggcgaaatgcatcccccacttgatgttcaatctttgagggtccctggtccgattccaaaagctactttcggagaagtgtatgttgatctcgaagatctgaagtga

SEQ ID NO: 531747 - DNA, 240 bp, Stenotrophomonas maltophilia
atgaatggatttgcagtgcaccggatgctgctgaagatggagcgggagcggccggaagtgcttgaggcagtcggcatcatcagaattgattggtggtttcggtgcctgcgcgggattggattgcttgcgctttccggcaaaggtctgatgatcacgcagggggagcggtggatgctgaggggtgtcgtcgcgacctatatgctcttgatggcctgcggcatctcgatgcttgttggctga

SEQ ID NO: 531748 - DNA, 972 bp, Stenotrophomonas maltophilia
atggaatattctgatagttacttgcgtgagtttctgccgaggtttagccctgcgattgagctggtccctagcgccgtggtgcgcgctttcgagcgccgaggggagtacattgtcgatgaacctgagctcattgcacgatcggccttctggacttatgcgctcttctctgagatggatcttcgtcagtatcgatcagaggatctagactatcgttgggaagtgtcaccgttgctctcgactatccactctggcttgggtatgcagcggatatcctttgggctctttgacatgagacgtgaagagcccgggattggatttatttttgacgttcctgaatggaacggtccaaagttcttgatcatcgatacgctcagttttccgcgcttgggaggggtgagatttcccctcgctattcgacagacacggatcgagcatcatctggatcatcccaccggtgcgactagcgcatgctgggctcgatgcaatagaaccttgcgatggggagtcatcaccgcaggacacgcgttccatggtatccgccccggcgcgggcgtcacgatgacatctggcagcaccgccctgcttgaccgtcattactttcaacctatcgatgctgccttcgtgcatacggtggcgcccgcttactctccagcgcagctcccagttgagaagtttgcaacggtgggattgccagtcacggttgaacttaaatccggtacgaccgagcgcacagtcgtggatgtccagcacaattgcggtgtactaaacacgaaggaggttggtgttactttctgcttggatgaaccagagtctcccggcgactccggatctttaattcgcctccgatccggcaaggcgctcggtatatatcgtggcgcaatgtcggtgccaggcgcgcccagcggaagtcgtggtcttgctcaaaatttcaagcaggctattcttgccctcaacgtcatcccctatctttag

SEQ ID NO: 531749 - DNA, 402 bp, Stenotrophomonas maltophilia
atggttgatgccacgcgtagcgagttcgagatttccatatttgtgcccagcagcgatgtcggactccgcgaagaagcagatgatccggttgtgcaccatgcgattcgcgacttgataccaagtctatccagggtgaccaaggtgggcgcagatcagctcgaggagcaatgggcacgaacaatcgatatgctaatgaaattcagctccgcggctgcgggtcggtcgacagaatggtgtattcaggagatcgaggtcggaatgaccttaagcgcgaagggtgagctcttgttcatcgcagaggcgggcgcagaggcgagcatcaggcttaagctaacgcggaagggtaatttagtacctgaggcatctgtatcctctccgctgtcatcgcagcaacgggtttga

SEQ ID NO: 531750 - DNA, 597 bp, Stenotrophomonas maltophilia
atggcggctgagagtaagaagggcgtgtttgatccgtatctgtgcattctggtctttgtcatcatcatcatgatagttgcaggtcagtggtcggtttggcttggccatccgcccggcgctcgtttggtgaaaatggtcgaagttggtgctgcaatgctagccgccagtggtgtaatgctggcgacctacatcagctacgtacaggcacggggttctgaccgaaggatttctgaggaaagtgcgcgccgtaagctggaagagacttttcggttgattgagaggtgggacgatccgcactttctctctgctcgaaagctgagtgtggagttggggcggcaatccgataaaatgtcgccagagcagttagttgagcatgtcgcttctaatcaggagctaagaagttcgatttctctcatgatgaattattttgactttgttcggctgtcaattaagtatgatcgaattgatgggtcaattattaagggtcagcttggtcatgttgcgaacgttacacttgataggtttgggccttggataaagaagctggggtctgtttatgagggcgacattgctgagttcaagagaatgatggtgtaa

SEQ ID NO: 531751 - DNA, 822 bp, Stenotrophomonas maltophilia
atggaacgagagacgtgtcgatggatccaattgaccgatacaaataacttagtcactcttcatgcagaaccagattataatttcctcccaaacctaaaaatcgccaacaccctattgaccatgagcatacgcaaatccgtaagtgtgacaagcctctccgcttatatggaccacattgatagtttgtactttcacgaagaggtcgtcctcttcagaggacaggattgtagaaggaaccttgtccccggcatctggaggaacaatgaaaatttctccattgacgcagaaaaacggatgttcaatgaattcaagctccaagctgcggcttatctaggcggcggaatgaccgacatggacacattgatagtcgcgcagcatcacggactgaagacccgcctccttgactggtccggcaacgcactagcagcgatgtggtttgcttgccaagcaccaggcgacaagagccgatatgtctatatgctcggcgcggacgagatggtggaggatgactactccgcagtgaatccattcaaaccaggaaggactgtcgtcatacagccgagcgcggcaaatgcgagggttcgagctcagacgggatggttcacggtgcacaactactcgaaaaagcagtttcttccccttgagagcaatagtcgaatttctggaaagatcaccgaagttgtaatcccacccagctctcgtcaaagcatcgttgatcagctagacagagcaggcgtaaacgcatggagtgtatttcctgatctcgacggtctttgcaagcgccttaactgggctcacatccaaagatctatcgctgcgtga

SEQ ID NO: 531752 - DNA, 336 bp, Stenotrophomonas maltophilia
atggacactacgattgcgctgctgcaaagatggtactcgaatcactgtgacgaagattgggaacattcctacggtatcaagatagacacgttggataatccggggtggattctcactgtcgatctggttggcacggagttgagtgaatactctctcccaaggacgcgcgttgatcgttcggaagtagactgggttcagtccgagatttcggatgggcgctatatcgcttgcggtggagcgctcaacctggaggagatcgtgctgcagtttctgaacttcgctgagggtccctgcatcgacagtaaggatgcgcgaaccgacggcgtagggttgtaa

SEQ ID NO: 531753 - DNA, 192 bp, Stenotrophomonas maltophilia
atgaagcccttcggcaacgggtcgtcactgcatgagcgtgatcgcgagttgttggtcgacgccttggttcaggagttgttggagactggtttgggagctgacgatgagcccaatcaacgaggcctggagatcgaagagatcattgatttcgtcgtttccatccctggaccgcctgatgcgaaaggcgagtga

SEQ ID NO: 531754 - DNA, 759 bp, Stenotrophomonas maltophilia
ttgaaggctatgtacggattgccgtcggaatcgcttgcgttgctttcaagcgcaaacttttcggttgatgtgccggccactggggactccgcatctttcaatgtgttgtgctctcgcgtggcgaattgcagatttcgctattgcccagaatgtcgctctgatcctgctggttttcttaagtgccgccgaggtgccgcattcgcgaaggcctgccagaagtcggcaaagagggggtttggttctccgcaactgagagtattgcattctgcggctgcgccggacgctgtcagatctggcaattttcgaactgatcgagtttgggtggggaggccgggagatccgcacgccatcattgcctctcgaattgatgtcgaagctcacatcaaagagctcaagaagctacatgatcgcctgcatttgcaggggagaataatacttcttgttttcatgatgacgatgcttcatccattcgaggatggaaatggaagaacaatgcgagcattgatgctggctatggccgcaggtactggaggtcacttcctgtccttcttcgcgctttatctgaagactgctcagcaagacatggttgtggcagtaaatctcctggccgatactcagctgggtccgatgcttgagttacttgaaaaatcacgcgagttctatttgaacctgatatgcaatgggagcggtgccgtgcacgagtgggtgagagcccttgaggatgagaagcttgttgcgcgccatatggattttgattga

SEQ ID NO: 531755 - DNA, 3825 bp, Stenotrophomonas maltophilia
atggcttcgcgcaaattccgcttcatggccgcaggcggcgccgcactggcgctggggggaggctatttcatctacagcctgatggccgcccaggcccagggcacgctggcgcaggcgccgctgaacatccaggtgcagacggccccggcgttcctgatggcgctggatgattccggttcgatgatctgggaagtgctgaacaacacccgcgatggcgtctatcgttggaacacctcgaccacgggcggtcggagggtgggcttctatgccagcagcggaacaccttatggcttcgacgaaggctcggggctgaactattacttcacgtcgcccaactatggacgcagctcggattcggcgattccgccgctgaatgcttacggtttcgtacgctcgccggatgtgaactcagcctacttcgacccccgcgatgactatccggagtggaagaccggtgtagccgaccgccccagctacatgacgatcaatccggaggcagccccgttggatccgcggccctccaagatcggcaacggcaagatcaccggcgtgcagaacctgaccgttgattctctgcgaaacgatagtgatggctggcgcttcgccttccaggccgggatggtcattccggtgggaacactgattgaaaacgggcgttgtggcgtcaacgatggcagaggcggtaacgcgacgaacacctatgcggacgggagtaccaggctgccgggcagcttccggcgcgttaccgcagcgatcaccgttgcagcatcgagctacaactatccggatcggtctcccagacccgaccgctgcctggcggccgtgggctattaccctgcaacgttctatctggcagatccgtcgacgctgccggccgggtatggctatctggacaagttccggacaaagatcgacaacccgacccatggtcgtccaggcacgctgtacaagtacgaaatccgcaaggacaacttcgctacgaccgagcagtacaccaacgcgatcaataatttcgcccgatggttcagcttctaccggacccgtcgcgaggcgctgatcggtgcggccaccaatgcgctgcaccaccagaccaacctgcgtgtcggctggttccgcatcaatgatcgccgcgacgtcacgatgtacaacatgacgaacgaggatgagaaggcggtgctgttgagcgacatcatggccgacatgcgtgccagcagcagtacgcccaatcgatcggccgccgattacctgggccagcagttcaagcgcaccgacgcgaacgcgccggtactgctgtcttgccagaaaaatgccggcatgctgttcaccgacggctacatcaatgaaagcggcaacaagacgttgatgaaggacctggtggcgccgtactacgaaaagtcgctggtggactccaaggagaccgaatccgtgccagtgccttccgagtgcaagggggccaatccggacccggcgctggactgcaagacgcacctgcacatgaatttctacggcgtgaccctgggtacgctgggcaaggagttcggcgtcaagtacctgccggatcccaaacggccgtgggtactcagccccaatccctatgtgaacaagccgaacttccccacgtcgacgcaggatctcaagccggaagcggtcgatgagttgtggaacgcggtgtatgacacccgcggcgaaatggtcaatgccacgcgtccgggcgatatcaccgctgcgatgcgccgcatcattagcaatgtcgcccagggcgccacgccgtccggctcgcgttcgctgaccggcgcgcgcatcggcgtaggctcgttgtcggtggagccattctacgaagcgaccaacaacggcaccgactggtacggaaaactgcacgccttcaacctgaaggtagaagaatccactcgcaaggtcatttcggaggaggcctgggaagcctccgcacagatgccagcggccgattcacgccgcatccgtttctggcgcaacggcgcattggtggatttctccggtggcaacgtcagtctggccaacctgtgcgacaagtcgggctcgctgtacccgggcatgaagatctgctctgaatccgaaatcaccacgctggccaccgactcggctacggcggtggcctatctgcgaggtgccaccggcaacgagaaacgcaatggtggcaagctgcgtgaccgcaccaccgtgctgggcgacatcatcacctccacgccggtgctgagctcgcccctggacgactacggcttccgccgtctgccgggtgcgatcggcagcagctacgccgagtacatgaccaccaagcgggatgatcgtcgttacatggtctatgccggtgccaatgacggcatgctgcatgccttcgatggcggcatgggcgcgactggggaaatggacagtgacggcggcaaggaactgttcgcctacattccgtccaccgcgctgggccacatgggcaatctgctgctgccctacgatccgaccaatgaaaacacccagcgcttccagcatcgctactacgtcgatggcccgataacggtcagcgacacctacggcagcaatggctgggccacctcgctggtgggtactgccggcgcgggcgggcgcagcgtgttcgcactggatgtgtccgatccaggcagcttcgggggaaccggttcgctgctgtgggagatcagcgacctgaactcggcgctggacagcgaagttcgggccaacatcggccatgtactgggcaagccggtgatcgtgccgatgaagaacgcagacggttcggtgagtttccgcgcgatcttcggcaatggctatgaaagcagcagcggcaaggcggtcctgttcgtggtcgacatggtggccggcagcaccccgaccatccgcatgatcgaagccgtcgagtccggcaccaacctgccggccggcagcaatgggctgggcaacatcgtcgtggtcgatcgctggggtggagcggggcagaacgaacaggtgcgcgatggcctggcagatactgtctatgcggccgacaagcgcggcgcggtctggaagttcgacctgcgtaacgatgctgcaccgacggtgccgttgttcaccaccgatacgcatgtcgatgcgagtgatcgcctgacctatcgtcagccgatcaccggtggcatgaccgtgaccacggggccgtccggcggtgtgatgctgatcttcggcaccggcagcttctcctactacggcgacgagaacgattcggcgctgcaggcgctgtacggcatcaacgacaccgaggccggcctgtcgaccgcgacactgacttcggccaacctgcgttcgtatgccgccggcatcagtgacaatctgcgcacgctgagtgcaggcagcattcccacggtcagtcgtggctggacagtgacgctcgccaacaaggagcgggccgtgggcaatccgcgcattgtctccggcgtggtgttcttcccgacctatattccttccgaggcccagggctgttcggtggatggctcgaactggttgttcggcctccaggccagcagtggcgaggcatcgatgtcgcaggtgcgctttggcgcgccggacggaaggtcgcagggcgcagggacggcgggtgttgcgctgaacaccggcggcaacgcgccggtgagggatgtcaccacctcggtggtgccgcggctggcgccgccggacgcgggcaagcctggaagtccgccgccgaaacctccgggcgatgcctgcatgatgcagatttcggtggctggcgcggatccgatgtacctgccgtacccctgcggtcgccagtcatggaggcagatccagtga

SEQ ID NO: 531756 - DNA, 306 bp, Stenotrophomonas maltophilia
atgaatcgcaagctttcctcgccgatgcctgaccctactccccgcccgaacgatggagaggtgcccgtctggtacgaccttctcagtctggcgctctgcgctaccgtcgcatcgatctccagcaccctgctgcacattgcgggtcgcacgtttgttgaagtggcaggcgcggccccgatcgcaagctggggccgccctggatacgggctgctgatcgttatcgcgttcctcgcgctggcgacctggtacttccgcgcgcgcgcgaaggccgcatataaggctctgccggcccgcttcttcctctga

SEQ ID NO: 531757 - DNA, 771 bp, Stenotrophomonas maltophilia
atgggtatcgggcgctgtaatgcgtcggcgtcggtggttgtcggggccggttactcgctgagcgcgctgcaaccggcctgctgcctgcaccgtccatgcgcgttcatcgacgccgatccggacgcggcgcccgacccggtactgattaccgaactgcgcggcatgatcgagcatgtgggcccgttccacgccggtgagtacatccatcgcatgggcgaacccatccagggcgtctgcgaggtgcgctccggcgcggtgaagacggtggtcgatgatcgtgacggcggcgagcagattctcggcttcacgctaccgggcgagctgcttggcttgaacggcgcgcagggggcacgccaccccagcagtgcggtggcactggagacggtccatctgtgccgtatgcctttttcagcgcttgccgacgtggcgaggcgtttcccgcggttgcagttgcggctgttctccctgctgagccgggagatcggcaaggccgcgctgctggcggccaactgccgggttgaggagcgactggcgctgttcctgctcgacatgtccgcgcgctaccggcgccggggcctgtcgccggtccggttccggctgccgatggcgcgctcggagatcgccaaccatctgcgcatggcgccggccaccgccagccgcgcattgcgcaggctcagcgatgagggcctgatccggttgcagcagcgcgaggtgcatctgctgcagccggaagcgcttgccacaatggccgcctggagcctgggcgattga

SEQ ID NO: 531758 - DNA, 591 bp, Stenotrophomonas maltophilia
atgagcaagacgaagccgctgatttccacccttgtcctcctggccgcaaccggtatgccggccatcgccagcgcgaccgatcatcaagggctgtatcgcttcggcagcctgggggtggccaccgtcgaagccgaggcttccatggccggtgcgcgtgtagagcgcaatggcactgcgcccagcctgcgcgccggtatcggctaccgctggagccgccacgtggcggtagaggccaacgcgcacaccacgctaggaaaggtgaacctcggtagcctgggtggcgtgcgcagctacggcacccagggttcggtactgggcatcgtgccactgggcgattcgttcgaactgttcggcaagctgtcggctggcatcgagcgcaatcgctggagcgagggtgtgcagaagccgtacacggttgcgatgaatcacatgcatctgggcctggggttgggcgcgcgctaccgcatcaccaatgccatggcggtccgcctggatatcgacagtttgtcgcagggcagttaccacgccgggccggttcgcggcgacctgagcctggggtcagccacgctgggcctgcagtatcagttctga

SEQ ID NO: 531759 - DNA, 366 bp, Stenotrophomonas maltophilia
atgaacgcatcggatgtacccaagctgcgcgcgcactacgccccggccaatgccgaagacgagagcgccgcaccgcctgatcctttcaacctgatcgtgctgctggaccagatcggctgcggcgccgccgccgacggccagccctggcccgaacgccaccagctgcccggccgtcgtttggcgctggccgacaccgacggtgccctgggcggcctgcgcatcgtgcaggagcttctgctggcggccgagcgcgcccgccagaacggcggcccggaacactacgtgggcgaccgcgtgatggaaggcctgaagctggccgccctggcattgaccaactacgccatcgtgcgcctgcagcccgggtag

SEQ ID NO: 531760 - DNA, 747 bp, Stenotrophomonas maltophilia
atgaacctttcacaggacaccgaaggaagacttgttgcgatgaagcgcatcgtcttgccggcgctgttcgctgcttgcctgttgtgctgcccggtggcgcaggcggaagtaacggtggtgggcacgcgggcggtgttcccggcagcggcaggtgaaatcagcgtcaccctgaagaatgaagggcagcgtgcgtcgctggtgcaggcgtgggtgtccgacggcggcgccgaccagccgcccgaggaatcgaaggcgccatttgtggtcgatcggcccgtgtttcgtctcgaccccggaacatcgcacagcctgcggatacgtggcatcgcaacgggagcgccggtcgatgcgcgggaacatctgtactggttgaacgtggtggatgtgccgccgcgcgacgccgccaccgccgacaatgtcatccaggtggcagtgcgcttccgcttgaagctgctgtaccgccccgaaggcgtgggcgtgccggtggacccggatgcacgagtgaacgtgcgcgccacatcggcggggctggaggtaagcaatgcagcgccgcactacttcaacgtaggcgaggccacgctggaatcggcagcgggtgagcgtgtgctggacagtttctacgtcgcacccggcgagacaaagcagcttgcattcccggccggcttctccggtccggtcaccgccatccgctacagctgggtggatgatgacggcgcactgcatgcggagcggcatgagttgccttga

SEQ ID NO: 531761 - DNA, 837 bp, Stenotrophomonas maltophilia
atgccggtcaaccccagcagtgggggtttggtggccgacttccgctgctccaccagtgtggaggtcagctatcgcgggatcagccatggaggtttcattcccgagcgttatgttgaaagtggagcggcctacatggtgtatcccactggcgtgcagggcgtcggcgtggtcttcaacatggagtctccgaaagtaccaagaggcaagccgcttgctctggtctatgacgaggtggaactgttcgccgggcagagcggtaccgaattgggcatgcggatactggtcaagttcatccgtaccgggaacattcccaatggcagccacaccactaagatggtcatgccgatccagtcccgcctgtacgaagcggcagaccccgagccactgcgagtggacatgtacctggtgggctcgacactgaagatctccgacccgcccagctgcaggatgcgtacccaggaggtgaacatgggcacgctctctcccgcttcattcaatggcgtgggcagccatgctggccgccgcagctacgatctggcgctggactgtgaagccggggtgggccaggtggattaccaggtggtgcccaccaccgcggtgatcaacagcgaactgggcctggccgaggccagcggtggcgtgggcggggtggcctaccagttcctccacgcagacggttcgccgttgcgcttctatacaaccgacctgttcgggcatggcggtgcaagcgagcaggtactgaccaagacctttggcgtgcgttaccagcagaccctgcccaccatcacacccgggccggccaacgccggcctgatgttcagccttaccttcccatga

SEQ ID NO: 531762 - DNA, 750 bp, Stenotrophomonas maltophilia
atgaaatggtatcgacttcttgccgctgctggtcttctggctttgccgttggtgagcagggcagacatcgccatccagtcgacccggttgatccaccacgccggtgaacggatggttgcgcagcgcgtctggaaccagggcgacgcgccctcgatgatccaggcctggatcgacagcggtaaccgtgatgagccattggaggccgggcacctgccgttcttcgtgacgccgccgctgttccagctggaacccggccgcaatcgtgacatcagcgtgcggctggtcgatgccaaggcgcttcctggtgatcgtgagtcgctgtactggttgaacgtgctggacctgcccgctgcagagagagcggccgacacgatgaacatcgcgtatgcggttcgctggcgggtgaagctgttccatcggccaggaggactgcgcgggagccccgatgaagcagcgtcccagctggcctggcggctgcagaacggtggtgcggcaaccacgcacctgcgcgcgcataacagcacgccctaccatgtcagtctgcgcgaactcagtgtggagggtgctccgcttgaactgcttccggatcgcgcggtcatcgcaccgttctcggactggtcgatcgagcttccccccggcattggccggcgaccggttgcagtgaatgtggtctggttggacgatcaagcgcaggaacatacgctggaggctacggcggcgtgtgccagcgccggctgcgcggctccctga

SEQ ID NO: 531763 - DNA, 1008 bp, Stenotrophomonas maltophilia
atgaacattgaaaaggcaacatcgcgctggaagagcaggactgtgttggccgctgcgctgctgctgggcgcgtggacggcgcaggcgtgcactccacacaccgcgcagatgggaccgagcatggctgacaagtattgggtatatgaaggtattggcaaacctttgaccggttgggggcaactgatgacccctgatggaatcggcgagctgtttctgtaccagggttgcacgggtggctcgtcctatcaggttgaacatattcctgatctgccctactggggcatcgccgatgacggcgccgctgtgtttgagatcgcggagaatgtgggggtagagtttcgcgtctcgcgaggcttggaggggttcggtgcatcgcatccagtgggttccggtggtgtgacgctgaatgtgtcaggaggcgcgaacattcgcatgaggctctggtaccggtacatcgccatcaaggatgtcagtgccggcgtgaatctttacccgggtggatacacctggacgttcaacaatctggacgatgcgaccctcagcagctcccgatctaaccaaggcgaaacgatctataagtacgtcccgccgccgccgccgtcctgctggttcgtgcgcgcacctgcgaagacggtagcgatgccgcataccacggtcggcatgctggagcgcgatggcagcggtccccagagtgcgttcaactggagtttcaactgtatcagtgcaaccggtgctgccgtggagtactccccgggcaccagctccaccgatccgaagaccggcaagatggcaattgaaaaggttgcaggtggggcagaaggtgtcgagctggaggtgcggcgctcgactacatctggcggtaggaaaaatccagtggaatttggaaaatcctatgcccgggatacaagcggatcagagtaccttgaggtccgctatgttcccacgggtgatgaactgaagcccgggccggccaatggcagcctgaaggtgaacctggatttctactga

SEQ ID NO: 531764 - DNA, 2574 bp, Stenotrophomonas maltophilia
atgaaccgacatccgacagcttcgccgcgccagcatcgccttgccgccgccgtgcttgtcgcgctgcttccggcagcggcgatggcggccccggcgctggagttcaattccgacctgctgtacggcaatggcatcgacgtcagccgcttcgaacgcgatggccatgcgccgggcatctacagcgccgacatcagcgtgaatggcgccattgtgggccgccgcgatgtggacgtgcgcgatgtcgatggacgctcgacggtctgcctgaccccggagctgctggccatgctgggctttgatgaggccaagctggacgccgcacgcagcagcggcgagcatgccgatctgctgccgttccccgaaacgccaagctgcgaggatatcgcgcgcttcattcccgctgccacgctcaacctcaatatgggcgagcaggttctggaggtcggcatcccgcaggcctacatgcgttcgaacctgcatggctgggttggccccgaccgttgggaccagggcatcaacgccgccttcgtgaactacagcttcagccacacccgtttcgagtccaacgggcgcagcagcgaccataccagcgccagtatcgatgctggcgtgaatctgggtgtctggcgcgtgcgccacaacggctacttctcgcacagcagcgacagcgcgttcaactatgccgccggcaacatctacgcgcagcgcgagatccgtcgctggaacgcgcagctgacgctgggcgaagcctccaccgatggtgacctgttcaagtcggtgggttaccgcggcgtcaatgtcagcaccgatccgcgcatgctgccggagaccgccaccagctatgcgccagtggtgcgtggcgtggcgcagaccaatgcacgggtgaccatccgccagcgcaaccaggtcatcttcgaaaccacggtcagccccggtccgttcgagatcgacgacctgcgcaacatgtcggtcggcggtgatctggaagtggaagtgaccgaggcagatggccgtgtggaaaccttcgtggttccgtacgcatcggtgcccagcctgctgcgtcagggccaacagcgcagcagcgttaccgtgggcgaactgcgcaccaatggcgccaccgcgccgcgcttcgtgcaggccaccgtgcgccacggcctgggcagcgccttcaccggctacggtggcctgctggccgccgaagactaccgcgccatcgtactgggcggcgcgctgaacacccgcgtcggcgccttctccggtgacgtgaccttctccgatgcgcgcctgccggcctcggtagagggctttggtcgccgtatgcagggccagtcgtatcgcctggcctatagccgtacctttaccaaggccaccagcttcaccctggcggcctatcgctactccaccgacggctacctggatttcagcgacgccgcccgcatgcaggccgagctcgaagcgggcgtttcgcgcccgacaatctcgcgccagcgcagccgcctggacctgacggtcaaccaccgtctgcccaagggctcgctgtacctgcagggcagcaccaccgactactggagtgacaatcgccgcgccaccaatttcagcctgggctacaacggccgactgggtccggcgtcgtacagcatcagcgctcgccgcagcatggaatcgtcgctgtccggtggcttcaaggcggccagtaccggcggctacctgagtgtgcacatgccgctgggccgtgcgccggcctcgccgcgcctgggcgtcacagtcaacagcgaccgctatggcacgggctacaacggcaatgtggacggccagttcggcagcgatcgccagggtaactacaacgtgtccctgggtcacaatgccagcgggaatgacgtaggcgtggccgtcggctaccaggcgcccaaggccagcatcggcgcgtcgtggacgcgctccagcgcaagccagcagctcggcgtgtctgccagcggcagcgtgctggcacacgggcagggcgttgccttctcgcagcgcctgggcgacaccgtagccctgctgcatgtgcccggcgcggccaatgccgccgtgggtcatcagcgcggtatcaagaccaacaagaatgggttcgccgtggtgccttacctcagcccgtatcgcttgaacgaagtgtcggtggacccgaagggcctgccgatggatgtggagctgaaggcaggctcggtgtccaccgcgccgactgccggcgccgtggtcaagctggtcattcccaccgtcaccggccgcagtgcgctgatcgaggccatggacgcgagcggcctgccgctgccgttcggcctggatgtgcacgatgaagccggtgacgtggtgggtgtggtcgggcagggcagccgcctgtgggtgcgcggcgtcaacgaatccggtcgcctgtatgtcagtgcgggcggtgaagcgggccagcgttgcgccattgactacaacctggccggcgtggccggtgacgagctgcacgtcagccgttgcctgcaaccgtctgttgcagatctggcaacagggggcgaagcgatgggctcgcccggtgcacccaactga

SEQ ID NO: 531765 - DNA, 735 bp, Stenotrophomonas maltophilia
atgtccttcatcaacaggaatctcgtgctggctggagccatggccgcactgacgctggttgcacagactgcagaagccggcgtggtgatcagcggaacgcgggtgatctttccggaacaggagcgtgaagtcacgctccgtctgtccaacaccgcgcagactccgtcattggttcaatcgtggattgacgacggtgatcctcgtgccacgccggagcagtcggcgggggttccgttcgtgatccgtccgcccgtgtttcgcatgaatgccggtgccagccaggtactgcgcatcctgcataccgggcaacccatgccggccgatcgcgaaagcctgtattacctgaacgtgcttgacgtgcccgcagcagcgcccgcggctgaagggcaggcacacatgaagttgatcgtgcgctcgcgcctgaagctgttctaccgacccaagggcctgcccgccgtgggtgcgtccaaggtcgcctcgcagctggcctggtcggtgtcccgcgatgcacagggctgggtgctgcaggccaacaacccgagtgcctactacgtgagcatcaacgcagtgatcagcagccagcgtatcccggcgggtctggcaactccgtttgctacaactcgctatcggctcagcgaggcgcagtacagcaccctgggcaagacggtcacctttgaaatcgtcacggaccatggcgcggtgaaggaagtaaccgcaccgctcgcccgtccctga

SEQ ID NO: 531766 - DNA, 525 bp, Stenotrophomonas maltophilia
atgaacaagattgcaatcgcactgtccgccgcgctctcgctgggcgccatttcttcggccaacgccgccgatgccaccgtcaacttcaccggcaagatcgaagcactgacctgcaagttcaccatcggtggcagctcgacgctcagcgtcgacatgccgacgatttcggcggactccatcaacaccggcgccccccgcgaaaaggcgttcgacctgcagctgggcgacggtaccaccaagtgtgcggatggcacctacaccttcaccttcaatggcaccaacgtcaacgctgatggccgactgaacaatacggcgaccggcggcgatgaagccaagggtgttgaactcgccatctccacggagggcagcgagctgcacctgggcaccggcgaggtgaccaagaccatcagtggttccaccggtttcaccaatattccgatgattgcgcgctacgagcaggcgtctggcgcctcggcccagaacggtgatttcgccactgcaatggagatcttcgtctcgtactga

SEQ ID NO: 531767 - DNA, 198 bp, Stenotrophomonas maltophilia
gtgccaagctcgctcgatgcacgcatcgcagccttgatgtgccgtttctcgcaactcacgccccacgcgcaacggcggttcaccgaactgctcaatgcctatctgtatgcatccccggcgcaacgccggcaactgcgccagcgttggcaggcgcagcaggatgcggcgcgtgaagatgacgtgaaaaattcgaactag

SEQ ID NO: 531768 - DNA, 678 bp, Stenotrophomonas maltophilia
atgaacatccgcatcgtcatcgccgacgaccatccggtcattctggccggtgtgcgcgaagcgctcggcagtgagccgggcatcacggtggtggctggcgccgaggattctacggcattggttgacgctatgagcaagttgccggtggacgtcgcggtcaccgacttttcgatgcccggcggcaagtacggcgacggcgttgcgctgctgggtttcctgcgccgccgctttgccggaatcccgctggtggtgctgaccggtgtcggtggtacccaggtgctggccagcatccgcaaggccggtgtcgcctgcatcgtcgccaaggccgaccctatcagcgaactggccagtgccatccgtgccgcgcgcaagggcgaaggctatctttcggccgacgtcgagcgccagctggcctcgcagccggagtctggtgaggcgcgcttgaccaagcgcgaagccgaggtgctgcgcttgattgccgaggggctcagccagaccgagatcgccacgcagctgcagcgcagccggcagaccatcagtacgcagaagcattcggccatgcgcaagctgggcatgcagcgcccggcggagatcttcgagtacgcggtacagaccggcatggtgtcggcatcgcaggcgatgcgcgcgcatcgggtcgatcacgatgaggacgagtga

SEQ ID NO: 531769 - DNA, 645 bp, Stenotrophomonas maltophilia
atgacccagctgtccatccgcgttgcggttgccgacgatcacccggtgatacggctgggtgtgcagagcgtgctggacgaagcgccggcgctgcactgcattggcgcggcgcaggattcgaccgagctggtagcgctgctgcagcgcgagccctgcgatgtactggtcaccgactatgcgatgccgggcggcatgcatggtgacgggctggcactgctggacttcctggccgagcacttcccgcagctgcgtatcgtggtgatgaccgggctggaccagccgtcgctgctcaaccggctggatgcgcacggcgtgcatggcatcgtcagcaagggagatgatctgcagcatgtgcagtcggcggtgatggcggcctatgccaaccgccgctttctctcgcccagcgtggccgagatgctggaccgtcgcgagcagcgccgcgtcactgccttgtcgccgcgcgagcaggaggtggttgaactgttcattgccggcttgagcgtggccgagattgccaggaagctggaccgcaagaagcagaccgtcagcacgcagaagaacaacgccatgcgcaagctgggcatcgtgcgtgacgctgagctgctgaccttcgctgccgacctggggctgaagccgcagggctga

SEQ ID NO: 531770 - DNA, 2958 bp, Stenotrophomonas maltophilia
atggtggacatctactcggcctacaccgccgattcgatcacctcgcagaataccgccgggccactgctggtctatgcgtacgagccgcaggggcggctgctggcggtgtccaacatcggcgacgaatcccagctgctgcagaccctgggtgtggccacccgccagcaggcctttgcacggctgctgcaggaagaggcgcaggtgcgccaggcgtcgccacggcccggcccgatccgcgaggccgcgcgcgagggacgcctgctgtcgcgctatggcatcaaccccttcacgggccagccgtcgctggtcggcatggtcaccctggccgaaggcaacacgccttacttccgccgggtggtgttcgaatccatcggcaccatcaaggcccagctggaggcgcgcgagcagggccgctacctggtcgccaccgcagaccgacaggtcgtgctcagcaccggtggcctgaccagccaggagcggaacctgctgatcacgctcccgccaggcagcgcaggtggcgcgggcacgcagccgctgcgccgttacagccagggccggttcgtggtggcatgccggcttccgggcgtggactggacgcttggccacgtctacgactggtctgatatctggcgcagccaggggccctacctgctggcgcgcacgatcagcgcattgctgatcatcggcctgctgtggtggctgctgcaacgcatcgaccggcgtgttttcagtccggcgctggccgatgcgtcccgcgtgtacgagagcgaggcgctgagccgggtcatcatcggcactgcgccgatcggcctggcgctgctgtcgcggagcaacggcgagccgctgctgcagaacgacaccgcgcaccagctggtcgagaccgtgcatgaggccggcgaggacgccacgctgccgccgctgtacgcgcgccttgccgagctggggcgcaatgccagcatcgatgaagtgctggaactgcagtggtctccggccgagtcgggcacggccacccagctgcagatcagcatggcgcaggccacctattacgaacagccggtgtgggtctgcgcactgcgtgacgtcaccgcccaggtggaactggaagacaacctgcgccgcgcacgcgaggactctgaagccgcacgccagtccgccgaggcggccaaccgggccaagtccgccttcgtggccaccatgagccatgaaatccgcacaccgctcaatggcgtgctgggccatctggaactgctggcccgttcgccgctgcagccagggcagcgtgagcggttggaccgcatccgcttctcggccgacgcgctgatgcgcatcatcagtgacgtgctggatttctccaagattgaagccggccagctggacgtggagcccgtgcctttcgcgttgcgcccgctgatcgaaggcgtggcgctgctgttcgcgcccgatgcgctgcgcaagggcgtacgcctgtacttcaccgtggacgcggcggccgaccagcgctgcgtgggcgatgcccatcgcatccgccagatcctcaccaacctggtcggcaacgcggtcaagttcaccaagtccgggcgcatcctactgcgggcagagctgcaccgcgcggcggggcagggtgctcagctgcgcgtgcaggtcatcgactcgggcatcggcatgagcccggaacagaccgcgcagctgttccagccgttccagcaggccgacgccagtgtttcgcgccgctacggtggcagtgggcttggcctggcgctgtgccagcagatcgcccaggccatgggcggccaggtgtcggtggaaagcaccgaaggggttggcagcagcttcaccctgctgctgccgatgcaggtacaggcgctgcagccaccgcccgcgcagccgctgcttggccggcgggtgactgtgctgtcaagcacgcccgaatggcgcaccgagatggagcgcctgctggtcgcgtggggggcgaccgccaccgtgctggaccgcccgcagagcgacgacgacggcggcgatgcgctgctgatcgtgggcgaccaccgtgcgtggagcatcgacgaagaacaacagctgatgcagggctacgcgcgcaccgtgcatgcccatgcgcagggcccgctcagcgcggaaacgcgtggcgaccgcatcgaggtcagcagctatgccagcgaggccgtgcttgaagcactggggcccggcgaaagcgcggacggccgcacgcctgccgccaggcccgcgcaggtgccggcggccagcgaggcgcgcgggcgcgtgctgctggtggaagacaacgcggtgaaccgtgagctgatccagcagcagctggaagagatcggctttgcggtggacaccgccgagaacggcgaggaagccctggcccaatggcaggacgaacgctatcgcgcggtactgaccgacatcaacatgccgctgatggatggctatgcgctggcgcgcgagctgcgcaagcgtggccagtcgctgcccatcgtggccatcaccgctaccgcactggccagtgagcgcgagcgttgcctggcggccggcatcgatgatctgctgctgaagccgctcaacctggaacgcctggaggcaggattggcgcgctgggaatcgtcatccggcaaggttgaacgcacgccgcccacccaaccggtgccgcgaacagtctcggcggcgatccgcaggatcttcgtcgagaccggcgacaaggatctgcaatccatcgccgacgcccgtgcgcagggcaatgccagctacctgctggagcgcgttcacgccttcaagggggcattgcagatgctgggtgagcggtccctggccgagcagtgcggcgccatcgagcgcgacctgcgcgaagcgatgccgctggacgaagaagccctcgacgcgctgcaggccgcgctgcaggcacgcctggatgactatcggcgtgatctggagcagccgtcgtga

SEQ ID NO: 531771 - DNA, 2682 bp, Stenotrophomonas maltophilia
atgacgtccgccgccccttccattgcagataccctgcgccgcctgcgtacccgcacccgggcgggcgcggcggctgcaggcgaactgctggcgctcaagcgctatccgcggcgcctgatgctggcctgcggcgcagtgctcagcctgttgtcgatcagcgtgctggtcaccctcatcgtggtgcaggtgaacagctacgaagcgcgccgcatcgccgaattccgccgcgcccacaatgcgctgcagatccagctgggccggcaggacgccagctatgcacggctggccaacatggccgagtacgcgtggggccggaacatccagctgggccatcacagcccggaggcgctgcgcgcagcctacctgcagggcgaccagcgcctggtggtggtggccgacgacggcagcaagccgcagatggcactgggcctggccactgcaacgtgggcgccgcgaacgctggagcgctacctggagttgagcgcggcggtgtcgctgatccagcggctgaccagcacgccgaacgacggcgaaccggccagcgtgtcctatttcttcgaccccagcggccagtatctttcgctggacaagggcctgaccgagcgcagcctgcgcgaggcactggcggtcaccacgcgtgcagaagtgttcgagcatctgcgggcgccagcgcatctgctggcaccggcgtccagcgtcgaccagatgccgttgctggaaagcgtcgccagcagcaaccagccgcgtcggagcttcgggcgtcatccgatcagcggcgaagcgtcactggtgtcggtgttccaggccagcgaggccggtcgcccgttcgccaccttcgtcgcctatgagccggttgcgggcctgcaggccctgctggcccgcaacagccagggctacctgtcgctgcttgatcgtgacggcctgcgtctgttgagcgccaaccagcccgcggcggcacgccacggtcccggcgtggatcgcgactgggtgctgctcggcgatgccacccgtgcgcgctaccacaacggtcgcttcacccttgcactggcggtggaaggcacgccgtggacgctggtggaaacctactgctgggcagacatcctgcgcggcattaccccgatgctgttgagcagtgcggcgatgctgctgggcgggctggtgctgctgtggggcctgctgctgtggctgcatcggcgcatgtactcgccagcgctgcgccaggtgaaggcgatctatgcccgtgatcggcgcctgcgcctgttgctggaacacgttccggtaggcgtggcattgatggacgcggccaccggtgacatccaggactggaatggcccgttgcaggacatggaccgggccaccggggcgcggttgatccagcagctgcgtgcagcagtcaccacggctgacctcggcaacggcccggtgaccctcagcgacgatctgccgcgcatgctcgatcacggccagcgcctgcatcaccgcacgcatctgtacggcggcaatggaagctggccgggcagcgtgctgctgatcgtggaggacatcagcgaccatgtgcgtgcggtccagcacgagcaggtgcgctgggccgaagccgaggccggcagccatgccaagtcgaatttcgtggcagccatgagtcacgagctgcgcacgcccctgcacggcatcatcggtcatctggaactgctgggccgtgcaccgttgccggccgaggccagcgaacgggtgctgcgcctgcgccagtcggccgatgcgctcatggatgtcatcaccgacgtgctggatctgtcgcgcatcgagtcggggcaatggacgctgcaccccgagcgcttctcgccggtggcgatgcttgaacgcgtggctttgttgtatgccccggtggcgcaggccaaaggcctgcagctggattgcgtggtggacccgggtgtacccaccacggtggtcgccccgatgggcacgatcgagcgggtgctgcgcaatctggccagcaatgcactgaagttcaccgcctcggggcgggtgcagttgcgcgtgtcctgcctgcgtggcgagggcggcagccatctgcgcctggaagtaaccgactccggcattggcctcagcgcggacgagtgcgcgcgcctgttccagcccttcgtgcaggccgatgccagcatcctgcagcgcttcggcgggtccgggttgggcctggccctgtgccagcagctgtgcgaatgcatgggcgggcgcatctgggtggaaagcacgcagggggtcggcagccgcttcatcgtcgaggcgccgctgctgggcacgcccagcgtgcgcccggccgtgcccttgcagggccactcgatcggcctgctggcctcggccgggccgtggcgtgacgagctcgggcgccggctgcaggactggggcgcacaggtgcagtacctcaacccgttggaacacggcgccccgtccgttgccgacttggccgccatcgtgctgttcgaaccggcgccggaccagctgctgcgcagcgccgagcacggcattccgcgcgtgctggtcagccgcgatgggccggtgcgggcgcgctgggacgggcagaccgccatggtgtcctgctacgccagcaatgcgttgtaccaggcggtgcagcaggccctgccagcgccagccacccgcctgacagcccgtgctgcaatcggatag

SEQ ID NO: 531772 - DNA, 864 bp, Stenotrophomonas maltophilia
atgcaggggcggaggatgcgggaacgcgtatgggcgctgaagctgatgctgggccatgcctgccggtgggccggactgcggcttggcgtgctggcatcacgcctgttgcccggctggctgcatcgctggcttgccgaacaggccttcacctggttgggcccgatgctgctggcgcgccggttcatccccctgcgcgcacgcgtgcacgcctcagggtgcacccagacggaggctacccgatggacggcacgtgcgttggcccgcgcctggctgcgacgggtgcgccggcaccacctgctatcgctcccgcaggccgtactgcaacgtcacctgcgaacaatggcctggcacgacccgcacggcctgtggccggctaccgccggccgccgcggcgtggtctgcctgctgccgagcggcgacgccgagcttgggctggccgcggcattggatcgcccgggcgccccggcacactatttcgtgcactgcccccatcacgagcagtcgcgcgcgtaccgcacgctgctagcgctgcagcgcgtggggcaccggttggacgtggatcgcggtggaacgcgcggcatggcgtggcgccagctgcggcgcggggccagggtctttacgctgctgaccatgaatgacgtagccgccagagacgcggtgccggcgccgctccgtcttgcacgactggccggcgtgccggtgctgctgctggggcatcgttgcgacggagccggcgccggcacgctgcacgttgtgggcgaatatgctggcgcggcactggatgccgggtccccccggtggcttgaatccgcccgccgcttccttcgtgcatcgccccatgactgccacgccgcggttgcctga

SEQ ID NO: 531773 - DNA, 7221 bp, Stenotrophomonas maltophilia
atgtcgcatccgctcacgaccgcttcgcgcccgtccacgctgcgccgcagccacccgatggcctgggccgtcgccgttgcgcttggcacggtggtggcgccggccagccaggcccagcaggcattcagcccggcctggtttgccgaccgcggtgccgcccagggcgcggccgcgcagagtggacgcatgcccagcggggtgccgatccagttccagctgcccgcgcagcagcaggatgcagcccgccagcagctgcagcagtcgatcgacaacctggggaccgctgcgcaggccatcgcgctgcagcaacggctgcagcaggaagccaggcaggcgcggcgtgatgcgggattcgtggtcgccgacgggctcggcaaggacggcctgaaggtggatgagaacccgctgacgcggggctggaccaacgcccgcgaggccatccaggcgcagggcgccgatggccgcgtgcaggtcagcatcgaacagaccgcagacaaggcgatcctgaactgggagaccttcaacattggtgccaacaccacgttgaacttcctgcagaaccctgactgggcggtgttgaaccgggtcaacgaccccaacgcgcggcccagccagatcctcggccagctgaaggccgacggcagcgtgttcgtggtcaaccgcaacggcgtgatcttcggcaacaacggccaggtgaacgtgcgcaacctggtggcggcggccgcgcggatcagcgacacgcagttccgtgatgaaggcctgtacagcgtcaacgccagttcggatgcgctgaccgaggcgttcggcaaggtgatggtggagcgaggtgcgcgcattgccacccatgagcccaccacggccacgcgcgggggcggctatgtcctgctggcggggcgcagcgtggagaatgccggccagatcgacacccgcaagggccagacccagctcgccgccggcgacagcttcgtgatccggcgcggcgtgggcacggcacagaacacgtcgtccaccaccggtggcaacgagatcgcgccacgcttcgtggcgggcagcacggcaggcgatgtgcgcaacagcggcctgatccaggcacgcgaaggcgacatcacgctggccggacgccatgtcgagcaggccggcgttgcggttgccaccagcactctgaaccagcgcggcaccgtgcacctgctcacctccgccagcgatgccaaggccagcgtgaccctcggccgcgatgccaccacggccatcctgcttgaggacgatggcaagaccaccgcgctcgacagccagcggcaggcgctgctggaggagtcggcggcccaggacaaggtgcgcagtaccgccgcacagggcgcgttcgacaacctgtcgcggctgcaggatcggcgcgaccagtcgcgcgtggaaatcgtctccggtggcacggtcgaggcccaggccgggtcgctgaccctggccaccggcggccagatcgtggtcgacgcgcgccagcgcacgctgctgggcgatggcgcacgcgtggatgtatccggtgccaccggggtgaaggtggcgatggagagcaaccagctggaaatcaacgtgcagggcaacgaactgcgcgatgccccggacgtgcgcgatgccggcacgctcaacagcagccgggtctgggtcgaccggcgcggcctgatctacgtgccggccggtaccggcggccatgaaggcgaacgctggtatgccggcggagggttgctggaagtgagcggctacctgggcaaccagcgccactccatcggcgaatgggccgcgcagggcggcaccgtgcagcttgccggcagcgaagtggtcagcgccgcgggttcgcggatcaacctgtcaggcggcagcctcgatgtggccagcggcatgctcaaggagagctggctgcgcggcaacgatggacagctgtatcgcctggacgacgcgccggtggatcgtggattcgccggcctgtatcgcggctttgaagtggaacaggcgcgctggggcatcaccgaggcctggcgcaatccgttgatcggcaatgaatcgcgttacgagaatggctacacggtggggcgcgatgccgggcggctgctggtttcggcgccgaccgcgatgctggaggggcagatcgatactgccgtgttcaatggcgtgcggcagacgcgggcaccgggcagcagcaccgatggctacgtgcagtcgcagacggcagtggcacgcggcgcgcagctgtggctgggacgctacgacggtaccggccgcaatgcggtgttcgactcgcaggtgcgtatcggcgcggccccggcggccaccgcccgctggagcctgcaaagcgcgctggatgagagccggcgcaataccgtctggctcgatggcgcacagttgagcgcccagcagtggggccggctggacctggcgacggcgggcggcatccgcatcgacggtgagctggcccttgccgatggcgggcagctgaacctggtcggtggccgcgtcgacatcaacggccaggtccggattggcggtggcagcctgactgccagcaacctcctggccgacgccaccggccgcatgcaggtggtgcaggccaacggccgtggtgtggtcgcactgggcgaagcggcggtgatcgacctcgacgggcgctgggcaaatcagcgcctggacggcggcgccggcagcgcgcaggcgtggatcaacggcggtcgcgtgcagctggaaagcagccacgatgtgtcgttggccgcaggcagccgcatcagtgtcgatgcgggtggacgcgtcgacctgcagggcaaggccagcgcaggcaagggcggtgacatcgccctgctggccgacagcagccaggtgaccaccgacggcagtgggcgcttgcagctggacgggcggctcagcggcctgggcggcacgggggccggcaccctgcagctggcgaccgggggcaaggtgacgttggctgaccgggcccgcgacgatggcagcctgtggttgtcaccgacgctgctgcgcagcggattcggccagtacgacatcaacggccatgccgggcttgaggtggccgatggcacccggctggacgtgcgcgcaccgacgttgcgcgtgcgccaggccgctgccgatgcagcgaccgcagccgagggcctggagacctggactgcaccgctgtatgccttcgacccgggcagcgggtcggttacccagcggcagggcgcaagcgtgctgctgcgctcgcagcgcaatacgctgggcggtgatgtaaggatcggcagcaacgctgtcgtgcaggtagattccgggcagtcgatcgagctgcgcggcggtggcaacatcgacgtggccggtgcactgatcgccaaggcaggcagcatccgcctcgatgatgtccgcgacaaccagcagcgctaccagatcggcggcaccccgctgcgctatcgcatcggcagcaacgcgctgctggatgtgtccggcgacagcttcgccgcagaggacgccgcgggacgccaccagggcgtgctgcattcgggcggcagcatcgggattggcggtacgctggactgggagtcgcgcgatgcgctggagaaccgcccgccggatgccttcgtagtgatcgagcggggcgcagttctggacgcgtccggtacccgcgagacgctgacagtggatggcagtggcacccgttcggtggccagcgacggcggcacgatcgcgctgcgctcggccaatggcctgtacctggatggcacgctgcgggcggcggccggtggcgtgggcgcgcagggcggcacgctgggtgtggccttcggcggtggggtgtacgagcgccgggcgggcgctgcggagcttggcccgcgtgcaatcaccctggtgcagcagtccagcgatgcagcccccggctcgtccacgccattgcagcacgggcacgccgagctgtcggcggcacaggtgcaggccggtggcttcgaccatctttcggtgttcggcgatcttcgcgcccaaggcaatgtcgacctgcgtgtggggcagagcctgcgcctgtacgggctgagcgacgccgcgatgggcatggccaccggcagcgcggcgggatcggccttgcacgtgcaggcgccttatgtgcgacttgcgcaggcacgctggttccgtgacacctcggacaatccctttgtggcgccggtggcagcccgtgccgatgccggtgaccacagtttcagcgcctcggcacaggtgctggacgtgcgcgatacggtcgatctggccggcttcggcagcgcccaccttgccagcagtggcgacctgcggttgctggcgaaagtcagtggcaacagcaacttcttcgatacccagctgctggcgtcgtcgagcctggacatcacggccgcacagatctatccggttgccgggaccaagggccgtatcgcggtatcgatctacgatgtactgggtggacagaacaactggaccgacgccaagggcgtgcttcgcatccatggcaccggcaccacgcctcctgcggccgattcggtgttcggttcgctggcgttggttgccgccacggtcgagcagggaggcgtggtgcgcgcgccgctggggcagctggtgatcggtggcctgggcccaggcagcaccgcctcgcgcatcacgctgctgcccggcagcgtgacctcaagcagcgcggccggcctcagcgttccctttggtggcaccgtggatggacagcgctggcgcctgaacggcaaggatgtcagccccagcctggtgggcatgatcaacaccgtggacatggtgggtgtcgacctgcaagccaacagtgtcgacatccaggccggtgcgctgctggacctgtccggtggcggcacgctgaccggcgcagggttcgtcagtggccgcagcggctcggtggacgtgcgcagccatgcactacgtgacgccaatccggcctacaccttcagcgccagcagcaacgcggtgtatgccatcgtcccgacctaccgcaacggcaccgcgccgctgggcctggccgacggcagcgccgacccgggcatcggccagcgcatcacggtgcctgaaggggtgccgggcctggcggcaggcacctatacgttgctgccggcgtcctacgcgctgcagccgggcgccttccgggtggaagtgggggcgcagggcacgcagcaggcgctggccaccgccaccggaaccggctcgtggaaagtcagcggccagcaggcgcaggggcttgcgccttccgcatcgccgttgtggacggacctggtgctgaccccggccgacgtggtgcgccgccactccggctacaacgaaaccggctacaacgcgttcgtgcaggaagatgcagcgcgccgcggcatcgcgcgtggcatgcagtcggtggacgccggcacgctgcggctcacgctgggcgccggtgcggggctgggcaccacagacgccctgcgcatgcagggcatgacacgtttcgcggccgaggccggcagcaagggcttcggcggtacggtgtcggtggtcggcaatggtggcccgagcaccctggaagtgctcggtgcaggccagcgcgcgagcgtgggcagcatggcggccattttcgccgacgcgctcactgcgttgcagccctcgcgcctgatggtcggtgtgaccctgcgtccggacgccactctgcctggcacgctgaatgtgagatcggaaggcggcggcgtgctggttcgatccggtgcaacgctgagcgcccccgaggtgatcctgggcgccgcggccggtggcgcgggcgtggtggtcgagcagggcgccgtgatcagtacggtcgggcgtggcaaacccggctacgacgccaccgatggctacctgatgaagctcgacgcgagcacgggcgtgctggccgtgtccaacggccagaccaacctgctgtcgggaggcgcggccgcccgcgttgcgatcgatgtgggcgcctgccgcagcgacagctgcaccgggcagacccggttgctgtccgagggcagcatcaatgtcagtaccgagggcgggttccagctgcgcgacaacgtcagctatggcacgcgccggttgggcctgtcgatgaccgccatcaacctcggtgatgctgcatcgctgcaggcgatggctgctcagggtgccctgccgcaggggctggcgctgaaccagcagaccctgcagcagctgctgcggggcaataccgcgcttggcacgcccgcgctggagacactgagcctgttcgcacgcgacgcgatcaatgtattcggcagcgtggacctggacacccgcaatccggccaccggcaacagcagcctgcgcgagctggtgctgggggcgccggcgatccatggctacggcaaggccggtgaccaggcccgcatctatgccgacacgctggtatgggatggcacacaggcggtatcgacggtgctgaccgacggtaccccgcaggcgccgggcgcggcgatggtcgatcggctcggccatgggcagctcgagctcaacacgcgctcgctgatcctgggacgcgcgccttatacacgccccagttcggaagtgccggccaaccgccaggtgctcgggttcgacggcgtctcgctgcgggccacgcagcaggtgcagttcgccggcaagggcacgctggatgtctaccaggcccagggcgcctaccaggccggcacgggctggcagtacagcggcggcgcactggacatccaggcaccgctgctgaccggcgcggcaggaagcaccctgcaggtacgcagcgggggtgatctgcgcatcagcggcgcaggccagacccaggggcacgatgcgctgggcgccgaactggggctgcaggcacgcaacatcctgatcgactccgccgtggcgctggcctcgggccgcctgcaggcccgggcggacggcgacgtggtgctgggcagcaacgcccgcatcgacctggccgggcgtcgcatccgaatggacgatctggacaagtacagctggggcggcgacgttgaactcaccgcgcgccagggcaacgtgctggctgccgctggctgccgctggctcgagcatcgacgtctcggcatcgaacaaccgcgcagggcggatcaccgccaatgcgctgggcgaaaacgcgggccgcatcgacctggccgggaccctgcgtggcggcgcgagcggtcgccaggccaccggtggcagcacggtgccctatga

SEQ ID NO: 531774 - DNA, 708 bp, Stenotrophomonas maltophilia
atggccgaggccttgctggtggacggtcggcgaacctggttgaagcagcacacgggcgagcggcgcaggctggctctggccgtgctggatgtggcggtgcgcctgctgggcgtacgctgcctgcggccaccgccgcggctgcctgccgggctggcgtgtgagctggagcatcgtcggctgcacgaactggccacacgcggggtgccggtgccacgcgtactgggccacggtgaagccacgctgctgctggaggacggcgggccgagcctggcgcggctgctgcgtcgcgccggaccagctgaagccgagcgcctgatggggcttgccgccagtgagctgctgcgcgcgcacctcgccggatgctgtgtcggccagccggtggcccgcaatatcgcggtggacacgcgggggtgcctgcgcttcctcgatctggaagaggacccgctgcaggtgatggcgctggccgaggcgcaggcgcgtgactggctgctgttcaccagtggcagtgtgcgccacgcccgcctgccgcttggcgtgctggctgcagtgatcgggcactgccttcgccagtgcacccccgaggtgcagcggcaggtacgtggcgcggtgtcccggttgcgcttcctgccagcgctgtgcagattcgccggccgtcgcgcccaaggcctcggtgacagcgtgctgatcctgcgtcgtgcgttggcctga

SEQ ID NO: 531775 - DNA, 510 bp, Stenotrophomonas maltophilia
atgcgctcctggaccagcctgttgatgctgttgccggctctgccggtggccgccgaaaccggtccatccattggcctgcagctcggtcatggccgtggcgactaccagcgtgcagggttgatctgggacagcggcccgttgtggcggcgcgagccggcgtcggggcgtccgttggagctggcgatggagctgggcttcgcgcgctggcaggccagtgacccgcagcgccagcacgcctggcaggccagtgccattccgatgctgcgctggtggccgaatgcccacctgttcgttgaagcgggcattggcccgacgctgttcgataccacccgtgtaggcggtcgtcgcatcagtaccgcgttccagtttggcgaccacctgggcatcggcctgcgcgtggcagaacaccacagcctgtcgctacgctattcgcattattccaatgcaagcatcaaaaagcccaacccggggctggacctgctgcagctcagctggcgcgtggagtactga

SEQ ID NO: 531776 - DNA, 1305 bp, Stenotrophomonas maltophilia
gtgctgcgcttcttcctgcgcctgctggtgctggccagcgtcggattcggcgtggcgctgtggacggtgcccctgttgctgcaggagcgcttcagcagcgatgccgacgcctactaccgtgatgcggtacgcggaccgttgttcacgctgggcgagctgctgcagggcagggatgccgcacagcgcgaggccgagctgcagcgcctggcgccgcactatgggcccgcgcttgagctgctggcagccgatgcggtgcggccgcgggccgaggaacagcgggccctcgagcagttcggcctccttgcccgcaacgagcagcaggacttctaccggctgctgccgggacacgccggcgcacccgcgcaatggctgcatctgcggctgcccagttcaccgccgcttgacccgggctcgatcgcgctggcggtgctgctgctggtctcggtgtcggcggcgttcctgctggcatgggcctggccgacctggcgtgacctgcaacggctgggcgcggccagcatgcgcatgggcgagggcgacctcaacgcccgcgcgcgcatctccgagcgctccagcgtggcgccgctggcccgtcagttcaaccagatgggcgaacgcattgccagcctggtcgcacgccagcgtgagctgaccaacgacgtctcgcatgagctgcgcacgccgatcgcccggctgcagttcgagctggatctgctgtctgccgagacatgtgcagacgcacgcaggcagttgctgcaggagatgcgcgaagacctgcgcggcctggacgagctggtcggcgaactcctgttcgaggcgcggctggaacatgtaggccggcgcctgcagcaggagcgcgtggatgcccctgaatggctgcagggccagctgcgcgtgatcagtcgcgatgcgcagggcagtggcatcacctgcgaagtggtggagtgcgtgccgccacaggtacagctgcacccgcactacatggcgcgggccaccctcaacctgctgcgcaacgcactggggcacgcgcgttcgcgggtgcgcctgcaactgcagcaggacggcgatcattggcagcttcgtgtctgcgacgatggcccgggtatcgctgccgccgatcgtgagcgcgtgttccagccctttacccggctggacctcagccgccagcgcacgaccggcggtgttggtctcggcctggcgatggtggcccgcatcgtggcctgccaccacggcagcgtgcgggtggaggacagcgccctcggcggggcctcgttcgtgatgcgctggccggtggccgcgctgcactga

SEQ ID NO: 531777 - DNA, 489 bp, Stenotrophomonas maltophilia
gtgatctgttttcctctgttccaccatgcccgcggcgtcctgctgctggcgtcgttgtccggcgatggcgcttctgcacaggcgctggccgagtgggagcagcagggacgtgccgatggcctggtgcgaccggataccccatgccaggatttcctgcaggcgatggggcggaagcctccagggctggaatacgtgggttgcagccaggacgacgcgtcctacatcaagccgatggaagcccactaccgcgttgccggcgcacgcgccgagcaggtcgaagcgtatctgcatgcgacgtttgggatgccgatgctgcgctacacctgctgtggctggagcaatggtgcgccttatacctggcgcgaaggtccggacgcggcgcgataccggatcgggatgggcgtggaatcgctaccgcacgagcgcagcgagtggcggcgcatcgaggcgttcaacgtcacggtggaggtgttgcggcagagtccctag

SEQ ID NO: 531778 - DNA, 717 bp, Stenotrophomonas maltophilia
atggagggccggttctcccgtggccagttccggacgcttgcccgggttttcctgtcgcggttgtatggtgtggatcaggacggctacctgaggaacgtggatgcaggggcgagggccccggtccgctgcagtgtgcgcgtagtgctggatgatgaagatggtctcctgcaacggacgctcgggtcgattcgccgtgaacagatgtctggtcatatgcaggatgacgcacgggtggtcgtcgtccacgtggggttcaacggtgtgaccgagctcttcagcggccgaccagaggtgctggtccgcagcgcgcgcgcattgatggacgtcagagatgttgatcgtgatgttgatcgcgagctccagtggttgaccctcggtgcatggatgtccggtgcgatggattcaatcgcggatccggaaggacgggttcctccgctcgatggcgtggaggcgcgggacgcctactgggatggcgtctcctatgaggacgacgacctgtggctgcgccatcactaccagccaccgcgcgctgctggggatggcggccgggggcgccatggaggttccggaggcggaggagacggtgaagggccacgcggacccgaggatggcggtggatcggtgccgggacatgggggcgtgatggaggtgcttgatcaccctgttctgttcaccgccgccccgagcttgctggacgacatcctgagggatctgtga

SEQ ID NO: 531779 - DNA, 1581 bp, Stenotrophomonas maltophilia
atgagcgcgactagcacagcctctacacccgacgacgcgctggatgtaatgcccctgcttgcgctgaagatcgcgccgcggcagttcgatctgagccatcggttctccaacatcagcatccgtgaccagatcgtgcgggcacagatgctgatccagcagctgtacaagctgggtaccgtgggtgccggtgcagcgaaaacggatccggccccgaccttcgatctgctcatctgcggtgccggggcagcgggcctggccgcggcgctcgaggccgaacggctcgggttgcgtttcattctcatggataccgattcacacgcgggcgtgggtggggtattgcgctctccggctgccaggtatgtcagtgcggccatgtacgaatggccgcacagcaaccacgctgatcaccgttacccattgaggtcggccgcattcggtgctgcagacgtggaactgcagctggatatggccagacccctccgagcatcgcacctgaggcataagatcagtgctgcataccatcggagcatgacgaaatggactcagagtgcgatgagctggggcgctgaatccctgattcgcagcgactcctgtttcgtgaaaggggcacgacttgggcgccggtccaaagagctgctgaagtcgctgatggtcgggcggatgagcgtgcatggcatcccgcttcagtttcgctcgttaccgtctatccgcattactgcgggaaaaaagaccgagttgcaccgcttccgcttcgtgatctacgcaatgggctacgccaaggagaaaaatcagtatgccgaaggcaaggactgcccggatgcctactcgaacaccggattctgggagcgcgacaagatcatgcagccagccatgggcttccagacggtgggcaccccgcgagtggccatactgggctccggtgacggtgctctgcaggatgcattgcgatgcctgttgaagagcgatcatccgcttgacgcctggaacggcatcatttcgagggcaggggtgggcgggtctgtcgagatcagccaggcaatgcgcgagctggcaactgctgacatgcatgcgtccatggcggccacctggagttcttcgccagcgatctacaagcgcttggacatccgctttgcccttgtcgccaggaagctgctgaactcaggtaaggttggctcagctgtgagcgaggccgtgctggcgatgttgcgcaaggacgtcagtgaggtgatgctggtgacccactcgggatatttcagcaaggcgtacgcattgaacaggttcctgctgatcctgctccgtcgaatactgaggcgccgccatgcaggcgacaggctgcctcgcttgattctcagggctggcccggtggagaatttcagtgtcgacggcaccgccaagacccagagaggcggtaagttgcagttcgccgccggccccgagacatttgatctgatcattgtccgaggtggattgaagacggataccgagagtgcgtttccccaccgggtcggcctgtccgggcgtgatacggggcgagcgggccttgggcgaattcccctaccgatccgtccgccgcttctttga

SEQ ID NO: 531780 - DNA, 414 bp, Stenotrophomonas maltophilia
atggccaagccccgtgaattcaagagactggtggcatacctgcagaagattcctgcgatgtccgagcccatccactggcagcgctgcgacgatggaacttggtctgtcggcttttcgcttgttttggaacacccgctggcgtggagcgcggtgcaggagttggcgtatgtgctcaacacgctttctgtgtcggagctgctccccactcgtttcctgcccacggcgccaccaccctatctcaatggtcctgcatgctggtatctgagctggcgcatcgaatcgacgctacccggcatcaagcctgatgaggtgcttgagtggcttgaagggcggttgccacggccggtagacgacgaatcgaagtggataccatccatagttgaagactacgaatcgcctgaggatgaagtgtga

SEQ ID NO: 531781 - DNA, 273 bp, Stenotrophomonas maltophilia
atggacgagcacattcccgaaccttcgctcccacctgaccagtgcataccctatggatccggtcccacccctgcaccgccgctgcaggtgggcgcgtactaccaggtggtgctctctgggtatacgccggatagcctggacgatggaacttcgggaaagttgcgtgtgttcagagcctgctttcacctgcgtcaatccgccgatggccgcgagttgaagcctgtcgtggtgacctgcggggatgtgccccaatcttcgctgcccccctcatga

SEQ ID NO: 531782 - DNA, 750 bp, Stenotrophomonas maltophilia
atgatctgtagtctttcgcgtggcgtgctgctggtcgccatggccacctccgcaggagccaccagtgcgacatcgacttcgtcggtgtcgctgatgagcacgtccgagcacgcgtcgctgatcgagacctggcattccgcaggcgacggcatgccggtcgccaccatgtcgacccgccactatgccaatgatgagttgtcggtgagctgggacgaccagcaggtactggtgttgtgcaaggaggcggcctatctgaagattcccgccgccaagcagaaggccggtgcgttgaccgccgagcagcggcagatgattacctaccaggcggtgatgtcggggctgggcgcgatcgcagccgtggccgaggcggcgggcgatgcggtgatggtggctgacgatggcagcgagctgcgcagcactggtgaaaacaactgggcctacggtgtggagcgccatgacgtcatcactcagcgcatggccgatggcgcgctgcgggtccgggtgcgcaagaccgagaccgtgaacaatgccaagcctgcttcaccggacgacatgttcagcaccgaggacgaccaggcggcgagactgtccgagctggtgccggtcggcagctggaccgaggtggtgatccatggcggcccgcgccaggcacaggtggatccggcgatgtcgctgaaaggatgggtctcaatgggggatgaccgtgcagcgaccgtggcggaggcccgcacgctgcatgggtgcaagtaa

SEQ ID NO: 531783 - DNA, 816 bp, Stenotrophomonas maltophilia
atgatctggcgaacatcctgcgtctttgtattctgctctttcatgggcgcctgtggcctgcagccaaagagcatgccaccgcaggtctcatccgcaggttacacatcggtcagctcgacccttctggcaggctggatctacctgcgcagtgaaagctatctacctggatcgaatcttgcgtccggcacgcctgagatcaaggtatgcgagtctgtcgcacacaggatccaacttgagatctacccgggcaccgagccagatgttgaaagtacctgccggaacatagacgcctccgccaccgaagcggagcgatggttccccaagcgcagcatccgctattcggtcatcatcgtgcctgaggggcaatccatttccgtgagcaggtggagctttggatatcgatcagcgcatcttgcgctggctgcgccggcattcagtagcctggagagacgagagggcaatcttgttgatctagtggcgcatgagacctttcatattctcggtcgcattgacggggatgcccgtgggcaggatgagtactatgcctactacgcgggcttgtgcactcagctcgccgttcttggggcgattcccgaatccgtcttgccaggagcgccgcttcaagggggcgtggatgaaccaacgcgggcatcttcggattcggcgtatcgggtgaggcgtgaagccgtgctgctgtcccgcgatggatcgatcaaggcaggcgacgatggcggcagagcactcgctctgcgctgcatcgagttgcagaaggtgacagcgcggccagatttcaatcgggccccgaacggatcgtaa

SEQ ID NO: 531784 - DNA, 1827 bp, Stenotrophomonas maltophilia
gtgaaccaccgatggatcgcctgcctggttctgctcggcctgttctgcgtcgcgaaggccgcgcccgcaggcgatgccgcggcgccctggctgcagtcagccatgaccagggagctacagcaacaagggctggccggcgccacctggtcatgggtggatgcagccggccagattcatactggcgccgctggacgggccaatgtggccaccgggcaggcgatgaccccggatacccaggtcaatgtaggctcggttacgaaaacactgatcgccgtgggcctgctgcgcttggccagccaagggcgcgtgaatcttgacgcgccggtcgagcccctgctggccggcattcgcttcaacaatccgtggcgtggcaggcgggacattaccctgcgccacctgctggaccacaccgcaggcatcgaagacctgcggctgtggcagatgttcacgctgcgcagcggccccgacatcccgctgaccgagaccttcaggcacgacacatcgctgctgacagtacgatcccggcccggggatcagttctcgtactccaacatgggctatacgctggccgccatcgcgcttgagcaggccgtcggcgagcgctatgaagtgtggctgcagcgggagctgcttgtccctctggacatgtatgacagcagttttgcactgttgcgccaggatcgccccgatggccgtcgcctcgcctgggggcacctggacaatcttcagccgcaggccacgaccagtttctggctgcggcccgcgggccagttcaccaccaccgccggtgacatgggacggctggccgtgtttctgcttggcgacggtcagctccacggtgcgccgttcatcgaccccgcctacctgcaccagatggcccgcccgcagcacaccattgcggcgcgtgcagggctggacaagggctacgcgcttggattgacccgccaggagcgtcagggcgcaattgggcgctgccataccggcagcatcgtgggctaccacgcaatgttctgcgtgtatccggagcaccgtcgtgcgttcttcgtttcccataataccgacgccgaagatgccgactatgggcgtttcgatgcgctgctcatccgtgcactgtcgctgccggcagtgcagcccaccaccaccctcccccttgcgaccggaagcgccgcctgggccggacagtacgtgatcgagtcgagccgcttcagccgcttccgctacctggacctgctctcgaataccttgtcgcttgacatagctgacgatgccagcgcgatgcgcatgcaacgccaaggcgtcaccagcctgctgcgaccggttgggccgggcctgttcgcagcaccgggcatggcgacggccagccatgtgctgctcggcgaggccgatgggaacctgcgcctgagcgacgggttgcgaacctggcgcaaatccaaccgcacgaccacgctgctgctctggggcaacctcctgctgggtgcaactgggctgtgctggttcctcctgacggtgccttggcgtgtccgccctgaccgtctgccacgcccctggcctgcctggagtgcgctgatcctcctgctggttccgctgccgctgctggctgcccaaggtatgctggcgatgggcgaccgcacgcccgccagcgttcttctgctgatagccaccgcgctggtcgcaccgctgctgctctggcaactggcgcgaagcctggcgcaccgccggcgatcgcgatggcacaccgccgacgcgctggccactgtggcggccctcgcttggctggcggtcctgggcgtaaaccgcctgctcccagtggcgctgtgggaaatttga

SEQ ID NO: 531785 - DNA, 780 bp, Stenotrophomonas maltophilia
ttgatcaccacggacggtaaccccagttgcaccactgcgtcggccaccgacggacatatcgaactgagcatcacctcgcgccagctgtacgccgatgtggccctgatccggctctcgccatgtggggccggcgcgctgcgtcatgggccgggacagtatctggatgttctgttcgccgatggccagcggcgttcgttttccatcgccaatgcgccttgcgagcacggcaccatcgaactgcatatgcgccttggtgccgatggtggaacgacccgcaaaggggtgatggagatgcaggtaggcgaccgtgtgaaggtggccggaccgttcggaacactgcatgacgcacttgcagatgcactcgcctcgccaccggcgaccaccattgtgctgatcgccggcggaaccggctacgccgcactccgggccgtggcggcggaagtactgcagaccttaccgacgcgcccggtgtacttctactggggagcgcgcagccggggtcagcattacgatgaggtcacgatgcgccaatggcaacggcacttccccaggttcatgtatgtaccggtggtgtccgaagacgactgcggcgaggacgcacgtgccggcgttccccacgctgctgccatgcaggaccacgctgacctctcgaaccatcacgtatttctgtgcggacctgccccgatgaccgatgcggccagtgccgcgctgctggctgccggcctgccggcagcacggctgcatcaggacacaccccaggccagcaggcgcgtgccgtga

SEQ ID NO: 531786 - DNA, 1389 bp, Stenotrophomonas maltophilia
atgcgcctggcctacgagaacaggatcctgttgatcagcctctgcgttggccttcccggcgccgccatcggcatcctctcgacgtggcacctgccgatctcgctctaccccagaattctgttgaccgttgccatccttgcgaccgtggctggtgctgccctgttcgtgcgccacagcatcctgcaccacatcctcaccctgttcagcctcattgaggccctgcgctgcggcgactaccggcttcgcggccgacatacccgtggcaaggcggaattgtccgggctgtacctctcgctgaacggtcttgccggaagaatgcaggaagagcgcctggccaccgaggaggcacgtcgtctgctggatgcggtactggtcaacatcgatgtggccatcatggcgttcgaccagcgccagcagctgcgtcttgccaatccggcagcgctgcagctgctcggtctgtccagcgccgaagcgctgggacgtgacgcacagacactgcgggtagcacccctgctgcaacaggacagcgcgctgggcgtactcgattatgattttcctgccgccagcggcacctggcggatcgaccgcgacgcacacctggaaggtagcaagtgcgtgcaactgctgttcatcgcggaccttcgcgcggtcctgcgcgccgaggagctgcgcgcatggaagcggatgacccgtgtgctggggcacgaggtgaacaactcgctcgcaccgatcgcctccatgagcagctcccttcaatcgctgctgctcggcacggatatgcgtgaagagctccggcaggacgtggacgccgggctgacccttatccacaatcgctcccagcacctgcgcagcttcatccgccgctatgcggaggtcgcgcgcctgccacgtccaaacggcgttcttgcggacctggtcggcgtgctcggcgggcttccccgcctgatgaacgacgcgttcctgttcctgtcggttccgccgcacccggtgcagatgttcctcgacccggaccagatggaacaggcgctgatcaacctgctcaagaacgctcgggaagcgtcgccttcggcgtccagcccgatccggctgatctgtaccgaagagaaggcccgctgcgtcatccagatcatcgaccagggccaaggtgtcgccaatccggtcaatctgttcgtgccgttctattccaccaagaagcacggcagtggaatcggcctggtcctgtcgcggcagatcgcagaggcccacggcggaacgctgcgcctgtacaaccagaccatttcaaccggctgcatcgccgaactcatccttcccaagccgttgttcgcacgcgacgcggccctggtggatccacgcgccctggacgcggtccgggttcatgcggccgattga

SEQ ID NO: 531787 - DNA, 1380 bp, Stenotrophomonas maltophilia
atgcagcccgaaccgccaattctgatctcggacgacgatgaggacgtgcagacggcgctgcggatcctgttcaaaagtgcaggatatccaagcgcggcagcattcagtccagagcagacgctggaaatgctcgatcagcaggattttgggctggtgatgatggatctgaatttccagcgtgacaccacatccggtgtcgaaggcctcgcgctgctggaacagattcgcgcccggcagccgcttctgccggtggtggtgatgaccggctggggcaatgtcgagctggcagtcagcgcgatgcggcagcaggccagcgatttcatcgagaagccgtgggacaacctgcggcttctcaacctcgtctccagtctgctggcgctgcaacgcagccaggaatccagcgagcgcctgcgcgaggaaaacaccctgctcaaacgcggccgcccgccatcccagtggatcgtcagctcgccagcgatgcgcaaggtgatgggcatcgccgagcaggtggccggcaccgacatcaacatcctgctgaccggcgagaacgggacaggcaagagcatgctggcgtcgttgatccacgagcggtcaaggcgcgcgcagagtgcattcgtggccatcaacatgagcgcgatcccggacacgctgttcgaaagtgaactgtacggccatgtcaagggcgcgttcaccgatgcgcgcagcaaccgcatgggacgctttgaactagccgagggcggcacgctgttcatggatgaaatcggtgacctgccggcggtgcaacaagccaaactcctgcatgtactggaatcgcggcagtacgaaaaactgggctgcagccatagccgcgttgccgacgtccgcatcatcgcagcaaccaatgccgacctgccggcgctggtcgacaatggccggttccgccgcgatctccactaccggctgaaagggatcgagatccacgttccgccgctgaggcagcgccgggaagacatcatggcgctcgcgcagggctgcctgcgacgctttgccgacaagtatggccgggctgtggacgggttcgatgaacgtgcgatccacgcaatggagcactacgcgtggccgggcaacgtgcgcgagttgacccacgtcgtcgagcgcgccgtgctgttggcgcggcatcgccggatcactgcggccgatcttggcctggccgataccgctgcccccgtgcctgcgcaggaactggccgagaattgggatgggttcaccttggaagatgcggagcgccagatgctgcagctggcgctccgcaggcacgggggcaatgtcaccgccgccgcgcgggcgctgggcctgtcacgttcggccttctaccgtcgcctcgagaagcatggctgctga
